United States Patent Application Publication US 2014/0325702 A1 - sequence listing, part 37

SEQ ID NO: 74689 - DNA, 911 bp, Heterodera glycines
atggctgtgtctgaaagaattagaaagtgtgtaattgtcaccaaacttgccgatggaacgtttgaagaatgccgcaggctggcctatatccctctgaacaaatggcatgtcactgttgcaaaacgcaaaaattaccccttttacatttacgaagaagtcagtttttcatttttcaaaagataatctaaataatattttaattccttttaagagaaaaagtgatggaatgatttgtcaaacgcatcagaaatttattatgaacgcaccgaaatttaacgaacagacatataagctaaacataacgaattatcaagtggatgagcgcaaggacattcaggaatttgtggatgcttttttacgggccagcgaagatgagcaaacagaggcgaatgaaacgttgcgtgagaaagcattcgatcatcttttctctacccaatatgaaaatctctatgagcgctaccgaacctttcaggtgctttattttttaattttctaccgttaccataaattaggaccgatatgaacacacaacggattgtgaggaaaattggtcaaacttatggaatggtttcaataaaaccgttaaggtgagacaaatttaattcaattttttttcattgaaacgaaccattcagataagatttgatgagctttctgcgacaacacttcgtcgctataagaaatttttcaatttgcctaatcggtcgggtgccaactcgaaagcacaggtaattaatatttcatgacctaaatgcctttataaacgattgcagctcctagagggtatcaacgatcattttgaatcaatccccgtggatttagccgaaacagcagctcattttctagacacaatttataagaagcgcaatagactcgattatccaaataatatagagaattccgctggttag

SEQ ID NO: 74690 - DNA, 310 bp, Heterodera glycines
atggttgtgctctcaaaacttggctcgccgcttcgtccgttttccaatgactatctcctttgccgcttccaggcattccgtaattatgcaatcaaaaaagaaaggccgccaccagcgaagattcaagtgccgccacccgcaaacgaaactggccattggaaatgtaagtttagtggacgggccttatgcttcggcaatttttaatatttttgcgttttttctttcgcatcatttcgaattcagatgagcgtgactactcctatgacctgcgttattcaaacccgatcaacaaatactccagttttaccag

SEQ ID NO: 74691 - DNA, 100 bp, Heterodera glycines
acatgaacaaagttattgtataaaaaccaggtattgtcaattgattggactcataaaactcgattggactcattaagtgcactagagccaaaattttacc

SEQ ID NO: 74692 - DNA, 954 bp, Heterodera glycines
atgcacaaaatcgtaaaatatgcacaaaaatctcgaaatatgcaaaaaaatgcaaataaaagtaccgacttttatacgcaaataccaaaaagaagaagatgtttttcgtaatatttagagcatagagaagccaggaaaaaatatgcatatttttttgcagccctgatacaatataaagaaaagttttgagaatatttataattgtatttttagcttttcaattttttaacaaagttatttcaaagatttgagaaaaatcatttgacaaaattataggtttctgaaatcattctgtaaactgattcggaaaaagtatgagtccaatttatgggttaacatctcatagaaataagtttttgtagggtttttattccaataattaaaaaatactaatatacaataatgattcgatactctaaaaataagttaaaattacaattttttaaaatcttaaatgctcatatcacaaatatgaaattttgtctttcatttttcttaaaacaatttttttttacagaatttggccacggagcagacgagcttgaacaatttgtgggaagaacgtcgcatattgtacgaacagtgcatggacctgcagttgttctacagggacatggagcaggccgagtcgtggatgaccaagcaggaggcaagtgtcaggattaagttgatttaaaatcctgaccctgtcgtcgcgatcgcatattttctgaagccagccacattttcttttttttaaatcaatgattttctcctaccttaggttaaaaatttacattttttacgactgatcacatatgctaattttaatggtgctatgacgttactcaaaaaaccatcaaaataatatttgatgtgattttgcttaaaagcaaccaaatttttaattcaaaatttcaaaaagtttatttaaatttaaagaaagttatgactagggcacgtttcgcaaataaa

SEQ ID NO: 74693 - DNA, 213 bp, Heterodera glycines
atggctcgccatggagttttgggcggcaacataagaacagttgacgtgagagtagttgacggacacggcaattgcatctacactccgccacctgcagcgcatgtgccgcaactgttggagcaattcatccaagacgtgaatagtgcgattgggcaagcttcgacaggactgatggaggcacgcgttgttgccgcgtgggcgcattataaatcg

SEQ ID NO: 74694 - DNA, 591 bp, Heterodera glycines
atggctcccggacaatccatcagtggacaatccgtcagtggacaatccgtcagtaagtaattcataagctaattatttttaaaccacagagatttatttaaaaccatgtgataattaatttaagtcgctaaaaatgttgattaatattttgtgatattttataataattatgaaataatctttttaaagaatttagtcaattaattgaagtataaagtaactagaaatgataagaatctataaaaattatatttattacatttaacaatcattttcgcaagaatttttgaacattgctcaaaaaaattttctgacgaatttccactgacgaattgacttattttttgaacaaggtatgaaaaatttgacgtatcaaaaaattattttgtggatgcattatttttttcattttccgaaaataatatttatgtagaaaaatttcatttttttaattttagattcatttttaggaaacttgcgtgcgtttgatcattaagattggaataattctttttttcaattaattttcaaaaggccaaaaagtgggaaaatagggtaaaacaatcaaaaatttcaaagcgaaaaccccaa

SEQ ID NO: 74695 - DNA, 495 bp, Heterodera glycines
atggtaaatagatagattttgtaaaaatgaattaattaatattaaataaaatatgcaattaaatttgcaggtcgggatttttggttgggatcccggctcgagaaattccaaatctgaagcatggcctccgatgtgaccaccagcgactaaaaaatgttttaatacttttgttaccaatttgaaaaatttgcccatcggctcaaacgggggttaaattcgagtttttagcttcacttcaaacattgaacattagcatttcggaggattttggaaatattttgacgttttatttattcgggacttacagaaaattgggactggaaaaacgaaaaacataccctaagaatcgacccaaaaaatattagaaaaatacacccctattaaaaatttctcaaaaattcatctacacaatttatttatttactttctttgacaagaattttgattgtaaaaattatttatctgaatagtgattagtttacttttttgaataaa

SEQ ID NO: 74696 - DNA, 1823 bp, Heterodera glycines
  unsure (1)..(1823): unsure at all n locations
agattcaggcgatttctgagatgcctgttccgacaaacgtgtccgaggttcgatcatttttgggaatgatcaccatttaccacaanttcgtgaagaccatgaggttcatccgacagccgttggacgaattgttgaaacaggacaaagtgtggcaatggtcagaagattgtcaaaatgcctttgagaaggtaatcaaaattttgaaatctgatcaattgctgacacactacgatccagcacaagagatcattgtatcggctgatgcttctgagcatggaataggagccgtgatctctcaccgcttttcggatggaagtctaaaagccatcgcacatgcatcatcgtccctgtcagcagcagaaaagaattattctcaaatcgagaaagaaggcttaacgattgtctttgccgttcaaaaattccacaagtatctcttcgggagacacttcgttctgcagacggaccacaagctgttgttgtccatttttggcaacaaaaagggaattaaggcttgcacagcgaatcgattgcagagatgggcaatcacattgcttggctacgacttagaaatcgaataccaaaacactgctgatttcggtcaagcggatgttttgtcgcgcctaatcgcgaagacaccagtgccggacaacgaagtgatcattgcaaacattcgtgaaagcaatgaaacgggagtgttgaattttgtttcgaaaactctcccgctggatcacagtgatttggctaacgccgcgaaaaacgatcaggtgatgcagaaagtgaagaaatttgtctgctcttattgaccaacaaagaacaaaatggccgcagacattgttccgttccatcgacgacgagaccctttgaccatcgaggatgaatgtctgctttatgcggacagagttgtgattccggcatcgcttcaaaaggatgtcctacaacttctgcacagaggccatccagggatgaagcgaatgaaagctctcgccaggcagtacgtttactggcctggcatggacgaacaaattgaaaattttgtcaaaatgtgcaacgaatgcacaatggaggcaaaaatgccggtgaatactgagcttcactcgtggccgaaagctgacggaccatggaaacgcgttcatttggattacgccggaccgtttatgggaaaaatgtttctcataattgttgacgcgtactcgaagtggcccgaggtcttcgaaatgcgttcatcgaattccgcggctacaatcgacaaattgcggtcactttgtgccagttatggccttcccgaaattttgttcacggacaacggcacacaattcgcttaaaaggaatttaaggaatttgtgaccgaaaacggcatcaattatgtgttctccgctccgtacaatcccatgtcgaacggtcaagccgagcgttttgtcgatacgttcaagaggacatgtcggaagatcaagggagaaggagcatcggaaatgttgaccacattcttggcaacataccggaccacgccttgtgaggctttgccggagtgcaaatgtccggccgaaatgtttctaagaaggaaaccgcgcacgactttggacttgttgaggtcaaagccaaaggcaccgataattcgagacgaggccatggagaagcaatttaataggcgccatggagccaaaccgagatcttttgccttgggcgataaggttctcgctcggcatcgtctttctcagccttggcgtccaggaaaagtcaccaaatgtaaaggtgtcatttacgacgtcgaattttttgacggaaaattcggacggttccataccaatcagttgcttgtgagaagc

SEQ ID NO: 74697 - DNA, 1931 bp, Heterodera glycines
  unsure (1)..(1931): unsure at all n locations
atgatggcacgcgcttcgtttgctttgcctcttcttctgctactgcttccactcttttgtgtggcaatgaatgaaaacgatggcactgttgccggagagggaagtgccaacagcgaaacatggatagaaaaattagccaatttgctatccgaaatcggcaaaatttgtgatgtgtacactattttaccgcgcagtcactacaaaattttgtttatttttggaaagtttggtaggtttttttggtgtttatttggcgcccggaaaatgcgtcagttgtaaaagcgtcagtagaaaatgcgtcagtggaaattttgttgtcctaaaaacaagttcctttcgttttcgagatcactgaccactaatccagtatccatttcggtcaattccgatccccggacccgtagcgatcaagggttacatgacattgtgccccggacatttgtcgtcttttgacattttaaaatttttaggtgtaggcccaaagcggaaaagtatttttacttctatattacaatactaatgccacagagctttatttcaaaatatttatatcactgacgcattttccggtcatagtttatttatatttaaaaattattaaaaaaaagaatcgaaataaaattacttagaatggaaaaaaattaaatcagccaatgtattttttaaagataatatcaacgataaaaaagtgcagaaaatagaaattgagacggatgacaaaggcgactttcggtggaattttgatgaaatgatagtccaaaacaaaaccgtagcagctggagacggtccagaggttacggtacttctgtgccgtacaagcaaaaagcattgccacgtgttccgggtgtacgaaagttttgccgaaatgagagaggaaatgaccaaaaatgagggtcgattttatggagctttccaggtgatgtatgaacattatgggcattgtataagcatggaaagtggcgcttattttggcgaaacggagcaatgccaaaagagtgaaatgtcccaatcggatgaaaactcgggaatggcatactcaccagcatcatacagccacatctgtgatacgtacaccattttgccgcacacatattacaaaattctgttgctttttggcgaattgagtaagtttaaagaagaaaaatttgatttttgctaaggctaaattaatattaaaattccataaataaattaattttcaaagaaaatgcccacggagaaaaagtagaagtgcccaaaattgaaatttcaactgatgaaaatggcacctttcggtggaattttgatgaaatgatcgtaaaaaacaaatctgtagcatcaaaagatggtaaagttacagtgctattgtgcaacttggtaaaaaaggaatgccgcatatttcgcgtgtacgacaattttggcaaaatgaaaatggaaatggcacaaaatgagtgccgattttatgagcatttccaggttatgtatgaacattgcgaccactgtactagcatggaaaacattgggaagagaaacgaagaaggcaattaccttggcgaagtgtcacaatgccaagaacaaaaagagaaagatggcacgggggaacagaaacatcccaaattgccaatctcaacatttccgtcatttcacaccttagcatcaccggaaaatgaggcggaaaaagaggaggaggatgtagaggaggatgtgccacttctgctggaaagaggtgggcacgaaaagcatggacgaacccaccaccgatcattgagacancggcgggtgggccaaagccaagcggagaaagaggaggcaaattgaaaaaacggaagagagggaggggggaaatggagaaacagtgacgaaatgagagaaacgggaagcgaagcaaagaaaaaaggaaaaaacggagggaaggggaaacgatacaagcatttgttgataaggggattgta

SEQ ID NO: 74698 - DNA, 553 bp, Heterodera glycines
atggccgagtgttgttcatctgtttctgcttctgacaatggcactgctccttcttcctcctcctcttcttgggctgagttgggtctttctgatgcgactcttaacgctcttggcacaatgaagtcacttctcaacaatttcttaaattgttttattttcttcatttagtttcccttttccaactccaattcaaaatgctgtgattcctatcgctgttaaattgaaaaaagacataattggtgcagccgaaacggtttgatatccaattaatgctatttaattgggtctaatttttcaacatttagggcagtgggaagactctcgcatttgccattccgattctcgagcattggctgaccaatgcaattgccacaaatgtccaacattttccggtcaaaggctctctttttgcgcttataatttcgaccacgagggaattggatgttcagcagggatgtgcctaggtttcgcctttcgcattattcgcattttttggcgtttcgcatttcgctttttggcgcgaaaagcgacttttacacccctaagaattgga

SEQ ID NO: 74699 - DNA, 2615 bp, Heterodera glycines
tggcccattttaaccctttcccccgttgaagagaaagacttggaattgctggccgtgaacgagcccaaactgatggagtcgtgtcgctctttggtcaaatggcagcggaagcattggaacattcgctaaaaaagtgaacaaatggaaagggccatgggttgtcgaatgatcacagcgaaacatttgtgcagagaaagtcgcgtgagcaatggttcgaacggatagcgcgggaagcggatttggtgtgggaagagggggaggaaaaagggcgaaagatggcacgacggactgacacggacgaaggaccgacaaaagagtgggtcaattgaacaacaatcggacaaacggtcgacttggcactgacaaaaacccatttcagggaattaatgagacagcggaaaagggccgttgagaaagaaagcattgaaaggaaagctgaagggaaatcaacaaaattgagaacagagagaacggaggattaaccaaagtgcagagggaaggaaggtgaaaattgggaagaggaaagtgagactggagaagggactgaagaaatgggtaaaacgggcgaagatggacagcggacgatgacgagggaacgcaggggaagagaggaagggaagtgaaagaggatgagagagtatgggaagtgaaagaggaggagaggaagggaagtgaaagagggagtgaagagcataaaatggaagaagagggaaaagctttgctagtgaaccattttctgtttgtttgtttgtcttgtttaatcttaagtttaaacggattgaacttttcttcgcattcatttgcttctccctttgcattatttgcataatggtggctcatttccttccgtcattggcaattgtcgaacttcattctctccccatttgtccctttcccaccccatccatccgtccgcactttgtgccatccaacgcttcgtcctccggcagcccttttctttcaattggccaagcctatctatcgacatctcttacgtatattgtcccgaacgagaatgaatgagggggacacaatttctctgaatgccttcccccgagggtattcttttgctttctcttcgtgctctgttccatttgccctttcctccgtttttccgccttttggttttggaagaaaaataacccttgaatttttcataggaaaaacggaggcaaaaaatgccatcggtcgatgagagagaaatgggggaaaaaactaaaattatatgacaaaatcattggtttcatgggtttttatcacaaatttttttttcaaaactaaaggatccccccttttgtttttgatagaattcaaaatcggtactttccatatagcgccaaatcatttttggaatttataattggctgtttctaaaaatgatgaagtctttccccccttaattttatctttttttttgctcatttcgccgcgtttagtccaaatttgccctttcattctttcgtccttttcatctttcaaattgttcaacaattcgtccaacaattgccattccgacatctcttcccgagcacagtaccttttccaataatcacaattcaacggaatgcctttgcgctgaaatggaaaagggccaaaatgcccccgggggaaaaaagacaaaagtttattttgcggtacggacaaattgtgcgaggccatgggagcgaatgttcatctgcggaggaagccgactgctgggaaattggaggcccgaaaaggcattggaaatggcacgagaagcggaggacggcgaagagaattccttcactgaataacgatttaagctcaaacaataagtcaaaaacaggttcatcactacaaagaagcggagaatataagtgagcttgggcagcagcagaaccgcggccaccgattgaccggagaagcggacgaaagagacgaattgcgatcatttcccactttggtcgaggcattgcaaagatatttttagactgtccgtcaaacagaacaagtacccggtgcttttcctttgtgtgggccaaaccgacaggcaattaacgattaattgactgaattactttaaaattccatgtttaattaaactctgttttaatacatatgtgccatttttggatgaacggagcaaagtgacccgagtgggctccaactttgccgcctgctccaaccttttggcaaggctaaaatgccattctttgaaattgctccgcctcccaccgcccattagggcatcaatttgcacagcgaagaattgctctccgatccgtcatccctgaaaagggccgttgcaatgaaactgatcactttcgtctgggtagaggacttggacaaattggaatacgttgcttatttcagacggcaaaatgtggacgcgattatctacgacaggtgaaatgcgcaactttatttttgagtaacagcccaatattttattttttgtcgtcgcaattaataacaattttaaaacaaattaaccccaagaaaatattctaagaatcggcgaattggaaacacgtcaaaatgtgttcgtcgtggaaagggaagtgaagagcgccctgttcaagtcgccccgcacttcaccttctctgtcgcgagcaaattcactgtttcgcaacagtcaaagcccgacgatgccg

SEQ ID NO: 74700 - DNA, 1766 bp, Heterodera glycines
  unsure (1)..(1766): unsure at all n locations
atgtctaacacattctttgtgcatttatccagtaatagcccagactacgctgagaatacaccaaataagtttagagttcgtttaccaaaacctatctatttcaatggctcttgggtatgcggattacacagcattaattatgcctattcttggccatcaacaattggaaccttagatgatcagtggatcaacatacattttacggatggtttagataatgaaaggcttaggattgttcgagtacccgccccgaaagcttcaaacacaacaattgaaaatttaagaaattttcttatttcaaccctaaagaaccatgctgagtctcttgaaaagattataaaagatagttcacagaggtcaataaaaagaaaacgggccgcttctcagccaaaatcacctcctagtgcaattgtaccaaagtcacaacctaatgttagtcccaatgtaacgctaaatgttaaagtaccaacatctccaccacgagttggacagcagccacaaactaaatccgaggacatttctgattcgattttaaatgtaacaaaaccatctgaaaagcaaccgaaaattgaaaaagagtcagaaattgtaaagcacgaaacagaaaaaataaaccagaagcccacacaaaatatttcactacctacaaatcagacgaaaaatgtgaatagtgaaggtgtttcacaaaatatcattcctccaccacctgttacaagtccgtcgatacatgcgaataagcaaaatcaagaacccaaaaagaacgacgaatcaccatctcaagtcgggaagactaagcatcaattaccagtgttgaaccaagctatagtgtcacaagctcagaaaaaaataactgctacccctactcagaggagcaaaaaaagtacaattgaaatagtcccaccaccacatcgatctacacccacttcaccaatacgcccaaatgttactgagaaaaaaaccacgtccccaccaaagacaatttcaattgataccattggaccaccacccaaacagagaaatgaaaaaagtctaaatattaatcagggtcaaactcagttagtcactgaaataacacctgaaaatagtaaaaagacaacaataacaacaactactaccacgacaattaccgaaccgccgaaagaaacaatcgatgatttggtagggcaaattgaagaaccaacggaaagaaaccgggtggaggagttgatttccgtcttgtttggagatgagaaatggaaacaaataaacttacggatggttagacaaatcattgaaggagtggagttacaatatcacccaaatcttgatcggtttaaagcggtttttacacacccgagaattgaatttatctctttttctcctcaacttggttatgtattaggttttgaaaacgcgcagcacgtaagaaacaatgagattgccaaatatggaagtgatttacgtggtttttgcaagctttgccgtctacgccaaagggttgactgaaaacatgattgttggaaattcactgagttctcttctccgtgttgtctcagtgtcaggagcaacgccgggagaatacactgaaaaaatttacgactcccccctatacgcacgtgttttaccaaaagaagtgtcagaaattcaaattgaattaagaacaatgaccgacggaagattagtaccattttcctattgaacagtgctgatcgtactgatatttaagaangtgataaatttttgaattcactcattattgtataatttgacataatcgattgaataaa

SEQ ID NO: 74701 - DNA, 1257 bp, Heterodera glycines
atgtctaacacattctttgtgcatttatccagtaatagcccagactacgctgagaatacaccaaataagtttagagttcgtttaccaaaacctatctatttcaatggctcttgggtatgcggattacacagcattaattatgcctattcttggccatcaacaattggaaccttagatgatcagtggatcaacatacattttacggatggtttagataatgaaaggcttaggattgttcgagtacccgccccgaaagcttcaaacacaacaattgaaaatttaagaaattttcttatttcaaccctaaagaaccatgctgagtctcttgaaaagattataaaagatagttcacagaggtcaataaaaagaaaacgggccgcttctcagccaaaatcacctcctagtgcaattgtaccaaagtcacaacctaatgttagtcccaatgtaacgctaaatgttaaagtaccaacatctccaccacgagttggacagcagccacaaactaaatccgaggacatttctgattcgattttaaatgtaacaaaaccatctgaaaagcaaccgaaaattgaaaaagagtcagaaattgtaaagcacgaaacagaaaaaataaaccagaagcccacacaaaatatttcactacctacaaatcagacgaaaaatgtgaatagtgaaggtgtttcacaaaatatcattcctccaccacctgttacaagtccgtcgatacatgcgaataagcaaaatcaagaacccaaaaagaacgacgaatcaccatctcaagtcgggaagactaagcatcaattaccagtgttgaaccaagctatagtgtcacaagctcagaaaaaaataactgctacccctactcagaggagcaaaaaaagtacaattgaaatagtcccaccaccacatcgatctacacccacttcaccaatacgcccaaatgttactgagaaaaaaaccacgtccccaccaaagacaatttcaattgataccattggaccaccacccaaacagagaaatgaaaaaagtctaaatattaatcagggtcaaactcagttagtcactgaaataacacctgaaaatagtaaaaagacaacaataacaacaactactaccacgacaattaccgaaccgccgaaagaaacaatcgatgatttggtagggcaaattgaagaaccaacggaaagaaaccgggtggaggagttgatttccgtcttgtttggagatgagaaatggaaacaaataaacttacggatg

SEQ ID NO: 74702 - DNA, 6748 bp, Heterodera glycines
gtccatgctgttcaaactgtcactatcctccacagcaatccatcgcattcggcgattgctgttcgctgagctgctgctcaacctcatcgcgttgatgatcaccatcaccaactgcagcagcactacggttgtgaagaagtacaacaagcatcaccaacagcggaggatggcacaaaaaatgccaatggcggtgccgacggcggggatgaccaattactgttactgtccgcattgctcggctcgtcctcgttgttgtcgtcgccggcgtcttcggcacggcatggcgcccagcgctggcggcgtggcaccattggggagcaaagcattgcggaagagtgtagcagcggcacaactgtcagtgccggtgccgttgatggacgtgaaaatgagggagacgatgacgaaaatggcacagattgtggcgagcatggagacgataaggaggataagtgtgttattacacagctgatggcatttgaaatggaaaatcaaatctattttataccgatcattgatcaatgattgggttttattttgatcaattcgattttgaaagttttattttaatctgttagattatcggactgatttattttgagtttttataattagttgaccacaaaattaaacacaaatttaattgaatctgttttctgactggcatcaaaattatttttcttccttaataaataaatttttattttttataaatttttaattgataatttttataaaatacttttattttattaaaatatgattttatcaatttattaaaataattgttagtaatattaatttgaattatttatttaaatttttaaattattttattccaatttgcaccattatttcatttcagaaagagtcaaccgcccctttcggcattattgtcagccgacaaaacgccaacaaagagccaatttgccaatgtcaatgccaaagttcaacaggaacaccagcaacagagaactccggtggcaaagacgacgtcatgttcaacttcgtcctccggcgtttcttcctccccgaatattaatggtcaggatcaatttttcgaaaattaaaaatgccaaatttagttaatttatgggctgaaaatatccctggaatcgaaaccaatgtgccaagaaatcatctttttttacaaaatacgaaccacagacctcattaaaatcttttttagccttttaaaaattttcgaatgcggaaattcggaccaataaaatccggaatcgtatttcagaattttcaatcgaatttgttattataatttgaaaaaaaagttattgactaaaatattgaaaatttgaaatatgtttaattttcaataagtagttaagaatcaaaaaaaaattaatatttttcataatttcatttagaatttttcaatttactgtccaaaaaatttaataatcccaaatttttttggcaaatgtagaaaagccatgattgaccagtttagccccagcctttctgatcaattgcactaattatgttttccccgttttttaagctggaatcagcggctgcagtaatagcagcaaaatttcgcgcttgatcgtccgtcggcattccgcttttcagctgccgcaacgcttcacggcagccgcctcggtggccattggcaaactgtcaggcgcttcaccgccgcccccagcccttctggcaacggcaacgacggcacaaatgcttcatctatacaatgccaacattggaaacaaaagtgctacccaaatgatcactgctgctgctggtgccgtcgacgacgacgatgataatgacgaagatgaggacgccacgactgatcgaccgactgatcaaagtgatgccaacggtagtagtaccgtaccgccgtcgccggcactgtcccaccagctgaccatggcagccgcgaagcagcaactgttgaagcacacggcgcccaaaagtggcagcggtcagttgtttgctcgagaatttgaattttgaaagcatttatgaaaaacgagacttgataaatttcaagcaccgaaaattgcttgctaaaattatactcgttttggggcccgggtaccggattttttttagaaacccgtgaactctggaattttacctgccaaaattaaatatttttatcccgattgccttagattttttttaactcgtcgaatatctaaattttctgcggcggtgcatacatatctcgcgattgccaattagcaccgactgacaataaaatcttattaaatttcaattaaattccggcataaaaaagctcttaaattatgaagcataggaatccggctgagctcatttcaaaggataagggaacaaaaaatcttatgaattctaaggttaacaaatgtgattaaaaaaagaggtgcatttacaattttcccattttccatggtcatcttggaaataaggacgcgtttagtttttccatgttttgaggcccagattcaagaacgtccctaaatccgaggaaaaatctatgtaatccctgttatcagcatcttttttcctgccaattaatccccacttttgctttgattaacttaatcagtcgccgctttttgtgccctgtttggcgatataaaaaggcatttccgatcaccgcttttcctttgacaacatttcgcggcccctttgtctctttctctgatcaccaccacaaaatcacatatttccttttttgttgtctgtcccttatttcggatcattcttttgtcggcatcattcattgatcacttttttcattcgtttatttgatcaatgccgcctttgtcactgctgatcagctactgcttgcgctttcctttctcactgatcgatagattgtcgttatttcgcttcactggtcaccactgttttctctttttgtttgaaccgtacaaaacactgatcggctaccattggatcacttactgttgttgattgatctgtatgtatccccatacgttgtctttcaatcgcagttgttatccgctatcattgttttgtatttcgctgattctgctatttgatcggctttctgtctaatttttgttgcatgctcttttcacagatcacttccccactcttatcaacatcattttcattcgtttatcagttttaattattattattcattctgtttttttcattgaatttgctgattcatttatattgcactccttttgattacattgtcatcctgatcaccccactgcttctgaacattttgtcactctgatcacccccactgcttctgatcaccttttctgccctgtcagttgatcactttggtcattcccattgttactactgatcatttttctcgcattaatcaccactatcatacctactctgatcagctctctcattctgatcatccaattttgcttttctgcttctgctgatcacttttctgtcaccattttgtcgtcgttttgctccttcgcttatcgactgctaaaacggcggcgtcgaacgaaacaaaaaatggatctaccggccgctgatccttctgctgaagatgatcgggatggggtaaaaagcaggaaaagaaacagagagagcgagaaagttgacaaacaaaatgtgatgtatgcattgtttttttttgtgtcgtcacaatcccttcgagcgcgggacggatcagtcccaaccaaaaaatccgtaacatacactccatcatcacgcattaacagatttatggctgtgatctgctaattctgatcagcagagcagatattaaagcggcatttatttttcgggatcagtccgatcattgattgattgataactggttgattcaaatcggattaaaaacaaggcttccatttttggcttggtccaattcaaggtcagtccgcagcttttgtctgcctccaatactgattagacttgattggacatcgttgattcgattcaaatcactttaaccaatcgattgaattctcataggcacctcagtttttttattgtacttctaatcactaattaaattttagtcaattttaatattaagcaatttaatttaaaatatttttacttacttttttattttttgtgtccaattttcttcaccaatttttttaatccatttttctttatttttttcctgttaaaataaatttatttcctcctcttctcatttcgaaggactgattcatccaaaattgcaatgctttaacccattgttattacttcttgacaaatttttttgttaaattttaaatttaattaaaagcggaagaaaaattttgatttttttttcaaaaattacatttttaccgatttgaagtggcaagaaaaagagaagtgataatttgaagtggacaaaaataaacaatttttttacaaatttcgctggttcattccttcttgtgttagttacttcctccttaatcttcaaaattttaaaaaagctaattatcgaaatgacagtcaaaaaactgaattcagcaaaatcgtgtccacgcggaaaccgggatagtaccgtagaatatgttccatccctcccaaattgcgcatccccctgatactgtcccttaattaatttatgtgctccctgatactgtataacagtagtcccatgcctcctgatacctaccgttcccggtctcttaatccttgtcaattggtctccctgagattgtaatggcataaattatgtcattataccctccaattttgtctcccccatggcaccgtccatggtcaatattttgtgtccgtggtgctgtctgagtgtcacatgccccctcacaccattcctagtctaaacccttgtactatttgtgagcctccttggtatcattctcggccctaagttgtgcagcgtcgactttccgaccgtcccatgtacctaccactaccgtacctggtctaaactgtgccgtcctgctaccatccccgcccggtctaaaagccgtgtgcttccccctttccggctaatgggatagtgtaccaccactctttccccgttttgttgtgctgacaaatcggttggagcgtttcaccgttttcatggttcatcagtcagtcggtcggtcgctggtcggtggttgatgtgcacgcccattacgcaatcaatcatcattagccgccgccctccggcagattttgtgggctgtgctttttctgctccattttagcagcttttcattttgcttactgcttgcttttgtttttgatgatgtgttgtgcttttttgtaggtgcgcgctttttaaccccttttttccttttttgatgggtgagaaatttaattaaacgaaatttatggggggtaaataaattaaaaagtgtgaaattaaaaaataaataaataagtaatttcacacaatgggagggagataaagttttaaaaaaaatgttttaaaaaatacatttttattaaaaaaataaatgccattttaataaaaatttatgtgggtaagaaaaaaaagaaattcaatttttgaaatttgcagaaaactattaggagataaactattagagatttaaatgataccagaatttttattataacctttttatccctttgcataaataaattattactttaaagaaatattgacgtgtaatttaaaaaaataaaaataaattttctttgtttttctaataaacgattttgtccttaagcaattccctagaaggaaattaaaaattgaattagaccttgaatagaaatattgttaatttatcatttattaaatgacattgatccacttctaagttgatttcatgcaatatttttttgttaatttggtatttaaatgccaaatttgtttttgattattatttatatataaaataaaaataaaataaaataaaacttcttttgatatttttaaaaaagacttttatttttttttttgttatatatatatatatatatattaattctttttcagctgacaaaattgttgacgacaaagctaatgtgcacgtcagcatgcaacaattgctggcaatgcgcgacgacggcatggaattggcatttgagcgttgcaaaggttggcagggcatttttggaactaaatttcaattttaaaaattaaacaaaattgaattgaatttcttttttcgattattgcataaaattttttttatttaaattttatgtttttcttattttaaccatttaaaattagtttacaaaaaaatgaaaataaagattttttatcattcaatcttttggtcaattttaaattttatcatcatgctttaaactttttgtttcttttaccaatttgccaaaaatatattttttcttaatgtaatgtaatttaatatattttttgattgccaactaaaactaattaattatattttttataaataaaatttttccgccgatgacaatttttgcttgtcggttggcacttttatctttccgccacgctttaaaaatttgtaaaaattatcgctaaaaacatgataaattcaaaaatttttatctaaaactaatagaccatttcttagtcaaataaggtgtggcaactttcaattaaaattccgtaattaaatgtcaatgttttgtttttgctcagcttggtccaaatacgtgtcccaactgttgcaaattgtcaaattgcgcctgagcacggaggaggactatgtgaacaaattgaggcgccaatctgagcaggccaaggcgctgctcgctgtcggcacggcacaaacagtggcagcgaatgttggcaaaatgccattggccggtgttttcgaacggatgctggacggcacaatgcaacagactgtgcacgcggaatgtg

SEQ ID NO: 74703 - DNA, 916 bp, Heterodera glycines
atggcagcggttgatcaacaccagcaacaactcgttgaacgcattaaacagcttgacaccctttcaacaacggcggatgaacaatttgacaattctttaaatgtgccaattggcgatttgtgtcgtttgctgttggccgcgctggcgggcgacgaattggccgcgggggaggcaaaaagttgaaatttgaaggcctcaaaatttttttggcaaaattttactaaaccaattttttggcaatttgggaatcaaaatttttggcagaaatctgtcctccctcgtccccttttgccaatgccatcggttcgcttgccgttggctgtctccgggacggcattggcccggacggattggccatggaaattcagcaattaaattccgcctcgactgggaaaggcaatgaaatgcgcaatgcatttttggaggcttatagggtaaaaaaaaaaaaaatttaacccggcaaaatttcccatactctcacgagagagggctttaacgaattttctgaaaatttaactaatttattttacagaaaaatattattaatttaactgaaattaatttgtttgagagagagagaatttttaattttaattgatcacaaacagttgaaaaaattaattaatttacatatttatcgtaaataaaaaaaggtcatcagcagcagaaaggcgaaactttttgttaattcctatttttttcttggaaaaaaccaaatttaaattaaatattaatgaatttttaatcgaaaaaaagaaatttaaatttccactttcagtccaattttgatcaattgaaaatggcattggccaaatcgaccggtacatttgcctccggtggcagtgcttatccaaaagtggttggcatggactggagcattttgagcgtcattgaagtgctgcgatatttcaattaa

SEQ ID NO: 74704 - DNA, 616 bp, Heterodera glycines
atggtctggaaagaattggccaaggtggctgctgccggcgccgtggcggtcagccgggcacttgcgcgagcggttcgagaggagtttaattgttattttttaaatatttttgtcgattttatgccggaattaattgtaagctgccaaaaatccggtgaaaattttgcgtgcacatttttttggaaaatttataaaattcgtctaaaatatggggattaaaccttacactagtactcacaaattatgatatgtttcatacactctattgtcaaaaatattatacactttcagatggtgggtgatttattgggggaacaaagggtccatgccttgaaaataaaaattaaaaaacaaaatttttgtccccattggtaaactacttttgggttggggaatgaatatggagattcttgacggcaaattttttaaatttttttttctagcttcacgtgaagcggcccggcgacaagcgtccgccgcgaccgcgtcagatagtgccggcggcgccaacaacacggcctcaacttcctctgccacgtcctctacggcgtcggcacggcgtgccactgaacgggaggcgttgcagaccaacaccaggctgggcatcacagttcag

SEQ ID NO: 74705 - DNA, 2443 bp, Heterodera glycines
atggacataaaatggcaaaaatctcaaaatatggacataaatttttcaaaattgagtgcaaaatttcttcaaatttattggttgaaattgcatatgagatacatttccaaattttttgactcggtaaggcgctttgacaaagacggctttcgttttgcaattagtcagtcaacattcggaaattggtctcgaattttttcggcaattacgtgcaatcattttaaaagaaaaaaaaacataaaagctaaaatttattaatttttttagcgcaaaatcaacaacaaaagcgaaattttcgcttttttgcttatttttgacataatttattaatttttaagaaaatttaaatttattcaatattctcgagaaattttggcgaaaaaatgattttttgaaaaatttttcgggttttgggctcaaaaaggctaatttagctgctggggactttagcttggtttgaagcttttaagatggatttctatattcatatttttccatattttgcgatttatgtccatatttaggcattttccaaaaaaacccctattagaacggcccccatcagctaaattggccgttttaacctcaaagaccagaaaatgctccgaaaaagacattttttagcaaaattttgtcaaaaaaaattgattaaatttaaattttcttaaaaattggttaatttatgtgaaagataagcaaaaaatggaaaatttcggttttttggtcgggtttttttgaaaatttacccctcaatttagaaaaatttatgtccatatttttgccattttatgtccatattttgagatttttaccattttatgtccatatttcgcgatttttagtccatatttttaccatccctagttatgataaaagtcaaactatctaaacgattaaaatggaaaatcatacataactcgtgctatgccaactcgtaaggctccctgatgtttcgtcactgggtactaattgggtttgtatccacatttttggtcaaatttttcagaagcgtagccagacagtcagacagtgcactatttccttcttttcttccgcttagtcactggagaaaggaagaaatagtgcactgtctgactgtctgtcaacgtggggctgcggcgggtggaagggtagacagtaagcagccgtgtggtgtgctggctggcagcattgtgtgtgggaaaagggaagaggtgagaaaaataaagaaggaaatagtgcactgtctgactgtctggctacgcttctgaaaaatttgacccaaaaggcggatacaaacccaactagtacctcaatcactacccgggggtcttcgagggagctgatgataacctgaccatagatttgtatacacggcgattcaattttgggctccaagtacaaataagtttattatttatttagtaatcagaacgccaaaactttgcaaaacttaaactttattggggattttcccttgtaaaaatggaagagccgatctcgagttagaaaagaaactttcagaaaacaaaagagaattcgatagagggggtcaaaatatgggcctatgcaaaatttgaagaaaatctgacccaaggaaaaattttttgacccaggacaaagttttttctttttctctcattttagtgtactatttccatgtctctaacatataaaataacacatgaaacatttatttgccaataaacaatttttttaaacttttgactaattaagaaatattcttcagaattttcccttcaaaataagtataaaatggttttatttggtctattattgacaaagttataagctaaaaaaatttaataaaatcaagggtaaaatataatgtctaccttccactatttgtatttgttcttttggcgttctgtttttattaatattttatttatttgctttaaaaaattgaaatttatacacaaacacaaggaggatttgaacctgagaccccctttttgatgactaactcacagaccactaagacgaaaaaaccaacttaattgtacttggagcccaaaattgactcgccgtgtatatttccaaaattttcataaattttggattaaatttggtgaaaaatggttttttatttaatggaatttattttgaaaattatttcagaaaatatttggcattctgtcttaatttttaaaaaaatgcaatgctcggatcccgctggatcccggacaaaaaatcaaatttgcgctcccgctgcaggattggaactcaaaattttgttgcgggacgggatcccgcggtttaatcccacaattttcaaaaaatgcgggattgcggactgggaccccgtaaaatcccgccgggaccccgtcgcgcgccggtatctaatgcagatacgcgggatctctcacaaatccaaatttgcgcattccaaattttaaatcttaagttttttagttagttttgcacttattttggtaataaa

SEQ ID NO: 74706 - DNA, 85 bp, Heterodera glycines
acacggcgagtcaattttgggctccaagtacaattaagttggttttttcgtcttagtggtctgtgagttagtcatcaaaaagggg

SEQ ID NO: 74707 - DNA, 854 bp, Heterodera glycines
atgaaccgacggtaaaaggattttaaaagtcacacaaattcgtcatttatttgactaaactgttttcccatttcagttggatttgcaacgacgtttggatggacattttcccatcctttgaccgtcctcaactcggcctcaaattggcacttctttcgccacgtttcgatgcgttggtggacaaacatttcaatggcaaaagcgaattgacaatttggagaacgatcgaaattcacaagggcaaaggaccagaaccgaaactatctgtgtggatggatgacaaatttgtgccatttccattgcccgaccgtccgttgcccagcaaaattcgctttaagaaccttcggattgagtaattaaaaatcaaaagctattgcaataaaagcattctttccatttttaggtacattgatcactccgtcatcgcttttcttcgttccaatcaccaaattttcgacaaaagaggcaccaatttacatttgtggcttccattatcaaacaccacggatggccagccaatttgggatgtttttgttcgtgaaatttggccaattttttcggcaaacattcgccacttacgctttccccatggtgatgatttggacaatttgcgtcgtcgcacttcgccgacaattttcactgatctcaaccaattgaattcaatctattctggtgatttgttgcccgctgcgattgatgctgattttgatgtgccaaatgcaacaatttctgctggccaagcattgtccaaatggttgcactctccgagaaacgatggccaacccaagcgatttcgttgtggcagaaatttgaacgcacaagaggacttcgattgggtcaacagtttcaaggag

SEQ ID NO: 74708 - DNA, 153 bp, Heterodera glycines
gattgcacgtaattgccgaaaaaattcgagaccaatttccgaatgttgactgactaattgcaaaacgaaagccgtctttgtcaaagcgccttaccgagtcaaaaaatttggaaatgtatctcatatgcaatttcaaccaataaatttgaagaa

SEQ ID NO: 74709 - DNA, 1270 bp, Heterodera glycines
atggtccaattctcgacgaaaatgctaaccaccttcagtctcttcatcatcaaaattttgctgttggatagtgttgaagcagcaggacacaaagtcacaattaaagcttattttaaagattttgaaagtaaagttccattatatgacaaagcaaaagaacacttaagaaaatgcaggcgactcaactacgaacgaaaaggcaaaaaccgaacattgtttcaaaaatatcaaattttttcactttttaagatgagaaacaattaaaaggcggtattttttgggaattgacatttgaaaacaaagaaaagttgaagccagatgaaaaatgttcaaactatgaagatgaagaagactcggaattggaggcactcttgagcaccttacatgcagcgaaattcccagcggaaaaagcaaatgacaaaacgccaagcagaaaaaaataatattgccaaagcagagaaagctttggatgagtacattaagaaaaaagataaaaaaggtggagaaaaaggtctcatgacaactggtaaaaaggcactcgtatataggtctaggtttactaggcttaggcttacttgggcctaggcttcggcttaatttgcaaaattattattatgagttgaccatttgtacacgttgtaattgactcggggaaaaatggattagaaaaagacgaataggaacaaaatctgcaggcatgggactggtgggtggttccaggaaaaattctcagcagaaggtaggaattccggaaatttttttggatttctggtcaagaacaagacgtaagaggtacatatgtatattataaaaaagttatattttttggggaaaactaaaaatctcaaaaaatttggttaagaaaaatcttccttttatgtggttttcatactcttaaacctaccacctagaaaattgtgttaaaatttttggttaccttttcaaattgtcaaaaaaatcaaattcatgaacctgttttggaaaatggtcaaaacggtttttcagttttaaaccggtttattgtccagaaagtactaattttatgaagctatttaacagctaacttattattttatttttagcttatttcacccataatgcaaaagatttaatccgaatttgttaactctacaactttaataatattttgaaattttgttgaaaacagcttcaaaagtttatctctttttatcctgtaattttggcatttttctgtaaattttgcttaaaaatcgaaaaaaattacactcaaaaaatcataaaaaataaa

SEQ ID NO: 74710 - DNA, 1132 bp, Heterodera glycines
atgagtatggtggactttttccgcgtcaaaaaggacattcgaatcaatggccaattgcccgccgtccgtcagcagaaagaccgcgaggttcttaccttcccggagagtgaaaaaagtgatcggaattcccccaactgagttcagacgctgttcccgctgtcctgcattgtgattctgcccagccaacggcttccactggacaaaatggccgattatgtgtcccgggagctgcttaacgtatactttttttggggggggggacttggccgattaagcgaaagcgatccaaaataaaaaattttaacccaccagcagtagtcatagatcttctgattactgacttttagtctatgcttaatttgttagctcaattatttcgggtgcaccccaaaatttcgccgaaatttttttttatacggaaccgtttttgggaaaggccggcgaaatttcggcggcgaaattatgtcccgccgcattacttccgcccgctcactctatgctctttctcattgtttattcgttttttttctacactgattagattcatacaaaacaaaagttaaaaaggggagggtcggccgtgccgaattaaagggaattgttagtccaaattttgatcagagcgttgatccgtcagaaatggattattttattctgatcattttgctgtttatgagggacagtccgcttttctttgcacataattgcttccatttcaaatttttgtaaggcgaacaccacgcacccgagcaaacgctacgcggacattgaggcggaggttcggaagatcggcaccggcgcttcgaacgaatttatggtcaaattcggcgtcaaacttgtcggaggaaagaacgacatcaaaataggcattcacgaaatgccaaaggtgttttgtgtttggacatttcaattcgaaattaaattttgaatttcacagatcaaatttggagacggtggacagttgaccttcaaagaccgggtgattcccgggcactaattattggcacaactggcaaaaaaactccttcctcccatttcagatcaatcccggcgtgcgtttcctcgagaccagtgaccgcgtcaagaattgggtggtcggatatccccgtcaaattaacgaccaggaagttcg

SEQ ID NO: 74711 - DNA, 283 bp, Heterodera glycines
aaatttttaaaaagtttccagcaaataatggaaaattttttcgaattccccccccccaaacgaaaataaaaaaatttaataggcaattttcgtaacaaatagcactcaaatttccaaaattttttcccggcggcgcctatcggcaccgccggacctacattttccactatttttacaagttttttgccttaaaacggccaaaattgggtcatttttagtgaaaaagtgcagttgttacccagcagtggaaaaaaagttattggttaaatagcaaaaaaaaaaa

SEQ ID NO: 74712 - DNA, 397 bp, Heterodera glycines
atgccatttgtggtcattcattttgccttacacgtaaacactgccaactccatcgacgtgtttgttgagcgtggccggcgggggaacggactgaaattacggtacggtattagttacggtacgaatacaaaaatattttgctaactcacagcagcaattttaatctttttcacttcttcaataaggttttccattgcaatatatttttatgctaaagttacaatattccatagttatttttacaatattttctctaattccattaaatgtaaatgggggacattaaacggagaatatttctttcaatttttatgtctttattttgaaatttttcgttcaaaaataatttttgttaacaaagaattattttcaggaaaatttgaaattttacatttaa

SEQ ID NO: 74713 - DNA, 2684 bp, Heterodera glycines
tgaatttgtgaagagctggtatcccatattgaaaatcaaggacattggcaatgcttcttcaaagctgccaaatgcggcactgccattggcacaaattgtccgttgggattgggaccaaaatggggcacaacagatcaatggagtattaaagaaatgaatgataaatcttaaaaaatatgattatcaattattattttagacccaaatactcaaaaagggcagtgcaattagtttcaacatttgtgccaatgattctgcttcatttgttattcgaattcttaaaaagcgggagaaaaagtaaatattataattaataataatcccggcggcgccttttggcacggccgggcccacattttaccctatttttttttgtcaaattttggcctaaaaatggcatgatttttttttgctctccgcgcttaaattttttaggtcttctgatttccccttccgaaatgggcttattgttagtcaaaattagagatcggacacgggccgggcccgtgcacgggttttcacgggcccgtagcccgtaacccgtgtttttttgggctgacacgggtttcacgggcacacgggttttccgggtttttagcccgtaacccgtgtcaatgccaagcccgtagcccgtgcccgtgtaaaaagtgacacgggctacacgggctttttttttctccagtaaaattgagattttttgaatttttctaatacattacgccaaaataatcattttttgcataaaatttgattaaatattaaaatttaaagtgaatttgggttagagatcggaattttgagaaaatacggataagggtaagggttacgggcttgacatctatacgggttacgggcttatgggctaaaacctctaacccgtaaaaacccgtattcagaaataatacgggtccgtatacgggtaagggtttttttctttttgataaaaataggtttaataaatacaattttgaatatttaaagctaaaagatattataataatttttattataaattttaagcaacaaaattcaaaaaacacaacaattggcactgcggtggccattgggcgcctccgggaaattttttaaaatttgattgcaatttgttaatagatttaatagaaaaattgaccaaatttgcgatttttaactgatttcatgaattttgctgacagtttttcactaaaatgatttataattttgaagaatttacaaatccaattcgtaaaaaaaaagaattaagaaaaataaaaaaaaatttcaaaaaaatttacgtgctggtgcgtttcgtaaaaactgccacaaaatttaaatgcaattttatgtcacaatcataacgtttttgttttttattaatgtagcacacatcatagttatagcaacaacggtcaactttattgaataatattaagccaattaattttttatttttacctttttgaaaattgcaaaaccatattacaggtgctattatacaagaatcaaaaaatgatgttccacaatacgtgccacaatattttttagcaatttacaaataaaaattaataaataaaattgcgtagttttacgaaacgcactagcaccaaaaatttaaacaaaatgctattcaataacttaaaaattttttggtacagaaataattgatttcttttcaaattacattaattttccaatatttaccaatgctttttcgattttcaccgaaaattttacgaaattgaccgcccaattacggggcccgtaaaaacccgtatacgggtccggcccgtatccgatctctaatttggcttgtttatgttcattatgtaggtgtattgtattttttattatcaatttttataaaaatatcaaagtccaaaattatgacatcaattaaaaaaagatttctgattgtaagcaaagaatctcgaacgactcgaaaaattgcttgaggggtcagggaatcctgcccttaactcaattatccaacggctcgaaaagttggaaaatttggtgcagcaacttgttgagggcgagaatcggtgtggaaatcgatttgctgacccccagcacgcctcccactcttcgtccgttcccatctccaacaacggcacagtccaatggggtcaaccgccgccttttgctggcaccggcctcgtatcgcggatgatcaccgaggcgatcatcaactctgagcagctgaaggagaaggcgaaccgagcagtcatcgaaaaattgccggaggcaatggacgaacgggcattggtggagcaaattgctgatgaatgcggcgtaaaagacaaactgacaccggacattcatcgccacccgaggacgcagctaacagatggaggggtaaaaaaagaccgaattttgaaagttccattttctgacaaatattcgcgtgacaaatttatttttaatttccgtaacgctttgaaaaaattccccaatttgccacaatttatcaaagtccgcagggacatgacccaaaacgaactcaaaattttatactcccttcggcaacaagcctacaaggccaatattgccgctggtgaatataagtattatgtggtcgatttggagatcaggtccctgaaaaacccccatccgctcagaactcgctagggacacgcgagcaaaccaacgaaacaaattgtaaaaactataaaaaataatccctggatttcctgccttttaataaa

SEQ ID NO: 74714 - DNA, 965 bp, Heterodera glycines
atggactatgttatcattttattaacaaaggtacatttcggtcgagcatgtaagcctatttatattattttttacttagaaaatatttgctattatttcataattatgatgttaatgcaattttctgtaatatttttttatttttcattcaacactttgattaattttttgtagtgcttaacttcgttttgcctttttttcatttcgtgcttcttgatcactgaaaaatgcccgaaaaatggtagtgtagtcttggtcttgttctagtttagaaatgatcaggtttttatattattcttattttattttgtcaactttttgagtattaatttttgtttttgacgtatctgactattagaaatctttattgtattttgggtttcggtttaattcactttatttaatttttgttttctaatatgagtagaagtatcttgacacatgtatagcactctgtcgtggaaggtatgatgtttagtgatggctaacaaatcacatttatgataacattttttgttttattaaatgtcatacaaagaagattttttatgccatttagttaaaattatataaaatttattttaaggttaaaggacaatttaactttgataattatatttccaagcaaagtccaaatttttttgatttgggtgctgatggcaacattcaaaaaatacacagtaattttaaatttttgttaattttttcttttcatttaatttccttatagggtttttgaatcgatatccttttttatggccagtgatttttttgagttatattaacaatttattaaatcataatttttgcccatttttctatttcaaaacccaagtaacttttattatttatttagaataatgaattacctataaattaatttatatgtttccaaatttttaaatgtttctctttctaatttacttatttcgtttttttttttcactcaatctatggttaataaa

SEQ ID NO: 74715 - DNA, 547 bp, Heterodera glycines
  unsure (1)..(547): unsure at all n locations
atattattgtcagagaaaattttttaattagagggcaataaagaataattttattaaaagtaacttaaaagttaattgaacaaaatttttggttaatttttttttggggggggtgaaatatttggttaaatgtaaaaaagcatgttcaaaatttaaaaaaataacgattttttccaaaaagtttatgactaggtggatttaaattcaaaaatatttaaataaatatttagaaacaacaccaaaatatttaagaaaatatcgacaaagttgcaacaaatttttccagggttttgaatggatttttaaatttcaaaaaacaaaacaaaaaatagtggaaaatttttgaatttttccattcttagaaggtgtatttaaaaaaaatattcgacaaatccttcggtggtnggatttttggttttgtagaattttgtgatgaattttcgaaaagtgcgaaaaaatgctaaaacttctgatatgtttatataaatattttaaaaagaggcccaaaatattttttattttttaaatcatgccaaaattcttttct

SEQ ID NO: 74716 - DNA, 775 bp, Heterodera glycines
gttgcccgacctgtattttgccaatgctcgccaagcaaatttccatgaagttactgtacccaattttaatttatttatctccaccgatggtacggtatcatattcgagccgagtaacactgacggtggcgtgcaatttaaagctgcaagactatcccatggacgagcaacagtgccacattcgcgtgctgtcatgtgaataacaattaacagattacaaaagaaataaataagggcttaaaacaaattattaatttaaaaaaacaacaaaaagaaattaatatttaaaacttccgtatcttaaaatttccgaaaatttaaaattttagctgttttataaatttaagttttttggaaataaaaaatctatggaaaagttcgagcaacaatattttcattaaatcaaaatttgcaaactaataaaactaaattctctatcaaagagacgaaatttcaaaaattatgtcaaaatgtaaccaaattcgcctataaagcgaataatgactttttaaattatatgtatatttaaaagcttttaatatgatttctgtcagatgcttacattgctaaaattgtcaatgtcacatggtttcggcgtcaaccaatcctgtacaaccctgaaattgatctgcccgaatttgacattgatcaaattgttgccgaatattgtgatggcacttaccgttatgcagtcactgaacgggcgtacaaaacaggtacaaattggttagagttagtatttgtatacctaattaataattttttattttcaaagg

SEQ ID NO: 74717 - DNA, 1688 bp, Heterodera glycines
atgcataaaaatcaaataataggttataaaaattcaaaacattggtaaatgtaagtaattttgcgatccatggcacctttttttgtcaaaataacttagaaaaaagacaaatttttctacattaattatagaagaaaataaaaacaaaaatttattaaaccgcatattagttctccttatattttctaaaaaaaactaattaaaattctcattagtttaaactcaaatacataaatttccttttcccgtttataattaaataattctctgtgatttattaaaacgtaactcaaacagcagcagatgtccatgagtgtcaaggctccaaacaattaaataatttgggtcagaagaaaagcagctgttggttgaaaagcttatgtttcggccaaattgattccgttaaaacaatttttcactcaaaatatttttacacgcctcattattggacccaaaatttggccagccaattcaacacactttttcaatttaaagtaattttttcttttcctttaatttgtttcgataattttagggcaaaaaatttttttttatttaattttctatttaaaaaaaaatttgaataatttatcaaatattttttttcaattaataattttttaatttttgtgctaatttacaaatatttcttaatttttttttttcaatttgaataaacaatatttattttatttatcaaatatttcgcaattaaaatttattcttgctaatatagcaaatggaaattgaaaataaaataaaatcatttttagaaaaaaagaaaattttcttcacaatgaacgcagttattgctttaatttttcttaaaatcaatatcagcttttggctacaattatatgcttttcatcaaaatcagtaatattctttttattatattatttatatttattatacaaaaatatattaaaaatacatacatttgagtggtcaaaacattcttggatacacacattctgatgaaccatttgtcgcatatcaccgtgccactgaacatgcacctaatcgattggtgagtaattaaatttaaaaaaaaaatacctaaataataatccttttaaaatagtacataattattactaaaaaatttccgtttggattaacaaataaattaattgactaatgtttattaattagtcgaaagtcgttggtcaagggagggaataaatttataatttaattaagacgaaattagcgattttttaaaagaattatttttgaagcttcaaaaatattattttttgtgtaaaagatattttttaatattttttttaaataagaaatcaatatattataactctaaattttgaaaaacaattcctaatttaatttcgttcattccaaatggacatatactcaccaaaagtgtaagtggcatatgcccttcttttggtatttttatttttgaataaataaatttcaacattttttctcttaaagttagtttgcatttccccataatcaacagaaaaaacttcaacgatttcgtgcaacgaaaacaaagtcagctacaacatttatggccagtgaattgcatcgaaaaattcgtcgacctccatcgaactcaaatggtgaacctttgtcagtacaattgggcttctacctcgagagtcttggcaactttcgagaaactcaaatggtttatgaacggcattaaaaattcaattaaa

SEQ ID NO: 74718 - DNA, 1423 bp, Heterodera glycines
atgccctcttcatctccaattgttggctttagcctgcttctcgtgctgattgcacaaaatgtttttgtccaagggtttggcttattaaattccaaaattgacgctgcaagcaaagcgtcgattaaatgttgtgtgaaggaagcacatctgagtatggaatgcgccaaatcaggtgagtaattattcaattttttgtgcttaaattttttaggtataaataaattttcttttatttacatttattatttactggaattgcgtacattttttgcgcatttctattaaaattccacaaaaacgggcatttcttaaatgtaatattagtgctctaacaaaaaaaaaaacggtactagtatttgggtacggcattttatagcaattttcaatttaaaaaaaaaattaattgttctattcgcttcggaacacacgcaggcgaaatcgaactttgaaccaaaaaaaatgaatttaaccgactggaccattgtttatgttgaaaaaaggacaaaaagggacccaaaatttcatataatagcctaatttgacatttttggcatcgttggatagtcctaaatgattctcaattaatgtgcaaaattaatttgttgcgccttttctttgacagtttgtcgttacttcggcgacaaaaattaccccgacaaatgcaccgtgccgatcatgcacaacttcaaccaaatggtcgcctgttttggcgcacacacggacaaccgaggtaaacaacaaaaaaaaatgcatcattattttgagtgaataaaatttgcttaaaattgggttggcccactccaaatccccggcacggttttacaaatattccaaatgattctctatgaaatttccttgtcatggcatttaaaattttctcttgttttttgcgagttatattaattttcaaatatatttttaaattttgcattcatccccaaaaaatttgtctgagattagcttttcgtccccgatcaatgacaatcctgctctaaaattaaaactgaacaatacctagtttttaacaattttgcaaaagattaattttatctagtaactttgtaatggaggttttggaattttttaaatgaaataattatttaaattagaaaatgccaaaatttcatcatttaagcgtgttgcaagcgtaagggcgtcaaggcaccgtgccttgacctgtgcaacgggaagaacccggactatttgccggacccggcttatgtgccgtgcacattccctggcaaagtggacaatgccatccaaaagtgcaaccacgacgcatggaaaagaggctaaatggaactcggagaataagttcaatcagcagaggaaatattgtattaacaatagaaaaagaattgttgaatcattaaaaatgtaaacgttaagagtttcaaattatttttttttaaagaaagataga

SEQ ID NO: 74719 - DNA, 56 bp, Heterodera glycines; identical to SEQ ID NO: 64087

SEQ ID NO: 74720 - DNA, 703 bp, Heterodera glycines
aatttggtgcgctttagagcactttctcttcctaatatttatgaaacaaaaaaatcgattttttcaagtgtccgtttggggtactcaaacaattatggggagcaaaaatccaacgcagaattaaagtacaggctatagggaagctattccggaaggattcggtctccccataaatctgggcgcatcggttcggggggactgccccgaaaacaaaaaaatcgattttttcaagtgtccgtttggggtactcaaacaattatggggagcaaaaatccaacgcagaattaaagtacaggctatagggaagctactcccgaaggattcggtctccccataaatctgggcgcatcggttcggggggactgccccgaaaacaaaaaaatcgattttttcaagtgtccgtttggggtactcaaacaattatggggagcaaaaatccaacgcagaattaaagtacaggctatagggaagctattccggaaggattcggtctccccataaatctgggcgcatcggttcggggggactgccccgaaaacaaaaaaatcgattttttcaagtgtccgtttggggtactcaaacatttatggggagcaaaaatccaacgcagaattaaagtacaggctatagggaagctattcccgaaggattaggtctccccataaatctgggcgcatcggttcggggggactgccccgaaaac

SEQ ID NO: 74721 - DNA, 1854 bp, Heterodera glycines
atgattttacaattggcaattgacacagcttatgggtgccaaacaaatgaaagtgtcgacggaatattccggcagaattttaacgaaattttaggggaaatgtttaaaaaagcggaacaacgggcaaaaagggaagataataatttattatatgttaaatatggaatttttgatacgaatgacataattgtccgatcgatttttgatgattattgtttatgggtgagtcttttaaaaacaaattgttttaattaatgccaaaatttaagactaatgatgcaattttcactgaatttgtgaaaggtcaagagacaaattttgagaaattttataggatgcttaaagaatattcaaactttgagaaatcaaaggaattttatttacaaaaatatggggcctattttggtcttgtgtatttaatgagaaaaaattggcaatgtgccaaagttggagaggatttaaaagaaaagtgccaaaaatacaaaaaatatttgcatattttgtatgaatatttcttcagaatatctgccgaaggtttttgctttccatttaatgatcatttaattaattaataaaataattaagcaaaaaacgcaaatatgacaaatcaattgtcagcggtaaagccaatttttaaatggggtaataaatattggcaattcatgcaaataatttctattattcaaaatctgaataatttttcgaaatgtttttggaaaaagggcgaaaaagaatgtgagaacgcctatggaaattatgagatggaattgcaaaatgagaaagaaacaaatcatgcaattgaagaggaagaaaaaaatgggcaaaatttggagagaaaaagcgaaaaacaatcgacggaaattggcaaacttcggacagaatttgaccaaaaaatggaagaaatatatgaaaatacaaaagaaaaagtagcagaagaaaagtcgaaattggtaaaaaaaatggccaaattagcaattaatcgtgaaagaaaaatgatggaagatgaatttgaagaaaaatttggcgctttcaattcgtcaccatttgcataagcaaattctcgtcttattctaatccaaaaaggaatttgaaacttgaaagtgattatttgagctatataattaatttacacaactccttattctaacagaacgcaaacactaagtcgatatttaatttttctcttcaattaaggtttaaattttacggaggtttgttatgggctgctttctgagaataattctagcatgcttaaattattatttaatttgatttaattttgttgctttttgtgggcaaaaagccacaaaaatttgcacttcccggcagaaggggggagtcttttaagcaaagcgaatttctgtccagaagacagaaactcacagagtccaaagggacaaattaaaggaggaaattcctctcctctaccgaagagacaatttggaaggagaaatcctttctccttcctttggtaagccttttttgacccaacgggggtcaatggcttaatggtctgtattaaagggctcctgagtgtcccatttaagaccttttcttaatctttattcaatttatacaattacaatttaatgcaaattgcttggacagaaaactgtccggctgacttaatcaaaaattgatcagtgaaaaaaatggagaatgggccggcttttataccctcacaaatcaataggggcggagccaggcacgtgaaaaatgtgcacaaacagatggacaaaaatccattaaaaatggtgactcatagcgaaaatgaagagagaaaaagagctgagtcataaaaaagaggagcgagcgaatgggaaaattgatcgacgaaaagtatcaaaaaataaa

SEQ ID NO: 74722 - DNA, 1838 bp, Heterodera glycines
atgcaacaattcgagttcgagaacggaagcgagagcaacatggacccagcgaatgagggccaccatcgcaacggcgcacagcacgacgaaaatgtgcaggacggggatggtcccgtcgcttcaacgaacgaagagcaacaaaaagttgccagagtaaacgaagcaacgagaggaagcaacatggcgacaggcgtggcgacaaatcagcaagggatgctacccttcccatcacgcaatttgcggagtgtatccatcccggtacggacagcgcgggacagaatcgagagagcatccgggactctcgccgctcgaattgcggaggctcgagaagtgatcgaccaagaccttaccgaaggggaggcaggctaccaagcagcgcgacttttggccatggagagaggactcaaggaggcaactcaaatcttccaaggacatttcgagattggaatggcagcagcgggagcagaacccgcaggtcaccaggacttcttctacgacctactgacagcgccactgccggcagcaacgaaagagttgcagttgcgaaaccatccaacaccagctgaactgcttcaaattgcggacgagcacatcggagacttaagaacgatgcgacgagcactcgaggatgaagaagaagcaatcgcgcggtctcgattgagcgggtcattcgggaccaacaacagccatccggtgggggacgaaccacctccactcgaaaatcggaacatagaagaatgtgagagatccttccaagtggcggccaaacgatggcagaacggcggacaaggtgtacagcaacacaaccgaagaccaatgggacgagtcgcgacacccgtcatgtcgaatttggacgggatttttcagcggcgtgccaaagtaccatccgtcgccagcatgagagtgacgaacacagcgcgagaatggatcaatcgaaatcgagacgagatgggggcgtttcccccagcaacagcccatcggccggcactgatgcaaccaaaaatcgaaaagcagcaggctcacgtgaacgacgactatcgggagcgtcagacatacccgattcgacggcatgctcgagacgagggagaacatgatcggaagcacgggagggacgaaatcacgggaatgacaacattcgagactgttcggctgcaaccgccgactttttccggaaagcccgaggattggacgacattttgggcctatttcaagcgagctgtggacgacaaacccattcccgggtttgaaaaacaattgcatcttctgcgctgcttaaaggagggatcgccagcccggcgggctgttgaagtctaccctccctccgacggcaactacccggtggttgtgcacctgttaaaagagcgattcggcgacactgacgatttacagcgggcaattcgggcccggcttcttcacttgccaccgacaaaggacaatgtgaacagcctgacgacgatgatcgacgagtttgagcggtgcgtgtgccaactcgagcagctcggagcgaacgtggacgacgactcatttggcccattgctggaggcaaaattgccggtgcgagtgctcacggaattgcggatcagagaaagtatgatgggatcgaaatgggcagtgcgcgagttcaggagagcggtgacggcgcaagtacggtgcatgcggtcagcagagtcagcattggcagcaatgaaagacccggaagtacgcactgatcacaaaacagaacgtgatcagacgggacgggaagttcaagcaggtcgggaaccgtttcaaagagcatttatggtacgggacagccaaccaacctgtgcacaatccaacggaacacgaagcgaggagcg

SEQ ID NO: 74723 - DNA, 4849 bp, Heterodera glycines
cgagctgtggacgacaaacccattcccgggtttgaaaaacaattgcatcttctgcgctgcttaaaggagggatcgccagcccggcgggctgtcgaagtctaccctccctccgacggcaactacccggtggttgtgcacctgttaaaagagcgattcggcgacactgacgatttacagcgggcaattcgggcccggcttcttcacttgccaccggcaaaggacaatgtgaacagcctgacgacgatgatcgacgaatttgagcggtgcgtgtgccaactcgagcagctcggagcgaacgtggacgacgactcatttggcccattgctggaggcaaaattgccggtgcgagtgctcacggaattgcggatcagagaaagcatgatgggatcgaaatggtcagtgcgcgagttcaggagagcggtggcggcgcaagtaaggtgcatgcggtcagcagagtcagcattggcagcaatgaaagacccggaagtacgcactgatcacaaaacagaacgtgatcagacgggactggaagttcaagcaggtcgggaaccgtttcaaagagcatttatggtacgggacagccaaccaacccgtgcacaatccaacggaacacgaagcgaggagcggtacgggacgaacgcccgtttcgccagacgatcgatcacacatgccaacgagaacgagagctcaggcgggaattggccccgtgtcgcatcaaacggaccaattgccacaacggagatatggaactgttcactatgcctaagaagtggacatcgaccaagcaaatgccaagcctatccgacagcacaggcacggaggaagagactcattgagcagaaacgatgcttgcgctgtatgagctccgatcacttattcaaacaatgccaacgagtaaaccggtgcaacgcatgccgaaaagacgaccatcattggcttctgtgctggaagagcatatcgggtggccaatcccgatccttcactgagcacgaacgaagggcaaagaaccatgcgacgctgatcagtgggatggatcgaccatctcacttcactgcagtacgagacgagcagaacaatcgagacgagttcgatatgaatgccggggaacaacgagcttttaccactttcggaagccgactcccggcccagcaaatgatatgcagagtgatcgcagctgcagaggaaggcgaagacgagtgccaaacaactttgttgcttgacccgggaagccatgtcgacggcgcagatacggagctaattcaacaactcggaccgcaacccatcgacaagcggccgcttacagttcaagtgttcggaggaaagaagcagcggattcggtcagcaacttatcgcctacgactcaaacggaccgacggcaaatgggagagcattgaggtgtccgaagtacctcagatctgtacgccaatcagaacagaactcatcgagtcgggagcaacacccgatagcgacccgcgaaccatcacacagacaacgcaacctcaaataatgatcggcattcgaaagttctgggattacgtggtcggatttcggaaaatcgagagtggcgcgcatgtgattgacaccgtgtttggacaagttttgtgcggcgaaggcacccaagcgagcagcggggcaactcccgcggtatcaatcctaacaaccatgccatgcggaaatatccaccaaactcgaacaaataaacgacaacaaatcggagaagtacgtcgaaattggaagcgaaaacgaaagagtcggaaaaacaattcgcgagggattgttagccgagaccgccacaactcacctgcagagtttggtcccgatcggttgggtgcgaacgaagttattacgtctcgagcggagccaattggggaaatggaccctaaccagcgaaagtggcccatcggatggatagtcgagacaaaaggagcgagcgagcataacagaaatgccataatcagaatggccaacggacgaactcggagacgaccgatcaagaaaatttggccgctgaaagaagcgcggctaaaaacgggcgaaacggacgaccgagctgacgaagcagtacatgaacgacacgaagaagaaacgcgagcagccaagactcagagcgaaacgagggatcggaacaaaccctcggcaacaaggagggaggagagaaacgaaaccaagagtaacgaagaaagtgttgaaaatcgacgacgagaaattgaagccgtaccgcctgacggaaaggcaaatcgagaaattcggagcgacaattctcgggggaagggccccaacgattcggaagagaaatacggcagcgcaacgacgacgaagaagtcagcagttttcggaaaagcagcagaagtgccttcggcggcacaatcaaaagcgggaaattcggcacgcccgcattcggctcagagacatgagaaaaaatatctgggagatagttcgatggccccaagtctcctcaatgttcctaccaagtttcagccgaattcgacgatatctgaaggaggagataggtttggcgcggacgaacctcaagcagttcaggcagacgaaatcgggggcgaatttcccgaagcaccagcggtcgaacagcaacaaaacgaactcgaacgaactcccaacaatccgggggaggaagtacgcggcgaacaaaacatccaaggagttcaagcagtacctgaagttgaacccaggaaatcggcaaggactcggagaaaccgggcaatttggtccccggaacgtcatgtaccacgaaaacgaggcgcaattcaaccaagaactgggatggcactgctgatcatgctcatcagcattgtcggaacgttcggctgccaaccatccattcgagcatcgggaatggacccgaaccttccatttcgagagggcccaagagtcccatgcaccacggagtgtgcagaacgaggagtcacaaatgtgagtgggcgggaatttaacaaaatcgagattcgttgcgatgacggatgctgggcaacaatgccaaagtcgacggatgtgaactacggactgccagcgaaaaagctgatgcatggctatccttgccatggcaaatgctggtgggggagcaatgcccctttcaacacaacgaggcgcaatgccaatcgtaaaacgggttcgaaaacccgttgctacaactcatggacacacgcttcggagcttcaactgtcaaggggcgccgcgggcaatgtcgccaattttttcattggcgacgagaaggcgggtcaatccccgcctattgcacaaatgaacgggacgggactcaatcgaagcaaaaagaatgagggatgttcttggagaagaacggggcgagtcccgattcatcaattcattcaaaattgatcattcctaatttttgccccttttccatccaatttctcatatgcatttctccatttcgtaccattcacattttgcccgttcctttgtcccatttttgccccatcgcatcccttcacaattcaaatctttctcatcggttggctcatcttcggccaactttgtgctcagatttcctttcagaatttctcactttttacatctgccaattcacattcaatttttgtgcgcccatttcccttgttcgcacttcgcttctagaattttctgtccgttttttgtctctctcacaatttgtccacgtgcatggccttttgcccgcccccttcgaaaattgtctatttaagcgccccctgccaaggggtcactctcttctcttccttccactccccttcgcttcatattcggtctgcctgtgaccaattcctccaattcccccgtcccatcgcccaattcgatcaattcgtcgcttttattcattattcgttttgctttaataaattcgtgctgaaacggcttggaggactcggaaaggagggaaaagcaccctccacactccatcacattcggcaaattctcgtgcggggccaaacggaggcgcccattcccgtcttgacccctccctttcccgacagcgccctcgtcgttctcccccaattctcccgatcccagttcctttccctttggcattggagaatccgggagttggcccggagcgtcagcgaatttcaagcagttcagactcccgcagccggagtctcgcggatcggtgtcagtctcccgccagccggagcagccgtagggacggggcgaattcccgtcgtcgacgaaaccaagcagggcagagaaggaaggaagagccgagcggtgccaaaccgtccaccgaagggcaggcccgttcgtcgccgctaatcccaccagccggagaagcgcgcatcgccggagtcagtctcccgccagccggagcatccacaggaggagacgggagtcgaaacccgtgctcatcaagttgagagcgaacgtcacgaagttcgagcagttcagattcccgcagccggagtctcgcggttcggtctcagtctcccgccagccggagcatccgccgcaggaaacgggagtcaaaacccgtttcatcgagtcaagagcgaagagcaactcccgcccgttcggagcagctcaaagggtcggacaagcccccttcacaaccaatcttgtcgagcaactcccgcccgttcggagctgctcaaaggggtccgacaagcccttcaccaaaatcttgtcggtggtgccgttaagcaagcagcgatttgctgcacaattctctcaagcaccaatccaaatttgtcacccctcccccctcccattctcgtccccctttggcgctgatcggatcggtcagcagcatcagacccatcagaacgaacggcaaaaaagggtgcgcttccctttacgacaagcgaacggagtgagcaggaggaaaaagggacgagagcggtga

SEQ ID NO: 74724 - DNA, 765 bp, Heterodera glycines
atgatgcgaatgtatgaaagaatggtctttggtaagtgttttgtacacaaaaatcagcaaataaatcaattacttctcttatccctcacctacacatttgaattcattcacatgtacctgtttttaagcacttttaaaaattttaatgaggacccgacttttgaggacccgacatttgaggatttgacatttgaggacccgacatttgcggatattcccgacatttgaggacccgacttttgaggacccgacatttgaggatatacacaatttcaaaaaaaatgaatgaaaattttatttatatcattataaaaaaagagaaaaagctattcccgagggccggggaagcaaaaaataaattgtaccaaatgctggtaatccctaaagtttcatattcaaaaacaatttaagattaactacttcattaaatagtacttgtgttttggtaattcatgaagatccccttttttctattaacatgtggaatcattgttaggaccacaagtcaaaacaagaatgaatttataatactttttaatatcagagtcattaatgattgttctgaagaaaggagagcggattgaatgagttgaaccaactcaggggatagtattcgagaaagaaaaaaacataaagagacaagatttgtttttagaacagagcccggaattttaaatcatatttttctatgcgttattatggcgagagaagcccaaaatattttctcagaacatttttatttagggctacttataaaaaaataaa

SEQ ID NO: 74725 - DNA, 152 bp, Heterodera glycines
atgagcaactctttctttgtaattttgcccagcaatacgccgggctttgtcggaaataaaacgaataaattcaaagtgcacttgccaaagaaattagtgtttgatgggcccgggtggatggtggacatgtctggcataatatatcccaacag

SEQ ID NO: 74726 - DNA, 2323 bp, Heterodera glycines
caagataaattagttatgccgttgaccacactttctggccacccggtgcgcatcatttacggcaccgcatggaagaaggagcgcaccgcggagttggtacgcagcgcaataaaagcaggcttccgtgccattgacacggcctgccaacccaagcattatgacgaggtgtgaacagaaacatattcattgcggcactaacttggtcaaaaataaaattttttttttgtggcataagaaattttgagggttgggcacttccatgtatggtccataaatagttagtattcattatatccatttaacgcaataatccccctgaaaaaaaattatgaagtgagtaatccgaagacctttttttgctcttcaggccaaaatttccaaaaaaaaaagtttctccggtgtaattttaaaaaaatttcagccgagcaaaaaaatcagaactttgtagccgtttttcaatgtaaattttgccatttttgggtcaaattttcaaaaaaaaaggtaaaatgtggttccgttagtgctattaggagccgctgggaaaattctggaaagttgaatttttttttgactaaaaaagcgtataacaaacagaaaaatgtctaattccaattaatgaccctatactagtagctttttttgcaaaagttgcgcaaattggaacatgaattagcgctttttaatggaaaaattttgaacacttccacccaattttttaaaaatctatcattacaattaaacggtgtttggctttaaaaatttacacaaaatttgcaataaaaattttttttttttcataggccctagttggcgtgacattggagcagttgctgcgcgaaaaattcatcagccgagaggatatttttgtgcaaacaaaattcacgtcgttggacggccaggacccggcacgggtgccctacgaccgaactgcgtctttgcctgatcaggtgctgcagcaaatggcgtattcagggggggagggaaggacagtggatagcccccgaaatcgaaaaatggaaaattttgaaaaattaaccggttttcttagccgtggtcccactaaaagtggccattcttagggccatcatttagaaaaaaaaggtttttttcccaaggtcgtggcacccatcatcaaccctttcaataaataataataataataataatgaaaaactgtggcgaaaaagaatataaagattttggaagagtaaaaaaaagggtacgggaggcccggaaaaatccactgcccttactcgtaaattttttcaaaaaaacgtcatatctcttttgtcaacttagtatcattttaaagcacttaatgttctctatatatatacatgcaaaataaagaaattttttaccaagttccgtaaaagttattataaaaatagtaattaaaaaaatatttcttttcgtccctaacctttttcattgctcaaatgttttgaaattttgcaaggaaatagaaaaccataagggctattgaatgatcccaagaatgtttaatttggtcgacaagccttgccttgagtaaaatcaaaaactttaaaattttgcacattttaatgcggaaatttttggtgtagataaaacagtcaatggaacgcagtttggcgaatttgcgcctcgattttgttgactctttggtgctgcatgggccaatgcggtaaattttttaaattgaaaaaatggaaaattgtgccaatttactcaaaataaagattttgtttaaattagaaaaatttccgacggtttctccgtatgagcaattttatttgaccctcaaaatggtcacattttaaggagttattggatgcccaaaatttaaaaaaaaacttgaggcctttttttgggcacactatgttcctctccccctcaaattttattcataggaatttttaaaaaatttaaagcgtttatcgaattggtaataaaagttttttacaaatctttttaaaatttcaatataaattttactgatttttttgggcagtacacttgacgaaaaccggttggtgtggcgcacctttgaacaactgcacggtgagggcaaaaccaagcgcattggcctgtccaactgttacgacttgcatttgctgcgcgcgctgtacgaggccgccaccgtgcggcccgccgtgttacagaaccgcttctacgcgcagtctgaccatgaccgggcggtgcgcgcgttctgcaagcagaacggcattgtgtaccagtccttttggacattggtgtgtttgtgtggggtttcacgttacgcaccacccctcccctcgtattgccctcccagaattttttaaaaatttacaaagtaaattta

SEQ ID NO: 74727 - DNA, 423 bp, Heterodera glycines
atggaaaaaattgaatttttagaaaattggagatgcaaatgttcggcaattcttcgaattgtcacgcaaaagaagggagtgttcgatttcagcagagaattcgaagaccacgagtttgacagtaaatgctcatggcgtggattcacttatttcatcgctttttcggtaagagaatggcaattggacatcctgttaattggcccattatgaaaccatttaggaattgatggacccgagcaaaggcttttacaacagagaagaggacaaagtgacactggccattgacgtcactgtgaaagaagcaaaaacggacaattcgtaaatattgtgggcaatgtttaattgtttagcattttatgttcaattttgacattttttgttgttacaaaaacatttggatttatttatttattctgcaataaa

SEQ ID NO: 74728 - DNA, 874 bp, Heterodera glycines
atgtccctggcctggtcggtccgtctttgcaaattccaatttcaaaactgcgcaatgtttttttggcttatgttcaggctcgccttttcaattttgaggtgaaaaaggcaattttaaatattgtataatttaacaaatactgaagagaatttattaattctttttgaaaatgatatttaattggttgactataaactcattctttccaatgtgttggtctttttctttgaaattttgtggaacatcgcaaaagcgaattcttgaaatttaggattttaggacttttttccatttctggtacaaaaatatttttattttaggactttgctaactgttgtttgctttacatcgatgataatgcggaaattttgatcaaatcggacgcatttttgcggattaaccaaaaaacattatgtgaaattttggagcgtgatcaattgcaaatcaatggagaaatttcaatttggaaagcagtaaattttatggccgatttaaattaattaaattgtttttcaaataattttcggcacttcgttgggctgacgagaaatgccgtcaacatgacattgagtgctcctctgcaaatcgtcgtgccgtcctcggcccggcactttttaaaattcgttttccgctcatctcaaaggaaaagttttacgaggatattggtacatctcacaatccttttttttgtaaatgaaataattaatctttttacagttccatacggcgttttaacaatgcaagaaatggacagtatttctcatttccttccgaattttcgtggcattttcggtgggcttttgttcccacttcagtttccgagccaaaagcgaatttcatatccgaaaaaagcgacgatttggatggaaattga

SEQ ID NO: 74729 - DNA, 466 bp, Heterodera glycines
atgcatatttacgtatgcgttctttatttcgggttattaaatcaaaatcttctaggatttggattactttgtacaaaacttatgttagaccgttattggaatatgctcctgaggtttggaatccatctcttctaaaaaatatttaaaaaattgaaaaatgtcaaaaatacttcaccaaaagagttcttttcaaatgcagccttccacccattccataccaacaaagattagattaccttcaactgccaacacttgaaagcaggcgaaagctttctgatctgttcatggctcataaaataatttatggccgaacagatcgaatccctttgaaatattcaaaccttctaaacgctttaacatgcccttttatagacttaactcgaaatataaattaggcaaaaaatttataccttttgcggggcgggtaacaaaaatttggaaccaactcgataaaaagcttattgaa

SEQ ID NO: 74730 - DNA, 843 bp, Heterodera glycines
atggagacaaaaatttttggcgaaaaacgagaatgtaagtaaaatacatcccctaattcgtgatttcaaaaaacgaaatatacaccccctaaaatcgaatttatgtgatttattactcgattttaacattactttctataattatagcatatctgttgaattagtgagttaaaatatgaatgattattatttaagtagttttatataatatatgaattcgctcaatgataaaaatgaagttaaatttcaatgataaaaatgaagttgttactctcgctatttgatttcctcaattttcgttggtcattcgctaaatattgcttaatttttaggaaaaataataaatttctaaatcgtagcgtaaatattttcaatattttattcttcatgttataatattgatgtattttagaatgatttttccaattagatttatgtaaattatgaaattttataaatccaatcactgatgattatttaaattgtttaaaaaataattaatttttgcctctaattaattttcttatggtattaattaatatttcaatttgaaaataaacatttgtttaatgttcaatagtttattaatataatattttcaagtaattagctctttttctgctcatttcctcccattcctcttcatgtcagtgaattcttttcaatttcttttcaatagtatgataatatgatttttcagtcctttggccataaatttttaaattatcattattccgtataaaagttgcaaatttgtcaatttaaatataaatttgatattcaaataatcatttttaaatgcctgattttattcttttaaaattggtttttgttttaaataaa

SEQ ID NO: 74731 - DNA, 1987 bp, Heterodera glycines
atgccgaaaagtgggggcaatgccaatattggcggcggtgccgccccaacaccgattccatcgcccaaaaatcagaagcaaaaacagcaaaagttggtcaaagtttacgaaagatggaagttttttgagggtttgataccaatgacattcgttttttgggtcagatttttgaattcaaaaattcgaattttgtttaattttaagagctttgtggtcaatgtttcataattcttcgttaaattctttttttattaaatatagacaaccttcaaaagctggacaaaaaaatgcaccaaaagctgatcagaagaaagtggcaccgaaaaatcagcaaaatgggaagccgaaaagtgaccaaaacggtgggccgtcgccgatgtccaaaaaagaaaagaagaagcaacagaaacgtgagaaaaaggagaagatcaaacagaaacatcagcagcagaaacaaacggttgacaaaaggaattgtaaattcatcataataatattgtttatttagggtcaaccgaatgcggaaaatttgaagaaaaacggtatagaaaagttggaggagggggaatttgtaactttttgaattttagaaaagaaaaatcacatgaaatttgcgcgagagtcggcggagcgactggaagaagcggtcaaaatgatacaggcgagaaaggagggcagtgaaaaggcgacgggggaagaaaacgtcaaaaaggacaaagacgcggtgtacaacatggtaaaaaatggggttggacattgcatataccacctatctatttgtctaattgtacagtttatcaagtccaccataaaaggggggaagtccatacaatcggaaccgactttttccgctcacgccaaaactttttcgattacccctataataagtttaaaatatcatctatatagagtaaactttaatgttttggggccctgatttgaaattaaaaaaacagcataaaaacaacgaaaagacataaaaaatgttcgcacaaagttcaattgatttggaatggttaatttgttttaaacagcccaataaacgtaattttatgctataaatagtagtgaacagttccaaatttaacttctttgtcatcttcatttcctttttaacagtttaaatgctattttcccctttttaggtggcttcttccctggaaactttgctgcccgtccgcttcgtttttggccgacttcgctcctccgctcggctggttgccaagcagcacagcagcaacattgtgcaggcagccacactgttggagccaaagaagttcaagcagttcgtccagctgttggacagcagcaatgtcgccaaaaagggtggtgttgccgaagcgacggaggacgacgaagaaaaagcagagcgaaaggaggcgggggaggaggacgaacaacgcgttttggcactgtgagttgtgtaaattgttgcgaaatacaacgaatgatataaatgccaattgggagcaaaaaagaaaaatgttggaaaatagtcgagcgactgtttaagaaattgggcctatttgaattcgacttatcttattgttagacatgacgtgtcgtataacgatttatcagttcgaggtctcattctcgatatgcaaacaagccgagaaattttgattttgaactaaaaacggtttggtatcaaccgataaatctaccatgtatgacacatcatttttgagatataaactgccccggacgaccaattgcacccacatatatttgaatctaaaatttagtcatttttgggccataatcataaaaattctgctcaatgatcaattgataattagtgtaacattgccatttctaaaatttgcatgttcattgtcacagtgccctttgtgtgctctccgctgcgatgtgtttgctgggcaatgcgttgcccgacgacgaggacaccgcccaacgacgtgaggaatatctgaacgagtcgacggaactgcgcaaaatggccaaggcaaacattcattggtga

SEQ ID NO: 74732 - DNA, 849 bp, Heterodera glycines
atgaattatgtcttggtatgtaatattaaaattttaaataaaaattttttcattttacagacattttttgctgaaaaaattttgaattttccgatggaaaatccaagccaaatcgatctgtctccgtttttgcttttctttaattattcgccctttctccccgccggcgtcgtctcacaacagtggacaaataaatgcatttttcccattcacattttatctatcgtcatcctccgtccgacctctgcagtgactgtgctgggccaaacagcgctaaggctaacatacccaaaaataaaatgcccacaataaaatgactcatcgatgtaaaaaataattagattttaattttaaatgtatatttttttaatgttttttaatcgacccataactaattgtttattgaaaaagtaattagtagggctgcttaagagtcgaaatttccgagactcgagatcaagacccaacccccgccccaaaaaaaaggccgagaaatttcagtacaagttttttttttgagaatttttagaatgtatataaatattttcccaacaaaacattttttccaccttttcttttattatttttgtgggcaaataattaaataattatcatcattaaatatttcaaaattcataaaaatttaaaaggcctatgctcggcctaacagctaagaccaatccaaagcacccaaaaaaatataaaatattcacaacaaaatgattcatcgatttttaattttaaattaattatttttgaaaatacaagaaaaattttttttttattattattattattattattttcaacttaaatatttataatcaattaaaattagaatagaaaaaa

SEQ ID NO: 74733 - DNA, 854 bp, Heterodera glycines
atgctgcggaatattggcattttgtcattgttggcatttttcttcctctgtggcacaattaatggacaacaaccgccgctggccaatgggttggagccgactcgacaacgaattcgcaacactctcggcggtttctactcgggcaatgtgacactgtacttccgtaactcgccgtacaggtgccatgaaaaaaatgggaaatttattcaaaaaagggcggggcaggggaaataggtaaattggacacaaaatgtaaaattcgggtcgcaggcgagtcgtgatcccacccaaatcccgatcccgaacaatccctaagattttgaaaaaacgatcgggagcgatcccgagtcgtggtcccattcaaattccgataccgaacaatccctaagattttggaaaaacgatcgggagggatcccgagtcgtggtcccattcaaatcccgatcctgaccaatcccgaggcttttatttcggaatcccgccggatcatcgggatttgcttaaaattaaaatttaaattttgtcgcccaggcggtgccgatgggcgccgccggggaaagaaaattttgtaaaattttaactaaattattctgaaatttattgaaaattttttctttctagagttgagcgtgaattaattgtcgaatcgggcgcaacaatcacaattgagacgggcgtacaaatgtattttgacacgggcgttggcatgaaaggtgggtgtaatgtgacaattggcatttttgatcggcatttttaaaaatgccttaacctggattctatgttgtatgtggacctggaattcctggacaaaaatccagcaaattccaggtccaggcttgtcatggcctggataa

SEQ ID NO: 74734 - DNA, 2126 bp, Heterodera glycines
aaaatgctgcggaatattggcattttgtcattgttggcatttttcttcctctgtggcacaattaatggacaacaaccgccgctggccaatgggttggagccgactcgacaacgaattcgcaacactctcggcggtttctactcgggcaatgtgacactgtacttccgtaactctccgtacaggtgccatgaaaaaaatgggaaatttattcaaaaaagggcggggcaggggaaataggtaaattggacacaaaatgtaaaattcgggtcgcaggcgagtcgtgatcccacccaaatcccgatcccgaacaatccctaagattttggaaaaacgatcgggagggatcccgagtcgtggtcccattcaaatcccgatcctgaccaatcccgtggcttttatttcggaatcccgctggatcatcgggatttgcttaaaattaaaatttaaatgttgtcgcccaggcggtgccgatgggcgccgccggggaaagaaaattttgtaaaattttaactaaaatattctgaaatttatagaaaattttttctttctagagttgagcgtgaattaattgtcgaatcgggcgcaacaatcacaattgagacgggcgtacaaatgtattttgacacgggcgttggcatgaaaggtgggtgtaatgtgacaatcggcatttttgatcggcatttttaaaaatgccttaacctggattctatgttgtatgtggacctggaattcctggacaaaaatccagcaaattccaggtccaggcttgtcatggcgtggataacaatgcctggacctggatttttttgaattttcttttaataagcaaacaaatgtttaaaaaaaagtcaatttattgtcttaggaaaatcaaaatgtttctctaattgatataataatattttaaaaatatttatcattttttgataatttgaaataaagcatgatcactgaaaaaattctaaaaatattttggaaatcaagtttttcgtgcctaacctggacatggatttcctgggcaaaattctaggaaaacccatgtccttgtttccaggtcccgggccaagtttctaattggcataatttgtgcacgatttgcgtgtccatcaatttcagtctttggcactctgcaagcagttggcaacgaatttgcgcacattcaaatgctaccgtaccaagagcagctggtgtacgatagcaaattgccagaattacggctaattgacggtcccaccgtcaggcaaggccgtctgcaggcaaatttctttaatattttttttcaaaaaataatttacgaaatttaataaaagttcgttttcaattaaaaatgtttttttttataaaaaaaaacattgaattaaaaataaaaaatacgaggtgtacattttaaagccatttaaaataattgtctaattgagctgaaattttacaaaaaaaagacttttgctcaaaaaataaaaaaagcgtatttttcagaattattttcattgtcatcaagatttgatcaatgttggaattttttgaaattaactatgaatgttacagtctaaaaaactaataaaaaaatttttgtttaccactaaggttgttaaatgattttttcatctttttgttccaaaaaattaaaaattgtaattaagtaacaaaaaaaaattaaatttttaatttcgtaacgcctttttatcatttaaaattaatttgaaaaatgcgtaatacattttttgaaatttttttttttgattagattcgctttcgggaccgttggcgttccgtctgtacccaaatgacaaattggaccagtattgacacgggcaccgcgtgccgtaccatgggctatgatgacggcgcattttggcgcttttttcagcgcaacaacgacacttacccatttgtaatgccggcgcccaaatgtacacaacgccaaagtgggaaaattaaaaaattttaatgccaaatttaattttatttattttttgaaatttaagactctctgtggaactgtccaggctttgaggacaaagaacagattccgttgtccgaaaatttgtgccaaggtgaggacgacattggcatttattgttggggaaggccaactttcactggatgggctcgccattggaaaggta

SEQ ID NO: 74735 - DNA, 307 bp, Heterodera glycines
atgtgcgcaaattcgttgccaactgcttgcagagtgccaaagactgaaattgatggacacgcaaatcgtgcacaaattatgccaattagaaacttggcccgggacctggaaacaaggacatgggttttcctagaattttgcccaggaaatccatgtccaggttaggcacgaaaaacttgatttccaaaatatttttagaattttttcagtgatcatgctttatttcaaattatcaaaaaatgataaatatttttaaaatattattatatcaattagagaaacattttgattttcctaagacaataaa

SEQ ID NO: 74736 - DNA, 706 bp, Heterodera glycines
atggtgaaaaagcaaaaaactgatgatgaaaaaagagaaattgttgaaaaatattttaaaataaaaattaaatttatgaaaaatggaaaacattcgcagaaggaatggaaagaatttagagcaaaaattaaacaaatgtttggtgtgatttttcaggcaattgaaaaatgggcaaagaatttaggaattgaacaaaataattcaaaaggtgaattttaaataatgttttaaaaaatttttgtttttttttcaatttacagagcgaaaaatgttatcaattgctgaaaaaatagaaacgattaaacaatattatcaaatcaaaaaacaaaatccaaaattcaaagaatacgaaattgccgcaaaattgggaattccaatgagctcattagacaaatacaaaaccaaatatggcaatgaatccaaaaacaaattgctataatgaggacaattattattattattatcccaagaagattaaatgaaaaattacaatgaaaaaaatttgaaaatttcaatttttttcttgagaatttgtttaaatttgagtttgtgataaaagtttaatctctttttttcatctgtttacaaaaatattttaatcattaaaagcgtcgaatggtctaatgttttaggtgattaagtttaaaattatattaaatgttcatattattttaatcttgaaaaattggcaaaatatgtaaataaa

SEQ ID NO: 74737 - DNA, 484 bp, Heterodera glycines
atgacgcagaaaatgcgcaatttcgtcatgccaatgctccgaatgaatcaaattgccgtcgttgacccattcaccaaagagcaactgctgcttcctgtgaatgtactacaattttcacacaattttgcaattgtactgatttcgttggggacttttttgacaattatttccattggattggccgcgtttttcactgtgaaacgaaatggggtaaatttaaaaaacaaaggatgcttaaattaaaattaatatttcagaagtatgtaaagtgaaaaacacaccaaaagcgaaacgggacgaattattatattatgatttgtatacaattgatttgcccagtttttagcttgctcattttggctgtttatttgcatggcttatttataaatgaacccaaaactctgcctggcaaaaagccattatgataaaaatatatgaaatccccctctcctctcctttgctgttttaaaacggcaacatttta

SEQ ID NO: 74738 - DNA, 316 bp, Heterodera glycines
ttgagagtgtgacaaatggcggacggacggatgggccaaattgagaaagtgttcgtgcaattttgagaattttattaattttgaagaaatgcttatttatcgtcttcatttttgcattctcccagaaggaaagaatcccttttaatttatattattactcattgtcagttcgcttttctgttcacaatcggttccatccttcatttattatattatcattattcagggttactattacggttcactcattctgccttttctgctgatactctttgttcgtttaacatatgccttatgttgccattttttatgtttg

SEQ ID NO: 74739 - DNA, 1364 bp, Heterodera glycines
gaatttgaatagcatttgctattggctgatcggtgccaactcggcatgcattgccatctattcgtttacttattttgtccaatttggcattgtgtttttctctccgtctggcattcctctctggctttgttgtctgctcgtctctgtcccacttttcttcttatgctgccaatacgtgctttttcctctgatcgctttggaccgattgatcggcgccgttttcccattaaagttgaaattaaaatttaaaagtaaattttaaaactattaatttaagacaaatgggctttctgtataagcgccgttacatgctttttgcattcttcgcttcaacttcgtttggcactgtcattgtggcattagcagtaaacgagtccattgtcaatttttcagagaagtaaattttaaaaactaaaatcaaatgtgtcccagcccattaattggatgcttgctttacatgattcgtcataaactatcgtattttctctaattatatgcccgtcattaatcttacccgtctccaattatctccccccccctttctgaggaggttaaaaaataatataccctagcatataatagagaaaataccgtaaatgaagttacggactaatagagaaaacataaagctgaaggtttaattttggctatttatgcggaaaatgaatgacgtatttttaattttttttaaataaaaatggaattaatccgactaatcatggctcatctgctggataatgaattcgctaattctcatattttttagattggttctttgcatgacttatgatccggtcccagcatattttgccaatttcagttggatgctcaacctgtgttccattgttctttatttggcactttggtttcgtgtgaaaatgatgtcctcatctgcttcaggaggcattattttaattggaaaattaataattaatttttgaatttttagcaatgcgctctaatgagacaattaatcggaaagttcttttttcactgatggccatttttttggttgaaacgttcggctgggtgttcaatttatctgttagacttttgctggttcaattcgggaccactgaaagcacaaaatggttggtattgagctatgccggttatctgacgcaattttcattggcactgaatgggccaattctttacgcgacgaggtaaatatttcaaaatagcctttttgtaattaatttaaattacttaaattatctctccattttagcactgaataccgtaccgcctttcgtaaagtgtttggatttggtcaagtcaatttgcctgcatttaccattcaagtggtcccaatgaatagaagcggaaaaactattggccaaagcggaaaaactattgcctaa

SEQ ID NO: 74740 - DNA, 211 bp, Heterodera glycines
aaattttacccaaaacaattaagaaacgaattaaaaatggatattttgaacaaattagttgggtcggtccgggtctttcgttctggcccggaaatccgttccgtacagcggaggccgaacagaccagtgcagtgcctaatttggtgtcaattgttgaacgctccaatttttatgcgttcagataacttttgccatgccaaaattggtccca

SEQ ID NO: 74741 - DNA, 498 bp, Heterodera glycines
atgtccatccaaaataattttcttctttttgttgtctctgcgctgctgtttttcatcggcatggtttgtgttgttgatgcgcatcatcaccaccattggggtaacaaattgctattattaattaaaataataataatattatttttaaacgttaccctttctttggaaaaaaataataattcccaaaaacacaaaaaatcgcaaaaactttgtacaggaaaattgatgtttagaaatattcgggactcagttcgggtatctatctgtcccgtgatttagcattttatttgaaaaaagattaattaaatctgataaatttaggctatggagggactcaattcgaatatctatctatctcttgatttagcattttattttaaaaaagattaattaaatccgataaaatttaggctatggaggctatggctacggcggatggggcggaggatggggcggcggatggggcgggggatgttgcggctggggctggggcaaaaa

SEQ ID NO: 74742 - DNA, 456 bp, Heterodera glycines
atgacaatgctcaaaacagtgttggtaattttgttgccaattttcgatcaccgaaccccgaaaataatccaatggctccgatgttttggtgagtgacactttctcaagcaaatgcttctcgcaaaattctttgtccctttgagaagtgaaaaagggcatcaaatggtcccacaaaatgagccgataagacgcgggcggatcaatctgagagaaaagggcacaaagccaagataaatttaaataaaaaatgaaaaattttcaacaattttacggtgtgtgggttcgcaaaataaaaatattttctccgataaatgttttcttaataaaccaaaatttaccaaactttggcatcattaaaaaccgaatgaaattttgcagtgcaaggccccctcgcttttgggtactttttaagcgaaacatcggaacacaattttatgtgattttaaattaaataaa

SEQ ID NO: 74743 - DNA, 2288 bp, Heterodera glycines
agaaaattgtggacaggattaaccgctccccgtcacgtgcccacggaatgcgtccgattgatgtgggctttttcaatgctcagagggtgtggaagctattatatgatggacacggtccgccacaaaaacgacgaccgccacgcttccgcaaagacgattttgtgcgcatgagcagagagaagggacagtttgagaagggctatttgccaaattatggcgacgaaatattggaggttgacgaggtgctgaaagcggtacgccccattcggtataagctacgggatgagcacggagagaaatttaagggcagcttctatgagcaggacctggcgcgtgtaagaaaggatgcagagacaagctatcgtattgaaaaggtgtacagaaagagaaagagggcggatgggtccactgagatgcttgtcaagttcataggataccccgagcgcgaatgtgttgataaaagcacccatcgcccgtattgtattccattcatatttttatgtgaaataaaaatgtcatcgaacagcttctttgtgtttttgcctagcaatgtgacggattacccggacaatcagcctaataaatttcgggtccggctcccaaagccgttgcattttaacggctcttgggtttgtgggctgcatagcataacctacccatactcatggtcaaccattggcacattggatgcacaatggattgacattcacttcacacagcgtagcacaatggatgaggacagaccgagagtgatccgggtgccggtgcccaagatatcacataacagggttgagcagctgaaagacttcattaccgctacactgaggaaccatatcggtgcaaaaatgttgccactccctcatgaagaggaggccgatcggaatcggacaaagccgctgggctctccaccgccacggaagagagacagaagagatgtgaacaacaccactcctccccaatcccccgtgctgtttgatgagcacggaaagcgactcgggtctcccccgttgtacgatccgaatgctggcgaagagcaacacatgagcgatgatgatgatgacatgcgaacacaaaaagggacactaattattgatccaaaaagcccgtctcctatagcgacacccccagttccggcggttaaaccgctaacaacaacaacaccgactcctccagccgtaaaaccggtaacaacaacaacaacaccggccccccagtcgtccgcaaagccatcagcacaacagcaaaagccaacacctgtcccgccaaaaccatctgcccctcagacgtcagaaccaaaaatagcgacgacaacgacacctggccctccaaaaacagcaataacaaaacctacaacgctaccgccaccgccatctcctccaacagttcctctacagcgaaagccaacaacaacaacccctcaaacaccaacaccaacagcaacaccgactcccacacaaccaataacaaccgtccatacaccgaaaaatacaaaaacaacaacaacaacaacaacaccgatccctcaaacaacaacaaaaaccacaacccaggtctctccaacgccaaaaataccatcgcctaagccgcctgctgttaaacttcctcctcccacttctacaacacatccgcctcagccagagccaacaacaacaacaactgctcctaccaaaactttcacttcctctcctacgacgggggctgttattggattaccttcaaaagaaaaacaaattccgaccgtcgacgaacctgtctcggctgcgttaactctagaagagttagatttaccagaaaacagcttcatagttgaaatagactcgctccaatttgtgcccaactcggtgtcaatccaatatcgcgatgatgtggaacggttcaaagtggtgttcaagaatgatattatcagccacttgtccttctcgcctcagttgggctatgttcttggcttcgaaaaccctaagcatgttatgtcaaatgaactgtcaaagtatccggttgatttacggggcggcatctcaagctttgcggtctactcaaaaggattgaccgaaaatatgataatcggcaatacgctgagctcgttgctcagggttgtgtctatcagtggtgccattcctggggattataatgagaagatttatgactcgccaatatttgcgcgagtactgccacgggagatcaatgagattgatattgagctgcgcacaatggacaaaggccgtctggtgccattcgcgtatgggacgacgatggtcgtgttgatatttaagaaagtgataaatttctga

SEQ ID NO: 74744 - DNA, 868 bp, Heterodera glycines
atgtacattcccgagagcagttcacgcggtgaggacctcgcttttgctacaattgcttgcaattcgatgcttataacagcgccagcttcaacattttcatggtaaaatgatggttttattgaattacatcatctcattaatcctaaacattcttttggccatctgctatatgtcaaaacattttataaaattaaatgtttgagcaaacaatttttttaaaattattttacatatttttttggaaaattttttgaattttggttggcaaaaatgagaatgtttaggtccattttaacgaatagctgatgcccttttatattgcatttatttgttattaaaatttctgtttttaatttattaccgattttggcatatgtattaagaatttaaaaaattttgcttggcgtactgtatttttattattttttcaagattttttttaaaatttaaatgtaaaaaaaatttagtaaaattaccaacaaaaaaaatttatacaaaacagctataaaattaacaaaatatttaaggtaagtttttttggttttaaggtggatggcctatttgatgccggacaattcgccaatttattatagtgcccacttggaaaagacatatcgtggcaaggacaactttctgaaggaatggatacccttacgactgatcgatggcaaaaagataattcgtgacggttgatccaaatccaaaaattctaacctattttttaattaagaaaaaaaagtgaaattttgattttcatattgttacattatttctgaaaaactatattatattttcatttcatttttttgtgacttctatgttttttacttagggtgtaacataatttttgatacccaaatttttttta

SEQ ID NO: 74745 - DNA, 555 bp, Heterodera glycines
  unsure (1)..(555): unsure at all n locations
atgaagaaaaatgaaaaaaaagttttttacataaataactttatgaaaaaggcttataaaagaactgaattgacatattttaataaattacaaaatgcctccatcttatattttatttttttagatttattccgccattttttgatgaaaatcaaactcattgctgtgcttgtgctactgggtaattttgaataaaaagaaaaatctatcttctaatttgtcagctaaatttgttttattgtccttgcagaggacaataataaaaaaatggttaaaaattttaaaattcatgcttttggcaaatcagaaaatagttaaaatgatactaaaaatcattaatatttatggtttttagacatatttgggcactttcataaagtcagttgtgaaagtgcaagcaatgagaataaaattacggcatatgaaccatcggagcacagtataacgccactaaaggaccacatcaacagtatcactggtcaaattgatctaagccaattcaatgctacgctagaaaatcttttgtcattccgccaaattntgtgccaacattga

SEQ ID NO: 74746 - DNA, 1565 bp, Heterodera glycines
atggaagaaagcattggcaaagacggcacgccaaatgccactggcattcttcccaaaccaacgtttgacattctctgcatcgccataaatgcggtggaatgcgctttttgctgtccaaccgttgtattgtgctttttgttttggcgactcgtctaccaaacatcgctgttgcacaataatttgaaattcattcttgtcgcccagtccatttatgcatttctgtatgcatttgttcaaattttttcggtaatttatggcctgttttcgcccatggcactgttcttttttgtgaatgcgttccgttatttcttgctggtgtacggtaactttataggtaggtgaacgcactgtaccgtatgcttaatttaaagctgaataaattaaattttaaatataattgatactaatttacaggacatttgttgattgctgaaaggattgtggccactttctgcatcaaaaaatatgaaactgtcaaaaattggtggaccctttcgttttgtgttgtaattatcgtaagcgatttaaatgttacggtataataaatttgatcatagattttattgtctgttttgaatgcatattattactctacaacatcaatgtttgtcgcgccgaatgtttgtatttatacacaaatttttgcgacagttgcaagtttctcggaaatttttgtaagttttattaattttaaaataaacgaaaaataaaataaaaaattaagatcatcactttgctgctggctttgaataaaagaagatttaatcgcgaaaattcagcttcatttaatatggcaattaaatatcaggtcgaattataattgggaaagacaaataattatactaaggattatatttaagttcaattaaaaatttttaattaataagaaaatcattttatttttaatgactgtaatttaaataatataacatagctaaaaaatttcaaataacaattaattacttgagattttttattttttatttcttgtatttaatattcaactaaaaatctcaagaattattattcattcaatctctcgtaattatgtgataataatttttaaattggccaatttcagttagttgaaaatatccgaacaggacgacaattgagtccggcatttttgttccattttcttggcgttttgctttcattttttatgatcttagttatacgtacacaaaccatcaccgatctttatttgttgctaataattggaaaatttgctctgtttctgcagggaattaacaatttgttgattttgtttacaacaataaagtgagccattttttaaattaaagctgaataaaccattaattaattaattcttagatgccacccaattttgtgccgaaatgcgctgaaatttgtccaaaaatatatgaaatgttcaacaacaacggctgctgttgatccttcaattttggcttcttatgtgaatggaattacgcagcgacaaatccctgtcagtactaacatggataattatttccaattactgcagcggtcatgggaaatttgaacgcattttttttgtataattcttacgaattttgaataaa

SEQ ID NO: 74747 - DNA, 604 bp, Heterodera glycines
  unsure (1)..(604): unsure at all n locations
atgaaaaatctcagagtctctcatgaaaatacggtttctgatgagaaaattaatgtactgttcagaggtaccgagcccattgggtgtagtcaatcaaattaatgttttctttcagatgccatgaaaatgtgtgttgattcccacgacgaccttttatttgttgccttgaaggacggacggattgtagcgattgaccgacaaatgaagctggttggggtcaaattggaacgagtttttctattccatttttctttaggttgagaggtttggccattcaataacaaatatgggctgggatgggaaaagccgactcatcggattcgattatttgtacgacgatcagcagttgtgtttacttttggacgatgggaaagtgctgctctacgcaacaaataccaaagaggtaatgagataaaccacttcaaattttgccgttggcatttttctggtttgtttcacaaaattcgccactaattccaaatttcagcttaaatgtgcgatagaactgaaaagaaatgtcctcggctgttcctggagtcccgaccttcagctgctcatcgtcgccaccgactcgcatttgctgatggtttctcgggaattccna

SEQ ID NO: 74748 - DNA, 2228 bp, Heterodera glycines
gctttcatcgaaagtattgagcagttcgccgctcaagtcaacgacgtcgagtcgctgtgcgtctttctgtcctcactgaaaacggtggacacaacgcaacaggcgatgttcgccccgttttatcccgaacgccaaccgacaaaccaacagaaacaacagccgaaggcgaacagatggacgacgtcagaaacaccgggcaaagttaacggaatttgcgaaaggatccgcaaccatttgatgagcctcggcgagggggaggaggaggcggggaggggccatttcctgcgactttaccccgtcgtcctttgctgttacgtcatggaaacgccgagccgagtgtccgccgctttggtcaatatgtgcacacaaatagcaaaagctaaaggtgagcgatgaagcaatcactaaacaaaataggggaaaattaatggtaaattcgttttaatttagaaaataaaaatggggacgaacattccgaattgattcgccaatggactcgccatttgttgaatttcctcaaggagagcgacctgtttaggcaagcactgaagacatatgacgtcgaaatcgctctaatggtcgcccaatcgaccaatcttgttagttttatgaaatgtttttgtttaattatttttttaaattcaggatccaaaggaataccttccgattttgaacgatctcaaacagaagacgccctcaacttaccaaaagtaacattttaatagacaatgatttttaactaattgaaaattaacgatgcaaatggattatcaagtgattttcccgcttttcaaccttttacagatttcacattgacatgcatttggaggattggaattcggcactcggacacattgcgactttgtcacaattgcaacagaaagatgttatcgacacaaacgatgaagacaaaagcgaagttacggagggtgaagcagtacaaaatacaccgaattatttggaggaatgccttaagctggtcagtttgtttaaactcaaattaaaataacaatcagccgacaaatatttaaataaaattaaaaaatcttcaaaacccattaatttatttgttaattaaggtccaacaacaaaaactttactcgtccgccttgaaattgttttgcgggagacccaactacaaagtttggaggggaagggggacaaatgaaaaagtaaataaaaacaaaacccaaggacattagcgcaattactgcaaaagaattggaaaagaacggccgtttaagagaggcggcgattttgcatgaaaaagcggaagatttggcgtcagcgatgagatgccatttaaatctgtcgcatttttcggaatattgtcgtttggccaaactgcacgagcaaagcgatgtgaaaacggagagcgaactgcgcaaaatgggcacgcaaatggttttcaaggacgaccatttgggagcagccgaagtgtttttgcaccttgggaaagaggtggtacattggcaaagcccaatcgaacaaattcaaattcaaaatgctttttattcaaattaattacaattaaaatgtataatatgtaaaagacaatttttcccctttcagaaaaatgttgagaagattttggagtgttacgagaaagcaaatgcgtggattaaattgagtgcttttgtgactgaaaatcaatccacgcttcatggtcagtttgattatattgtcaatacaattcagtccgattttgcatttctaaatatttgccaaaaagtttacatttaaaaaaataaccggtgagaaaataaagtgattaaggcattgtcaatcgtgcccaagtgcttatgtccactcgatgtgcgcagataattgaacaaattgacagttggcgggacaccatcacaaaacacacgaaacgattggaagtgctcagagaggaaaagcgggccaaaattgaggcgaagcaaacggcgtccggcggcgacgaccaattggacggattcagcgagtcgtccgtcacttcctcttccttctccgacagttcatccaaagagtcacgctcctttttcgagctttcatccaacgcattgaaaggaggcaaagattggtttaaactgcaaagaatggagcgtcagaaacggaagaagctgatgatcaaagagggcagtcattatgaggacggcgcacttctggtcgccctgaaggacatttatcaacgaattgacacccaacaaggtcatcacaccactcacattccctttgaaggctaa

SEQ ID NO: 74749 - DNA, 460 bp, Heterodera glycines
ttcagacgaactgctcgaacttcttcccgctttgctttccatggaccttgtcgacagggcgtgtcgtctgcagaatgaaatgctcacttttcttgaatttgttgctgaagtccatgcgcaactttggccctctcatttggaggcatttcatttgacgggtcccctcgcattggtgaaaatataacaaataaataaacaaaaatattataaaaattatattgttttttgccagcatttcgattcaaattcatgtgaaccaatgcccaggaaaattcacctgacagatgaacttatgccgccgaaactgcgctcaaagggcacagaatggaaattggaaattgtcaaataataaaaaaaaatttcctttccccagtgaattgttgacttataaaatcaaagttttactatcatcccacactcatttgttgattttgttcaattttataaatccaaattttta

SEQ ID NO: 74750 - DNA, 822 bp, Heterodera glycines
ataatgccgaaagcgccccccccccatcttttggcgtgttttcttccgcttttcagctgtttgccggagaatgcgtactgtgtcgggaatgcgctctctccgcagtgtttgcgttgcgactttccgcccgtttgtcctttcggtgactccgtcgtcgtcaattgcactccgtccgctgcctttgtcaattgcgctggtgacggcgtcgtcccccgtgccaatgtccccgccgttgttcgccttcaagcaaagtgccgtttctgttggcaacttgaacagagagaaattgtgtgtgaggagcgaaagaactgctcgaccaacgagttgacactgcacaggaccaaatgcagggcgaaaccgaacgcaatctgtgcgggacggaggcatttcttcaaaaatgtccggtgcgtcatcgatcagcctgactgttgataatgatgatgatccttttccgcttttccattgtcagttgccattggacgagtgggcacagctggcggaaggcactttttctgtccgtcactctcggcggattcggcgtggacaggttgagaaaagtggaaaaagagtggtgaatggttgtgccaatttttcgcttaggttttatttgggccattggaaaagtgccatcggaaaactgtgagtattttttatttataaataattatgttttaaaatatttgtcgaaaataaataaaaaatttctcaatgtttgtctgatttcgaaggttctcgttcggtggtcttggcgtgtggacacttctcgacattgtgctcattgccttcggttacattcagcccgctgatgaatcgctttacatt

SEQ ID NO: 74751 - DNA, 961 bp, Heterodera glycines
atgggcaaatactgtaacacttttttaaatttatttgtttatggtaaattcaaaattagtttcctatacaatttaaatatttttacatatgatgctacaaatattttaaaagataaattcagagaatttcttaagtcgctaaataacaattggataagctaagccgaacccaaaaaaatgtaaatgtgtatgatttattattctggaaaaaaactaaaattaataattacaataaatgtaaatattattattattattattaacacttttttaagttcaacccaaaacctcactcagttcgtgaacatgaaaagtatagttctaataaaatacgaattcaataagctattcattttttcaaaattttaaagttaaataaatagcaatgtttatgtatttgttggaataataatctaattgtccagatttgcttaaatacttgacagttgcgccatatggagctgttaaatgtgctatgttgttatttgcaaaaaccatcaatatgatttgatataattattttataattttgcttaaaagcaaccaaatttttaattcttgatattattcgatagccctaaatggtagggccaaagatgctcgaaaaacaaggtttttttttgtgttcctctatctataattttttgaacttaacaaattttttgaaattttgtagactgatagagaacacttagagctatcgaatgatatcaagaattaaaaatttggttgagctaaattataaataattgttcatataatcatattgatgattttttaaataatgactccgccccgataaaatgatttccaatttttgggtccgaaactttaaaaaaaaaaacccaaatacgactattattttcgtataatatatatacattataaaaaatcaccctgcacaatacacaattttgaactaattgtaccaaatagagatggtttgactttttgtaataaa

SEQ ID NO: 74752 - DNA, 1692 bp, Heterodera glycines
atggatgtcaaatttgtcattcccaaaaaccctcgtggacaagttttcccgacttatgaaaaaaaaatgcaaaacaaagttaccctcttgaatttttcgatggcactaaaccgcaaaaatgccattctttattgggttggttggcacctgatgtcactgactacccattagtaaacaattcaatgttgaaaaactcaacatatccattaaattcgtttttgtttctaggattctcatgttggtatttcaagtaccgctccgacttctttgcacaatgctcatattgttggtggtggtggaggtggttgtgtgagtggcggtgccaaaattggaaaaatcactgccgaccgacggttggggttcaccaagttaccaacggaccaactgcgtgcacatgttcaagaaattttgcacacgctcaacacggtccatcttctttattctcgttcattttaattggtcctcaaactaaaattttaatagatcgacaattttaggcctaaaatttcaattatttatcggtcggtactagcaaaaaaccgcatccgaatccatcaactctccaattttttataattttttaaaatgaagagttgatggattcggatgcggttttgcattcagtttctcataagcttgtgcattagatgggggtataaaaccaagaagttcaaaatgttaaccttgttgatcttttttttaattttgaggtgtaggcccaaaaccgaaaatatccaaaattttatttttatataaagcaaatctaaagcatttaaaatgtttcttttttttctcagttcacgcttagccaatgccatgacaaagtgtattggttttccactgttgtgttgcagcaactgcttgaccttgagctgtacaccgcgtgcagcaccgcagttgaacaatgcgtccacgggcaacagaagcgaatgcaacagcgtctgctgctgttcagcaccgaaaaacggaagttggagcaggaaaagaagcaattgaccaaccaaagggcacagttgacaaaggcaattaaaaaaaaaatttttgaagattttttatttttttaaatttttttttacataaaaatttaggaaaaaacagaattgaccaagtgcaaagcgcagctggaacagtcagtgaaaacgttggcacctttcgaggccaaatgtcaggtattaccaaccaactcaacgacaattctactttttttatgcaagaaatgattgtgctttaaaaattcagtgacaattctctccctgaaatggaaaaaaaaattaaataaaaattggttattatttttaagttgtttatcaattttacaactttcataactaatctggtcaaaaatagaaaagcatttcccttaattgtttcaaaagttgacttaaaaaatgtacaattgttttatttcgaaaaaattgttaaagagttatttggaaaaagaaaatttaggaccgaagaataataaaaaaaacttcggattttcacccacaaacaaaaaaataaatttgttttctggttacatgccttgttgttaatggaccatgacaatgaaactcggatttcagcagatataaattcccagttttcaatactcctgagaaaattcagaccatgaagcaggaggaggagaaactaatggcggacaaacaaaacatggccaaagaaagtggaggaaatgaagcggctcaatga

SEQ ID NO: 74753 - DNA, 296 bp, Heterodera glycines
atgcttgaaccattcggtcatttcttccaaacccgttgatccattcattctcttctctcgccttcagctgccttctcaaaaggccatttgtccgttcttttgccctgctttgacaccgctttttgctcgctaagcgcaaaaagtcagggcgatgccgtgagccgtgcaaccattggcaccaagcagcagcgccatcggcatttccgttcggtagcaatcgatggcactgacagcactgaaatgccatcggcaattgtcgcgatggaaatgttggacaatgaggtgaaagcaccggg

SEQ ID NO: 74754 - DNA, 377 bp, Heterodera glycines
atggctgttaaggtgagggaagcaaggaagaaaattattgaatgccaaagtacggcattgacatacaataacaaatgccggcaccgttttgcttcccattttaggacccccacacaattgccgctgttttatttgtgccaaaatcggacggtgagtgtcgtgccgatctgcgggagattgaaaatgtttgctgtttttttagatttgcggttgcaccgaaagagttttgttgcagaatttgcactggaaagtcctgaacttcagccacaacggtcagaaaacgtgatgttcaagtcaaaaatcaagccaaacagtcggaaccgaaacacatgccaaaaacccaaagaaaattttaatggcattttacaaaaaataaa

SEQ ID NO: 74755 - DNA, 1117 bp, Heterodera glycines
atgtcatccagcgatcgtcgccgaaaattggcagaaaaaccatcgaaaacaaatcaaaaaaacagcagcaaagacaaagaatcgagaaaaatcagtgaaaaggaggacaaacggtcaaaaaaagaaaaaacgacgacagaaaaagaaaaagtggacaaaagaacgaaaaaaacggacaaaaagaaagaaaagtcaaaagaagaaggaggaggagaagaggaaaagaagaagagaagggaggagaaggagcagcaaaatgggaggaaaaggagcaaaaaggaggagcaaaaggaggcgaagaatgaggaggaacagcacatgcaggagcagcagaactacgagcagtacgaggacgacttcgagcagtacgagagcgactttgtgagtagtagtgtcttgggaagggaggagaaggatttttatgggatgaagctcaaagatttgaaagcttaagagaatattttgacatttaaaaggatgaagaagcggacgaagcggacggaaacgacgaggaagagaaggaacagaaaattggcataaatgaagcggaaaaagacggacaagagagcaggaacgacgaagaggaagcggacgattacccggtcaaaagttcacttttgctgcgaaggatcgccgagggcggcaaattgaggaccaaagaattggggaaggatgtgaggacggaagtgcgaagagaggtcaacttcgacgatgaaaggtgaactacattctcattacagaaagaatgatccaggactcagttggctgggcttggattgatcactttccttcggaaaagcatttcggagaatcggaaaggaccggaacgggattctgcaggaaaaagccgggaatactgtttcatgctgttccccttttttggatgaaatccgacccgatcactttcatggaaatagtcggggattggacaaggaaaactgatcaatgccatgtctgatcacagttttgaaggatggcagagaatttgcaagtgcactcgcgcagtggacaaagtgaagccaaaaatggagaaagagcggcaaatttaatggacttttacatggaattgatcggcaaaaaagaaggaaaggcacaggtaaagaaaaaacaaaataaa

SEQ ID NO: 74756 - DNA, 1029 bp, Heterodera glycines
atggcactaaggaaacaaaaaaacgacgttatttggtcgaacgtatgccgaaaaatgtatttaaaggcattgctgggggattgccagttgcagtgaacaagtccgaagtcgcatttggtccacgaggctgtcgagtcaccttttcgagtaatggccgacttttttttgtttctaattgacttttttaacatttcaggcaaccttttggctgcttggagtgtcgatttaggctctgtttccatgcgccgtttgaaagttgtcccaaccatcaaagtatcgccgcccttctcacaattagtattttatttgctttgatttttcaggacctttttgccaaatacaaacaaaaaacgggcaaaagtgacttgcaactgaatgcgctcccttcgctttccggcggtctcatttcctttgatcctccatcggtgctcctacgtttattggatgctttcgttatgaaatcgtcccgttccgccgaccaagggataaaagccgagggaatcattctgtcgctttgtgacattatttgtgccaaaagtgacaatgccgaaggtcattcatttagcgatcgcatgcttttctttgtttcttacaaatgttcttttccagaaagagttgttcagcgtgttcagatgggcaattggctgaaacaacagctgaacgaccgtccccagcagcgacttggtccgtccgcctccgtcttcgacctcatcttccaccatttggtctgcggcgcatgtgaaaaggccattgccactgcccgccagtcgcgtcattacaatttggctttgcttttgtcactgtttaaatgtccgagccccaaattaacacgggaccaagtcaaaaaacaggtaattctcatttggtcacaaaatacgaatctgattacttacatccgtttttgttcagctttccgtaaccgacaaaaaacccacaacggctattggctatacgaagattttggaattgctttctgacgattggtctgacaaacgaaaacaatgcttggaagggcttgactggcttcag

SEQ ID NO: 74757 - DNA, 1779 bp, Heterodera glycines
atggtcagagcaacaacggccaggacaagggcatcagcagcgcgcgcacggagcatcaaaatcaatcgtcgaaatgccaagaaagcgcgtgccgcaattggacgagccggacatgtgagtgacgcgcgagggggggagggggtggcaattagtacaccaattgattcaattcaactccctttttaaatttgccaattttcagacacgcaatgcgatcgcacgggagaagtgcatgatgtgcctgggcaaagtgagctccatgacgcgtgtgaccatgggctgtgtgcacgaatttcaccgcaggtggaggaggggcttaatgaatgtcaatcaatttagaatcccctgagttcgacaagtctaaaagccgagttttcctggccaaaatgccggaagttttgcttttgctgatcaccgaattcgaaatccgttccgatcaatttgaacccatgacctctcgagttagaacaagcataaaagccaagttttcctggcctaaattccgcaaacaagttttcaattgataccgacaacagtagagccaaatcctctaatctacgggtttttatgtgtctatgattttcaaaaaaaatggtgaaaaaaatttatgagtttttttggggcctagaatcccgattttattcatggtgatttcggataaatgcaacgctttttatcccctgaaggtgcctgtaccgctggctcaaatacaacaccaactgtcccgtgtgccgcttcaatttcatgcgcgcaattccccctgaagaaccggcggaggaacagcaacaacgagaagaaatgactatctgatcagatccatcattgaaatctctgtactatcataatgttgtgtattgtgtatatgtctgtgtgttgtgtgtgtactcagtataaagatgatgatactcggaagatggaagtttttaattgcatttccctgtaggtgttatgtatttagcggtaattaatggagtccggattttaagattgttgtcaatttttttttacaaaaaattgattacctttctagctatgtagctattttattttggatcaaaatatgtaaatgacaattatcaggttagctttgatcagtgtcctctcgctgtctctcactctctagctgattagagtcggatctatgtgcctctctctcattaagttcaggctcgcccatccacactgatcggagggcaaaaatgaggaacacagagctattggtatttcaatttttaaaaacatttactagcaaaatttgacgcctccttttttcatatttttggtccattttacaagactttgattagtttatttatatccacacacacatacacgcatatcaccaatacatacaatttaagtgatcagatattgattgatacatgatacacacacatcaacgaaatacatatgtacaattcaaatgatcaatcggataaatggcaatttcttatccttcttctgttgttgtgccatgatgctaatccaacgccacatccgcggttgtcgctgtcgtcggagtagtcgccgcttcagttgttctgtgttggtcgccgccgccccattttgaaataggtacttacttaaagccgacgataataatcgttgtcatttgttagtcgccaccgcccccgcccactgttcacgccgtccgattctgcccggcagggacactgaaaaaacaaaaacaaaattagaatgggcagatgaattaaagtggcaaaacttacaaatcaggtgaattgcccacaagtccacagtactgaaagagaacttgga

SEQ ID NO: 74758 - DNA, 1170 bp, Heterodera glycines
ctcagtatcccagcttctctgccttctgtataccaatccgtcagcaacaacagcagaagcaacaacaacagaagcagaagcaaccggtggagtggtgggtttgagggtcgggggaatcgctttgctgctgtattttgagtctcaatgcaaatttgtaatcattccaaaatttctagtttgtccttaaaaaatggacaacatttttcaggattgagctttcaagcaggacaaattcaagactcataaaagcacgaaaaatgaatttttgttttggcttattttcagtatgttttttactttgtgtggaactaaaacgaaatagaactcgaaaattgagtttagaagcatttcagagatgctattaatagggatgggatttttatgtttttacatatttttctgcggcttagttatggcgagagaagcccaaaaataacattttctccgaacaattttcgatttagagcgaattataaaaacataaaaacacatattttggcattttggcacataaaaacatatggcacatatttcggggttttggcacatattttggcatttttgagaaaaatttgcaataaaaatacaagaaaattgaaaaatacacccctaaaaatcaacttttttcattggaaggggccttctaccagagaggggccttcaaatagcggatttacggtattttattacatatttcaggatttttagcacataaaaatcccatccctagctattaacatgaaatacattttgttttgaccaatttcggacacggaaaccccaaatttcgtttggatagtaaaaatttattccaagttctctttcagtactgtggacttgtgggcaattcacctgatttgtaagttttgccactttaattcatctgcccattctaattttgtttttgttttttcagtgtccctgccgggcagaatcggacggcgtgaacagtgggcgggggcggtggcgactaacaaatgacaacgattattatcgtcggctttaagtaagtacctatttcaaaatggggcggcggcgaccaacacagaacaactgaagcggcgactactccgacgacagcgacaaccgcggatgtggcgttggattagcatcatggcacaacaacagaagaaggataagaaattgccatttatccgattgatcatttga

SEQ ID NO: 74759 - DNA, 1737 bp, Heterodera glycines
atgccacctccgtcaaagcatctcaaaagtgaggaaggaagacagacaacgacaacggcatttaacagttcgagggaaacggatggttttggaacatcggaaaatggacaaaaatggagaggaggaaaagaaatgagagaggaaggaagagaaaagggaaaagaaggaggaatgagagaggaagaaggaagtgcaaacggaagaaaagaaatgaggggagagagagaaaggggaaaagaaggagaaatgaggggaaggggagagagaggagaaagtgccaatggaaatgggacaggggaaagagaggacaaaaacagtggaagaagaagcggaatgaggaaagaggaaggaagtgcccgtggaaattatccaatggatacgaaaactgtgccgacaaattcttccgcggcgccatccgatggagccgcgacaattgctccgtttcctcaaccaccaaaaagaccattcgaagaaatgatgataaaaaaggaacgggctgaacttctggtggaaaaggagcccaaaacggacatggaaagagttaaaaaagacggaggaaatggagagaaaaagaagagaatggaagaagaggaggagagaagtgcccataatgagaaagacaatgggggaacagcagcagtgatgggaaacgcacagaatgtgccactcgctggaagattcgcaccaatgagaaacgacaagcgaggcacaggaagacaggaagaacacggcaacagaagagaggaagacgaaggaggagagaataacgcggaagagcggggaaaagcagaggggagacaggcagagcgaaaagagagtaggagaactgagacggagaggggaaaagacaatgggaaggcagaggagacagacagaagcagaggcagttgggagagagaaagttcaagggaatgggagaggggcgcaaaggaacgcggaggtaatggatgggacggagagaacaaacaacagagagaaagagggccgagtgaccgagaggaagaggagggcaagagacggcatgagaaagggcaaagtgagcgagaggaagaggagggcaagagacggcatgagaaagggcaaagtgagcgagaggaagaggagggcaagagacggcatgagaaagggcaaagtgagcgagaggaagaggagggcaagagacggcactggggaaaaggtggaaacggaagagcagcgacagaagagtcactgttattcagcccacttcaggggccatatccaaacgatggacaatcaggaaaaagtggaaacggaggaagaggagagagagtgcgcgaaagaggagggagaggtggagagagagaagacggcggtgaagagagagcgaggggaagagagagatgggaaatggcagaacagcagcgaagtcgcaatgcgcagcagtccccatcagaagcggaccgttcgcaacattcgcccggcattggacgtgccgtttcgcggcatcagaattcgcgaacttcgccctcctcctcctctactgaagaaaatgtttctcgtgaatccgtaaatcctcgtcaacatgctcgaactgtacagcaacgtccaacttccgttcattcgcgggaatcgccccctcccgtcgccctcggctttcagcgcgctattcccgacccgaacaaattctttcccgacacaattcgagaagcttttccaccacttccaaaaccatttgaaggattggaggagaagcatgggaaagagaatggaggatga

SEQ ID NO: 74760 - DNA, 88 bp, Heterodera glycines
tgccaccgtttccgcgtccaattcgtcctcctcgttgcagataatgtaaatttgttgtcggatttcagttccgtgcaccgaaaaaacc

SEQ ID NO: 74761 - DNA, 349 bp, Heterodera glycines
atggaatttgttggagaaaagctaatcgaatgttcaatttgcagccaaagttttcccgtgacacctccgttcaacatttgtagagccatcagacacatcaaactaaagcatccggaagtgatgccggaacacagaggaggacagagtgcccgggtgggtgggaaaggtgcaatacgtttccatccctcttcatcgtattcaaactccgcccgaaaaaattaaaaattttttaaatttaatgagattttctagtaacaattataaatttttgttttttaggatggatttcaatgccaagagaagcagcagaacggtaatggaacagaagggccatcgaatggagaagaaa

SEQ ID NO: 74762 - DNA, 1532 bp, Heterodera glycines
atgcttttcggcattcagaatgatctggtttacgccctgttgctgcttttctctgcactgatcgccgctgctttacggctgccaaattcgaatgccatccgtctccaattggacggtctgatcggtctgtcaatcgcttacattgtcggcggttggatggcactctgttcgctgatcattgtctttgcgcatttggctctgatcacttttgtcagatgtccgaggtgggttttgacattgaaaataggaagatatacaattttcttccgatcaatgcttattttttttatttcgatcattttttcccattttcatgcaaattttggataatagtggagaaatgtgaaaaacttcagcgtttttttggaaaaaattagtaatttcagataaaattttgaaaaaagattttcttgagactttctttaaataatatctgattttttgaatttctagcatttcgaaaaaattttaattggttttttttactcatgggtccgaggttcagagttggtcaaaatgggtgtcatattcgagctcagtggttactaaaaagcctggtccgagatctgatcgtattcatgatcagctcattttcttacttactccaaatacaattcacaaattttttaaattttttttttcatcaagacatgattctctcacgtattatcaattttttgttcactttcagtcgtctcaccaacttttccttttttggcactttcatcttcttggcactgctccggtgccaacattttgtgggtctgccccgcctggaatttgtcaccaatgccatccaactgatcatgacattgcgggtcggcaaacagtcgatttaaattaaaaaatatttaaaataatcaggccattggattggcttatgaaattgcggacattcgacgaaaaaaggatggcacagatggtggaaaaaatggcaacaatgacactgctgaacgttatgaacacgagccaaatgcactggaggcgttcaattacctgtacagcttcactgggctgttcacgggtcagtgaaaatggcacttagaaattaatttgaaattttcataaaaaaataaataaataacccttctaggagtgattgaaattccatatttttaattattttttaaattaatttttatctttttatgcgatttttccccatacctcttgtaaaagtgatctgaagtgcatcaaaatttaaaggataatggaatataatgaccagacaaaagcaaaaggattacatggcaataagaattttggtttttttatttttggaatatttttacaaaaaaatatattaaaaaataattaatggattatattaggtgtaatttgtttttctatttcaaggcccttactacacctacaaaacatatgcggatgccattgttcgtcctacaccgattcaatggaccaaattggcaccattaatatggcaaaaaatgcaaacactttgctggacattgccagcacttgttttgatgacttggcttgacccattgaatgtacggagaaaccaaaaatga

SEQ ID NO: 74763 - DNA, 385 bp, Heterodera glycines
atgaatgacgatgagacggagaaaagaatatttatgattttttatgttaataattcagggctcggatcgtaccaagtcactttccaagtacaggcattccaatttccaagtacataacggtggaaaatttgtgaaatccaagtacacataaaaattgaacaaaaaaataattaaaaaaggttaattttcctcaaatagttagtatttttccagggaatgattttattcaaaaattaattatttccgctaagcattttacaaaaccattttttgcggcgttttttcaaaaaaaactttttgggaacttgaggagagggggggaggtcctgctgtgcctataggcatcgccgggaaaattattgttttgatagtattaaataataaa

SEQ ID NO: 74764 - DNA, 105 bp, Heterodera glycines
caaaagcgaggcaaagtgactttggccatcgatgttacagtgaatgaagcaaaaacggaggacaaatcataaacaattaaggagattgaagaaagaaaaactcta

SEQ ID NO: 74765 - DNA, 627 bp, Heterodera glycines
  unsure (1)..(627): unsure at all n locations
atggggttgacaatttggacaattcgactgggacattttgtgaccatgtcattaacaagaaaaagagctggttctgtttcaacaatttcattaccattgcggtaagttggccatttcatttctattccttaattgctctaattatggttaattaagaaattgatggaccaaaacaatggtttttacaaccaaaatgaggacaaagtgacactggccatcgatttaaccgagacagataaaaaattgagaaattcgtttctgatcccaacaaatccaacaggacaatttcgatggacattaaaaaagtgtcggaatttgcgcgagaaatcattttgagtgaccgtataagtgaaactgtgtacatcggaggatttccatggaaaattgtggcagaaataaatccgaaaaaaggaagcactgacaatgagaaatggttgggcattttccttttgtgcaatgctccaaaagaaggtgcaaattaaatgttattagcaataattatgataattaaagtcattagatgaatattggggttgcaaatgtttgtcatcctttcgaattgtctcgcaaaagagcggcgttgcggatttcagagaaaaactcgatgancatgtttctaacaataaa

SEQ ID NO: 74766 - DNA, 807 bp, Heterodera glycines
atggagagaaaagggagtattcctcccgaaatttacaacaacaaaaaaattcaaaaaatcaaattttattcacaaaatgtaaaaattttagacaaaaagcaaagaacgaactaatggaaaaaggcaacataaaatgaatgagcacagatactttttctgtttttgttcttgtttgtcaattggtcgcctcttccgaatcgatggcattgcaaagacaaaaagccacaattatgccgaacaccttcacaatgcgaagcagaagcaactaaattaaaacaaaaaattcaaattgatgttcgaagaatcgggatataaaaataaaacagatttttatttttgtaccaaaatttcagttcctttcggcttgttgacagcggaagaagtagaccagtactataaccaaatgaatttttatgagatgtccgatggcataaaaaatatggttaatcataattagaactcgaaaataccgtatttacgggtccttgtaattgggttgaattctaaaaatacacctattaatttaattagcacactttttacagttccatcccgcaatttaacggtggaagaagtgattggaatggaagagtaccataaccctccaaattttcgtgggatgtccaacggcatactgtacccactgcaatttccgtgccatgtacgaatttcacctcatgggacaattgtgatggacattgaaaaattttccgaatttgcgggtgaagctgtggggagtcgccgattgagcaaaacagtgcaaataatgggatttggatggagaattatggcacaaaaaagaataaa

SEQ ID NO: 74767 - DNA, 47 bp, Heterodera glycines
atgtcgattatatcaagtaaaccgatgaatatctcgtttagtaattc

SEQ ID NO: 74768 - DNA, 250 bp, Heterodera glycines
cgcgagaattttgtcgatctgttggagtactgtgaggagcacttgaaggtccgtcgcattttggcttgcttcaacaagtcggacatcaatccatgccagggcattccacgcgccctccggtgaaattttggatgccaaatttccaatttaccgttttttcagttgcattggcttcaccctcctcccgcccgaacgttaccccgctggcattgacaagaacaccatttttgcgatggtttacaaaatctaa

SEQ ID NO: 74769 - DNA, 1449 bp, Heterodera glycines
gctattttcattcttatttttgcatcaattataaacatcacacaatcaaatgatgcagaaaaaccgaaggggccaaaagtaacggagaaggtcaattaaaaaaaatgagtcacacacataattttgtttaaataattttaggtgtattttgacattaaaatcggcgatgaaagcgttggtcgcattgaaatcggcttattcggaaagactgtcccgaaaactgtggaaaactttgttgaacttgccaagaaaccgaagggggtaaaattttgcagttttttccggtttttgccaattgtctttttaggaaggttacgccggcagcgttttccaccgagtcattaaggtctttggcttctgtgaggcatttttttcttgaaaaaagcaaccaaattaattaaactttcctggtattcggtaactccttacgtttttttaattgtaatgtgcaaagttcgagaagtttttaaatccaaagaatttatggcaaaaaaaaaagtacccaaaaatgttccatcgaatataaaagttttttactaatacaaaaaagattaatttaatttgaaggacttcatgatccaaggcggtgacttcaccaagggcgacggcactggcgggaagtccatttggggcgagaaattcccggatgaaaacttcaaattgaaacattacggcgccggatgggtgacaattttcattttaggcatgtttatttaagatttgttcctggtttagctgagcatggcgaattccggcaaagacacaaacgggtcacaatttttcatgttcgtttaaaatttaaaaatttcttttaaacaaattccgtttttgtagcacctgcaaaaaaacaacttggctcgacggacgacacgttgtttttgggaaagtgagtttttggacaattttaaaacgtaaaaatatgcggagaatgggcataataaaccgcaaaacaatggcacggatttttttcatcggactgcccaaattcttgggatagacccgaggtgcaatgctttaattccaattaaagccgtaaatcactctcccccctctttatggaataatatcccaaatcggcttaaaatgggtacatttttgtgcctgtttacatcgacattattatcctaggtgctttccgggatgtctgttgttcgccgaattgaagccacaaaaacattgggcggtgatcggcccgagaaggaagtgacaattgcagcggcaggtaaccgaaatgagcaaagcgtacaaaaatgggtttgggcatagctaattagagggcaattaacggtgccaaaatttgtgtgtaggattgccgggtccccaccacctgaaaaatcgaggggtgcacaacaattttttttatcactacacttccgtatttttaaagccaatttttaagggcaaattccggtggaaacgcctttttctgtgcacaaagaggacagcaga

SEQ ID NO: 74770 - DNA, 1439 bp, Heterodera glycines
attcgtcaactcagccaaaatgcgacgattcgtcaactcagccaaatgtcaacgattcgtcaactcaatgattcgtcaactcagccaaatgtcaacgattcgtcaactcaatgattcgtcaactcagccaaatgtcaacgattcgtcaactcagccaaaatgcgacgattcgtcaactcagccaaatgtcaacgattcgtcaactcaatgattcgtcaactcagccaaaatgcgacgattcgtcaactcagccaaatgtcaacgattcgtcaactcaatgattcgtcaactcagccaaatgtcaacgattcgtcaactcaatgattcgtcaactcagccaaatgtcaacgattcgtcaactcaatgattcgtcaactcagcaaaaatgcgacgattcgtcaactcagccaaatgtcaacgattcgtcaactcaatgattcgtcaactcagccaaaatgcgacgattcgtcaactcagtcaaatgtcaacgattcgtcaactcaatgattcgtcaactcagccaaatgtcaacgattcgtcaactcaatgattcgtcaactcagccaaatgtcaacgattcgtcaactcaatgattcgtcaactcagccaaatgtcaacgattcgtcaactcaatgattcgtcaactcagccaaatgtcaacgattcgtcaactcaatgattcgtcaactcagccaaaatgcgacgattcgtcaactcagccaaatgtcaacgattcgtcaactcaatgattcgtcaactcagccaaaatgcgacgattcgtcaactcagccaaatgtcaacgattcgtcaactcaatgattcgtcaactcagccaaatgtcaacgattcgtcaactcaatgattcgtcaactcagccaaatgtcaacgattcgtcaactcagccaaaatgcgacgattcgtcaactcagccaaatgtcaacgattcgtcaactcaatgattcgtcaactcagccaaaatgcgacgattcgtcaactcagccaaatgtcaacgattcgtcaactcaatgattcgtcaactcagccaaatgtcaacgattcgtcaactcaatgattcgtcaactcagccaaatgtcaacgattcgtcaactcaatgattcgtcaactcagccaaatgtcaacgattcgtcaactcaatgattcgtcaactcagccaaatgtcaacgattcgtcaactcaatgattcgtcaactcagccaaaatgcgacgattcgtcaactcagccaaatgtcaacgattcgtcaactcaatgattcgtcaactcagccaaaatgcgacgattcgtcaactcagccaaatgtcaacgattcgtcaactcagccaaaatgcgacgattcgtcaactcagccaaaatgcgacgattcgtcaactcagccaaatgtcaacgattcgtcaactcaatgattcgtcaactcagccaa

SEQ ID NO: 74771 - DNA, 1083 bp, Heterodera glycines; identical to SEQ ID NO: 1603

SEQ ID NO: 74772 - DNA, 1322 bp, Heterodera glycines; identical to SEQ ID NO: 1604

SEQ ID NO: 74773 - DNA, 3014 bp, Heterodera glycines
tagaattcattttttcatcatcttttgttgttgattttgttttttttcaatttttatatccattgcatttttcatatattttcaattaatccttcaaattcattaaaagtttgacatatttgtttcaatttcttttttcgatcccatttccccacatttctcgttttcgtaattcaagtcttcttcatttaccaaattaatctcccaaataccattgtcatttttaaataaaattaagttagaatgaatgtaaaatttaattaattttagcaattattgatttcttaaaaaaaaattcgttaatttttaaatttttttctattgggaaataaatttctgtcctttttctcaattttcattttctacttaaatttcatatttgtttattttttagttggacaaatttaagtaatttatttttaaggtttcatttaattaacaagtttataatttttctggtattgcgttatgaaatttgaaaggtttgttaaagaaggtgatcaaatttgataatgttcaatccatggatttgaaggctttttaggtcgtaggtagatgataaataatttatcgaactgaatgaataaaaaatttctaaaaaatatattttacaatttacactaaaaagttgaagaaatttttttaaagaaaataaaaaacccaattgcaaaaaaaaaatgggaaaattcaacagaacaattcttaatgaaaatgaattggaattaggaaacgacttgaacaagagcgcggattttgtgggcaatcaaaaaaattatgaaaatggcgaccaattgaaagtgtcaaatttgtcatcatattcatctttcagtgatcttctttctatataatcttttgcttttgtcaatgctttttccaatttctccttttcttcgttggcattttcttttgtcttttcgaaaattttttccattttcttctgaaattcttcccaaagattggcaaattcaatttcatttttgtttgatgatttttgtcctttttccttcacttttctgtccgttggtcctccgtttaaaatttcttttcccttttttacattttttagtataattttttcttttctattttttttccattttctaagccaattttggtctttttcttcattttctttctctttaatttcataatcctctaataaatattggcttcaccaatggtggcaattgttttttcgacaattctgggtttcttgcttaataaaatagaaacaaattaggtttttattttttaattttttatataaatacaaaaacttcagcataaatccgaaacaaatattcatataatatgtctaaatatttgcgatatttttcgcattctctccgtttatcttcttcagattcctccccaattttcacagtgccaattctttctggcgcgccaacgattcgtcaactcgacgattcgtcaactcagcaaaatgcgacgattcgtcaactcagccaaatgtcaacgattcgtcaactcagccaaatgtcaacgattcgtcaactcagcaaaatgcgacgattcgtcaactcagccaaatgtcaacgattcgtcaactcagccaaaatgcgacgattcgtcaactcagccaaatgtcaacgattcgtcaactcaatgattcgtcaactcagccaaaatgcgacgattcgtcaactcagccaaatgtcaacgattcgtcaactcaatgattcgtcaactcagccaaaatgcgacgattcgtcaactcagccaaatgtcaacgattcgtcaactcaatgattcgtcaactcagccaaatgtcaacgattcgtcaactcaatgattcgtcaactcagccaaatgtcaacgattcgtcaactcaatgattcgtcaactcagccaaatgtcaacgattcgtcaactcaatgattcgtcaactcagccaaatgtcaacgattcgtcaactcaatgattcgtcaactcagccaaatgtcaacgattcgtcaactcaatgattcgtcaactcagccaaatgtcaacgattcgtcaactcaatgattcgtcaactcagccaaatgtcaacgattcgtcaactcaatgattcgtcaactcagccaaatgtcaacgattcgtcaactcaatgattcgtcaactcagccaaatgtcaacgattcgtcaactcagccaaaatgcgacgattcgtcaactcagccaaatgtcaacgattcgtcaactcaatgattcgtcaactcagccaaaatgcgacgattcgtcaactcagccaaatgtcaacgattcgtcaactcaatgattcgtcaactcagccaaatgtcaacgattcgtcaactcaatgattcgtcaactcagccaaatgtcaacgattcgtcaactcaatgattcgtcaactcagccaaatgtcaacgattcgtcaactcaatgattcgtcaactcagccaaatgtcaacgattcgtcaactcaatgattcgtcaactcagccaaaatgcgacgattcgtcaactcagccaaatgtcaacgattcgtcaactcaatgattcgtcaactcagccaaaatgcgacgattcgtcaactcagccaaatgtcaacgattcgtcaactcaatgattcgtcaactcagccaaatgtcaacgattcgtcaactcaatgattcgtcaactcagccaaatgtcaacgattcgtcaactcagccaaatgtcaacgattcgtcaactcaatgattcgtcaactcagccaaatgtcaacgattcgtcaactcaatgattcgtcaactcagccaaatgtcaacgattcgtcaactcaatgattcgtcaactcagccaaaatgcgacgattcgtcaactcagccaaatgtcaacgattcgtcaactcaatgattcgtcaactcagccaaaatgcgacgattcgtcaactcagccaaatgtcaacgattcgtcaactcaatgattcgtcaactcagccaaatgtcaacgattcgtcaactcaatgattcgtcatctcaaccaaatgtcaacgaattcgtcaactc

SEQ ID NO: 74774 - DNA, 1035 bp, Heterodera glycines; identical to SEQ ID NO: 1606

SEQ ID NO: 74775 - DNA, 3173 bp, Heterodera glycines
gaggaggaagacgaatttgtggtggaagaggaggaagaagaggaaaaggaaagggaagaagagggggagagggaagaggaggaggaggaaaaggagcggaagacggacagagaaaagagcggaaaaagcaaaacaaagggcaaaagcaaaggagagagggaggggacaagccaaaggggcaaagggagcagcgcaaggaaagagcagggccaaaaggaggaggtgccggaggaggagggggcacgggaagagacgcccggggggacgcaacggccgacaccactaattgggtgcgcggcgagatcaaagacaacgcatgccaattaatcagagtccctttagcacttccagtcgcgagccatccgcacgattggtgaccgacgaaaagacattactacggcaaagacatgaccaaattggcagagaaagtctgttgagagaggcgacgggtgggagaggaagattagatttatgaaaatgagagggagagagagagagggaagtagggacaaagagatagggagagagcgggaggagaaaacgagaggagataaaagatagtgaggagtggagggagagagagagagagggaaagagatagaaaaatttaggaaaatgaagggtattaacagtcagtccgttgtgggaatgccatttgcctgtcctttcagcgcccggttgggccgtgatgttcctcggtttggttggccttgctttgcttctcggctgtttgttcgcgctgatccgacgcattttcggcaagaaaaggcacggggagaagaacaaacagcagcagcaacagaagtggggccaaggcggactgaaggcatttttcggcggaaggagcggaagcgcagcggcggacgccgtcggacccatcggcgccgggggagcgatgggcggtgccaacaaagtgagggaggggcaaggaagggacggcattggccacggctgatcagagcaattagaaagacactgatcaacccaattaagtcaattaagtgagtggcaggacaaacattcgctaattaagccattaagggagagaagttcagcattaatttacaaattacttagaaaacaaaaagcgaagaaataaaatggaatggaaaataaaaaataatttttatgtcttaaaaaaggtcaaatattaaatactgtgactaaaaactgttcgtcgtaaatgccttttactttttcaaagtgaataattattaccgattttattagctgaacgatcttggaaagaaaacaaaaagcctgacaaaattcgcaaaaatagacgaggaggacgaggttaataaactcggggaacaaagcatcgcaaaagcattgagaataaagcgaaatgaaccgcttaaatgacaaaagtgggctgatgatgaaaagcatcgcttttggcacttttagtggcaccacaaaatgccattcgttcgttcagttcaccgcggacatggaaaagttgggagatcatatggaacagaacgaaagggcacaagcggaacagaaggaggaggtgaacctgggacgaattcagtacaaattggactacgacttccagcagggacaggtcattgaaaagggaagggaaaggaaaagccattttggacacgaaagcattacagttggcagtcaccgtaatccaagcggagaatttgcccggcatggacatgtccggcacatcggtgggtgtcaaaaagcgaagacagagaaagagagagacaaaaagagagagagaaagagagagagaatggcatgccgaaatcagacagagcagagaattaattcattagacaaaagacaattaattaggacattttatcaattagcgtttatactaatgaattcatttttcttttataccgcaggacccttacgtaaaattataccttttgcctgaaaagaagaagaaagtggagacgaaagtgcacagaaagacactgaacccggtgagaaaggacgaaaaaggacaaatgggcaaaaatggaccaaaagggcgaaaacgggggcaaaatagacagaaagaaaagtgtgattggaatttttgatcgattaaggtattcaacgagacattcatcttcaaggctggtcaaatgccgaaacggcacaatttccgttttaatttaattggtgcctctcttttaggttccgttcaatgaattgccaagcaaagtaagcgcacaaattgcaaaaagcgccaattcgtcccttctctctttcagactctcgtgttctctatttacgacttcgatcgcttcagcaaacacgaccgtaattagtggggggaagggaggggtaattaagtggtaattatcgcttcggcattgacagagatcggacaagtgatacttccgctgggcaaaatcgacttgggccaagtgatcgaagaatggaaagacattcagccgcccccggacgacaaagaagcggtagcgaagaacaaaggaaaggcacggccaattaataccatggcatttgaggagaagaacctgggcgacatttgcttctctttgcgctatgtgccgacggcgggcaaattaacggtggtggtattggaagcgaagaatctgaagaaaatggacgtgggcggactgtcgggtaagaaaatggacctatactgtaaagagagggtacggtcaccgtaccatggacaaagcaacatcccaattcccagcgtaaccagtcaattaattatcaccccaccattcagacccatacgtgaagttggttctgatgcagggcggcaaacggttaaagaaaaagaaaacggtaaacggccggggattacagtataaaaaattactgtaatttttgtgagttgttttggcattctgtccgtttagtccatcaaaaagtgcacgttgaacccctactacaacgagtccttctccttcgaagtgccctttgagcagatacagaaggtatctctgctgattacggtgatggactacgataagctcggctccaacgatgccattggccgcgtccttttgggctgtgccgccacgggcgccgaacttcgccattggatggtccgcactttgtcatgctaaattgggcactttggccaagcgcctctttaggatatgttggcatcgccacgacggcccatcgcccaatggcacactttgcaacccatcgaagaggaggaaaagccgaaggaaaacggaatt

SEQ ID NO: 74776 - DNA, 3503 bp, Heterodera glycines
gaatcgatgactgtcgccatggaattgattctgaattccaaccccgcgtccatcgacaccatttttcctgtgcatgttgcggattccaacgggtctgaactcttcttacaaccggcctttgttgggacacttcgcgagattaatgttattgtgagttgggaatcaccgtggcaaattaataaatgctagttaatgcgatttgccatatttttatgttctttgtatattcgaatttttggttttaattttttttgtttatttttaaatttacttgtttagcaatcatatttgaagtctgctgcaatcgaagaaatcagtgattcagcattgcgtaagaatttaaagaacatactgaaacgcttgcctgatgaatttgttgaaaattcttccgatgttttaccttttgcgtcggaacattcgccgacttcgaatcgcttaaaaagtcttgcggacaaagtccaaaatgccgcttctcgaggccatcaacgccttatgcaaacgtcgtccgtctccaatttccgtagcatgggccagcgtagcaacaattttcccgcttcttcctctgtaaattttctcaacgatagtctcgcgaatgcaactggaaaaagtgggcaagaacaaccgacggcgaatgggcgtagcatttgccaggtgaatttatatttctttgttgtttaccattgccaaaaaatcttcaatctaactccgtatttttgagaatgtgctcttcttccacatccccgatcgaaacgaccccattggaatggactccgagggatcgatcatggaactttttcgacgtctccagtcaaaaaggcgaaagttggtgagcggagagaagaaaacacgctttttgacggctacggaaagcattggtcttcgattagtcaattgtattgtttttaaacacatgtttggccaattcagtgtccgacagaacagcgactgacgtggtcagtgacgaggacgaggaggagggaatggacgaagcagcggccggatcttcggtcagctcgtcaaatgacaatgttgttgatgaagtaaacattgaactgtttattttacaccaacagcattaattttttattttgagactgaagacatttccgctttgcccgacaatttttccgatgtcgttccgatcagtgccaacgtttctgggaggggttcgcccagtctcagcgggggacgcatttcggggcgcgaaacaccattttctggaaatgctcctgaacaaaacagcggtaaatggattaattgcgacaaattaaacagagttctttgtcagaagctgccaccatttgctccaccgtccctgccatcgccacgcaaccggtggaaccacgacgaactcttcccaccattccgattagtgtgcggaagcaaaatactgaaggactcgaggaaaaatttggaaaatttggtctcccaccgcaagattcatcaagatatcgtaaacattttgtttttaaaccattttgtatatttatttttgattatgtgcaggtgacgaaacggtgtcacttgtgagcgacagttggtcgacggatgtggtgactttgtctattcgaattcaaaaggttaactcactttttcgcaggtcgcctcagacaacgaagggttcaatgagcttcggtgtactgagtcggtcactttgggccttccgccgcaaaatgtccaagcgacggttggaagttccgtcccttccgccgcttctgtcgccgtcccttccgtccaacaacagcaaaacactccaaaagcgcattctcattatgtgaacaatcggtctgggagcagcagcaacactttgttttccatgcaagagaacaattcgcagcaggggacagcacaacttcaatcgaattcagcccaaattgaggcattttgaaagagtcgccaatattttatttttactcatttttatagacacaaaatgaggaggattttcgctattacgaccccaacaatttgacaagatgcagagcctttttggatgcaaagcgaaaactgagattggtgctcagttggaccacgaatttgccatacgcttctcattgtcaaacgcaaagaaataaaaacgaagaaaatgggaaagatttggccaatggaacgaacaaaaaccagacgaatggagcaaagactgagccgaacagtgaactggttgcactacaacaattcctaaagttgttgcttgccgaggcggtgaacagtcgtgatagaaaacagtcggcccaaatccgcgaggtccaacgctgtctgtccatttttgaaccgaaagggtacaattcgcttgtcgtcgtacaattctgtgttattttcgcagtgttcgcgttttgttgcgtacgttgcgcgaggagcaccgaaagaggacggctttccacctttacctgcaacagtcgcgtctcacgctgcttcaacttgacttttgcctggatcggatgagcagacgcattcgccgtgtcaaatcactcacttccgaatgtcttattgaaatgcttgttcggttcagtcttcaaaagaaggaacaacagttcttgcaacaatttctccaagattttcagcaattgaatgtccaggttaataattaaagtttaaaaagcttttttgtacatatttcagcctcggaatttgacggggtcccgactcgagttccatccgatccaaattgtttggtctctaatattggtatctgttaattaaggacgagaagattgaccttgtcgagtcgcatttgtgccatctctacgagcaactcgtcttggaatcgatgtggcggtcggcatccatcgaagacattgaatatgcacgaaaatgtttggagcgttctttgatgggacaaatttacgtttatgcgctcttcccaaacggtgaagcggattacttcagagatgagtcagttttagaatgctttccaagttcaaaatttaaaatgtttgaagggttctcaacaaatcggtccacaaactctctgagcttatttcggtcggccatcccgaattggcaattccgaaagtaagcatattgcgttgaagcaaaacttttactttcccacttcactcagaatctttatgcggaatgtccgtggccctctgctcaagctgaactgaacataatcaacgcgtacaaatcaccgcgagacaaaatggcatgaaatgatttacttttcaattcgaacaataattgtaattgccaggcatgcatcacccgttgctgtgagaccattgagaatttagttacgctttcctccggccgatcggcagcttcggcggatgacattttgccagttcttgttttcgttatcattaaggtgtgttgggctttatttttgattaattcgctggaaattattctttcaggcgaatccgccagctttgctctccaatttgcaattcatcgatggtttttacggaaaacgaatgcaaggaagtgaggcatattggtggactcaagttacaagtgccgtggaattcctcaaaacccttcttaataagctgtgcaattag

SEQ ID NO: 74777 - DNA, 566 bp, Heterodera glycines
atgaccgtgagttaattcattaattaatttatttgtttgtttaaaaaatttggaattgaattttcattttctaagaaatgtgcaatctcagtgccgagataagcgccttggcacggcacatgagggaacgtttgttcatcgaactgttcgccgtctgcagcagaggcaaaacggcggaaaatggccaaaacagcggagaacgcttctgcacaatcatcaacaaagtgcacttcactcgggtgggttttgaaaagagaaggaaaagcaaatggcataattagcaaaaaaagggggggataaataaggtaatttttaacaaattagcaaaatgttcataaattactttgtttagaaacgtttataattagcacgtcattaacactggtgataagtgtcagtcattatgagttaattgaaaatagtaccactatgtttagaacatttttaaaaaatttgagggaaaatctttcttttttttagaaaatttcgcaggaactttcctcccatttctccctggccaacatgtcgggctccttcgaaatggacccgtttctgcacaattttaa

SEQ ID NO: 74778 - DNA, 526 bp, Heterodera glycines
ttttctaaaaaaaagaaagattttccctcaaattttttaaaaatgttctaaacatagtggtactattttcaattaactcataatgactgacacttatcaccagtgttaatgacgtgctaattataaacgtttctaaacaaagtaatttatgaacattttgctaatttgttaaaaattaccttatttatccccccctttttttgctaattatgccatttgcttttccttctcttttcaaaacccacccgagtgaagtgcactttgttgatgattgtgcagaagcgttctccgctgttttggccattttccgccgttttgcctctgctgcagacggcgaacagttcgatgaacaaacgttccctcatgtgccgtgccaaggcgcttatctcggcactgagattgcacatttcttagaaaatgaaaattcaattccaaattttttaaacaaacaaataaattaattaatgaattaactcacggtcatcccaaaaaataatgcccattaatccggcaaattcctcatccg

SEQ ID NO: 74779 - DNA, 1469 bp, Heterodera glycines
atgtgccaacgacaggggacgaggccgaataattttatgagagaaactgagcagcagcaaaatatggcaaaattcgaacaaatggaaatgagcaacgaagaagcagggcaaaggtgggcccagggagacgggagacgtgccaaatccgatcccacccatggcattattcactccccccacccaaagtagcaaaaagttaaatcaaattaaattaaaatttttgtactttttgtgggaagtgccggacgatggcaaagaaaagaaaaaatattcaaacagagaaaaagaaaggcgaaaaatagtaaaggcacggcttaaactctctctcttccggcgatttcttttctctttgcttttccgtttgatccaacaatggtcaaacattgacatgactcacactgcacatggttggccacattggcaactgtttaagtttgctcgccatttcgtcggcaatttcgcgcgagattcggaccgaggcgggcaaactgtacgcactgctcggagaagcctctcctgccgcgcagcaatggtctctcttagaatgcgcgctcccttccgcgttcaccgctcctccgcctgcgcagcacaacgcgggtgcggagggtggcgtcggcggaggacccatcgggggcggcgacagcggcaacgcgtccccttcctcttcagtgtatgcgtcgcccacggagcagcagcagaacgtgagcaaaaaaagtaccgcgtaaaaagcgagtgcgccaacctaaacgtggcggcactttctaatcaatttccgctgattacctcgtccccactgtctgatcattttctcgcgagttggcccaccacacattaatgagcaaagggtgtgccaatcagaccccatccgacgcatactttcgatgggcacggggtcgtgtgactgtgccgttaggcgccgccgtggtaacttttgtgaaaatttgatgataaatttgagtgcaatctccaaagttttatggctttttgatgggataggcccaatgttgccatttttaccctctgttggtggttttgcgcccattttgtttccctttttgactcttataataaggccgagggtattttggcacaccccatgttctgctccttttatgtgatttgaccagactggcaattagtgctaattaactcaccgttatatttggcatatcaaattaactttttttggcactttttaggccttttttgtcgcctgctgttcatccgccataattcggcctcagattaatccagcgttctgcgcttttgacaatgaaattccattgatcagtgaaattgtgcgcggctatcgaagggtaagcgaaaatgaaaaaagacaaataaaatgggaatttaagtttaaaattaaagtgtttcagtttcaatcgttgcgaatttcggcatttcgtttgacgggaatttcggatgaaatgaacggcacgacaaatggcaaagaaaatgaggacaaa

SEQ ID NO: 74780 - DNA, 1096 bp, Heterodera glycines
atggcacgatgtgtcacgtcgctcgcgtttctcccaattggagacttgacccctggaatcattgctctggacatggctcttcccgacgaacttactcccgtccttgactggtaaattgacaatctcacaaattgtttagtatttattgttctttaattatttattaggttcatcatgaactatacgggtcgtcttaagcatgatggaagcagaacacgcccgcgatttgacccaaacatttggagtgtttacactcgaacattgcaaggcgatgaccgaacgaataacattcagaagccgcaaacagacgcctgcaatacgcatttgcctgttcacatccatcgatttggcatttcattgaccttctgcgaaaggatcaaaagttatcggatgatgacttcgcgaagtgttcaactggacaagacccaccgcaaaaggcaaagaaatatcgcgaagcagaccgccgaattctcacgatggttcaaaattatttaccactcaacaatggagaccccaatgtttttccacttgagcagcgctttaatcatctatttatcattacctttttgatcggaatttctcgaaattatgaaatgagaccgtgatttgaaacagataaaatgttatttaattttcttgcttgttttaatcgtactgtttgttaatattcatactttggtagggaaatggcccaaatgccttagtagggaaatggcggtagggaaatggcggtagggaaatggctcgatcccaaaatttagggatttttgggtaattttttttaagaaaaaaaaaatttttttttggggggggggcgtgccgataggggcgaattttaaatttatttctaacagatattcaccaaaaaaattaagactttttcgataaattttcgttttttaactatattaaattatcgtgaaaattttcctattcgcttaaaaatcgtttaaaaattttttttgactctattcttaactaatttttggttttttttttattttgattcaatttggtacaatatttatcatttcaaaaaagcacaaagcaaaaaattagtttgtttttttcgcagtttttgtgtcaatttaaaaaa

SEQ ID NO: 74781 - DNA, 117 bp, Heterodera glycines
aaattagtcaaaatacatgtcagattcgtgattagcgacctttaaaactccggataaaaaattatcatggttttttatcttaaaaaaattttgcaaaacaaaagggtcccccctttt

SEQ ID NO: 74782 - DNA, 272 bp, Heterodera glycines
atggtaatattcgacaaaagtatgttatgatataaataattttttgacaagtacaaaaaatatatatatttgaaatttctgctccaatatttttgcaccgtaaaaaacatatttttattatcattaacacttttagctacaatcaaaatagttttaataaagtttgaaactaaaaaaaataatttaaacccagaaagagcagagaattcttggttagaggatctgatggttattctaacaaaagttaaataaaaaaatttgatcgatcgaaa

SEQ ID NO: 74783 - DNA, 46 bp, Heterodera glycines
atgacattctatgcttctcttgttggatacacgggaagaaataata

SEQ ID NO: 74784 - DNA, 300 bp, Heterodera glycines
atgacattctatgcttctcttgttggatacacgggaagaaataatagttagtccttttgttgaatttttagaaattctatccgtccaatcggcttttggaattttaatgagtaaatcaggaaccgtaaatgacattctatgcttctcttgtttgatacacgggaagaaataatagttagtccttttgttgaatttttagaaattttatccgtcaaatcggcttttggaattttaatgagtaaatcaggaaccgtaaatgacattctatgcttctcttgttggatacacgggaagaaataa

SEQ ID NO: 74785 - DNA, 1065 bp, Heterodera glycines
atgaatcgcagatatggcacagttcacaacactgatcgcgtctgtcgctcagcttctctgctagctagatctaagggaaacgctaaaacagtaaataattcggtaagatatattatgtttcaaataatttttacttaagagaaagagaaaatacaaagtgaaaattcaaataaaatataactgattcaaaatccatacaagataatgatgccgaggcaaatgatgaaattacagtagttcacgatcaagacggttttaataataataatcaaaaaattaatgcatatttaaggacccaattctgcaattttatttaatccaatgaatttaaatgaaatggaggaattttgcgataaatgggattataattatggtacttttttaaaaatattgttaaactgaattgaaattaagttgttccaaatttcgaattcgcaaaaaatcttcaaatagatccggatacttatagcccaggtatagttaagaccgaagcaactctggctaaggacatgtaataatatttaggaaagcgcgtgtcaattattggtgatggtaactgtttttatcgagcgctttcgttgctactcactggagacgataattacaatacagcaaaagaaatatgacgagatttaatggaatttttggaagaagaactttatcagcataagcaagggattgaaaaccgaaattggtggcaaatgttttatccccaaatcaatgaactagaagaatatatacaaaatcataatactccggcaatggatgcatctgaaactttcagatgggcatcaaacatagattttttgacagctgctaaactttttaatataaatattgttgtgtgcagtccaaatgttcaaaatgataagaattcaatcaaatatacctgggctagttattctccggacgctatttcagtaattttcattttgttaaaaaaataatattaatctttagattctatcaaagcaaaaacctgatacaaaatcactatttatttattatgataatagcggacattttgaagcaattgttgatccgaaaaaaattgaattcttttaa

SEQ ID NO: 74786 - DNA, 660 bp, Heterodera glycines
atggacgcacaacaacttcagcaaattttggacgcggctctaaaaaaatcagcagaagtttttgccgccgcactcaacattcaaaatcaaaacccaaacccagggtcatccacaacggcatcacttgcggcatcaatcaatgcccgcctcgaaaaattcaattataatccggaggttggacagacatacgatgcttggttgaatcgatacggaaaaatcgttcaacaagacggcgcttcgctcccagagcagtccaaagtccaacttttggtcggaaaattagacgaggaggaatacaaacggtacattgacagcattgcccctaaagccaccgaacaattcaactggctcgaaaccgtggcaaatctgaaaaagatttttggtgagacgaggtcgctcttcctccaccgtttcgactgttttcaaattcgccaaagccaaaaccaagacctttcgagtcttttggcacaaatcaattcatcgtgtgaaaacgccgaattggatttgactaaagaagagctaaagtgcatgattctcatcatctctttacgcgacgaattttcggatttgaaacagcgatatctccagcgaatggaagaagcccgaaccaatgggaaaagcatcaccctacaggaattgggcgaagaatgcaaaaagtag

SEQ ID NO: 74787 - DNA, 4269 bp, Heterodera glycines
atggacgcacaacaacttcagcaaattttggacgcggctctaaaaaaatcagcagaagtttttgccgccgcactcaacactcaaaatcaaaacccaaacccagggtcatccacaacggcatcacttgcggcatcaatcaatgtccgcctcgaaaaattcaattataatccagaggttggacagacttatgacgcttggctgaatcgatatggcaaaatcgttcaacaagacggcgcttcgctcccagagcagtccaaagtccaacttttggtcggaaaattagacgaggaggaatacaaacggtacgttgacagcattgcccctaaagccaccgaacaattcaactggctcgaaaccgtggcaaatctgaaaaagatttttggtgagacgaggtcgctcttcctccgccgtttcgactgttttcaaattcgccaaagccaaaaccaagacctttcgagtcttttggcacaaatcaattcatcgtgtgaaaacgccgaattggatttgaagaaagaagagctaaagtgcatgattctcatcatctctttacgcgacgaattttcggatttgaaacagcgatgtcttcagcgaatggaagaagcccgaaccaatgggaaaagcatcaccctacaggaattgggcgaagaatgcaaaaagtaccaaattttgaaggaaagcacattggcactcagcacaaaacagtacaatgccaatgccattcgtgccaagccacaacaagtaaaggacaaggcagacgcaacaaagcaatatgccaaaccaaaagcggttccaaaaccgtatgagagcaagcacaaattgccaaaccgtccatgccaatcatgcggaagcacaaatcattggcgctccgattgtgggcacagagatgccaaatgcccaaaatgtggtaaaatcggacatctcggcaaagtttgccgaagcaattcttcaattcgccacatccaaacggtgaatacaactgaaaggcatgcacaaatcaacacagtcatcatcgacttaaattgcatggaaatcaaagcagaccatccaaaatggtggaaaataccaatcaaagtgaatggcgcagattatccaatgcatgtcgattccggcgcacaaatcacattgttcacaatccaaacatggattcaaatgggcaaaccgcctttgacgtcagcaaatattcgcgtcaaaaattgcaatgaccaaacatttgcaattaatggacaattcatgtgcaaagtgcaatacatggatcgtccaccaatgaaattgttggcatatgtgagccccgaaatcagtcataatttattgggcatgccatggatagaagctttggaggtgatcccaaaagagattatgcatccaaatcttcatccaaaaatcaatacaatttcaacgaaaaccaacgaaatcaaagacacggagacattaatttcggcgctcaaatcaacccactccgatgtcttcagcccagaattaggtcattgcaccaaattcaaggccaatctcattctgaaaaacggtgcaaagcctatctattgcaaggcaagaccagttccacatggcgctttggacactgtaaatgccgaaattgatcgtctactgaaaatggaggcaataaaacccatcgaatttagccactgggccgctccaattttggcagtcaaaaagaggaatggcaaaacacgagtgtgtatcgatttttccatcgggattaaacgacgcacttgagctacaccgccacccactgccacgtccagaggacatttacaatgcaatcgcaggctctaaatatttctcacgcctcgatttgcgcgacgcttatctgcaattggaattgtctgatgagtctaaaaagctgtgtacaatcaacacacaccgcggactcttccaatgccagcgtttaccgttcggcgtaaaatcagcgcccgcaatttttcaaagtttgatggacaaaatcattacacccatcaatggcgcattcgtctatctcgatgatgtgatatcgccaacacgactctcgaccaacacgtcaaaacgattaccaaagttttcgacaaaatcaaacaattcggtctccgaattcaactggaaaaatgcagttttcttcaaaaagaaaccgttttccttggttacataatttctgaaaatggcatccgcccggacccatcaagagccgaggctattcgaaaaatgccagcgccgcacgacaagtcaactctacggtctttccttggagcgctcacatactacggcaaattcatcaaacaaatgcgcgaaataagaagcccattagatgaattgcttaaaaaggatgtaccgtggaattgggaagatgaacaacaaaaatccttcgagaaagccaaagaaattatgctttcggatttattgttaacgcatttcgaccccaaattgccaatcattgtggccgctgatgcttcaaaaggaggaattggtgcaacaatcagccatcaatttcccgacaaaagggaacgtgtcattgaacacgcatcatgcactttcacggctgcgcaacaaaattacagccaaatcgaaaaagaggctttaggattggtgtttgcggtacaaaaatttcaccgcatgctctacggcagaaaattcactctgttgaccgatcacaagcccctactggcaatcttcggatcaacaaaaggcattccaatatattcagccagccgacttcagcgctgggcgttaattttgtcaaattacgaatttgatattaaatacgtcaacacaaaggcattcggaaatgccgatgtactttcgaggctcatcgcaaattacccgaggccatcggaagacatactcatcgcaaacatctgcaacgacactgattgctgtgttaattttgtttttgaggcaaaaattgagcaacttccgatcaccgcgaaaataatagcggaggaaacagcaaaagacgaaattttgcaacaaattagcgctttcaccaaacaaggatggccacaaaagctgaacgacattaaattgtctccttttcttccaaaaaagggacaaatatccgaaatcgaaggatgtctcgcctacggtgaacgaattatcatcccttcgtcactccggaacaacatcctcaaatcattgcattttgcacatcccggcattgtgcgaatgaaagccattgccaggaaccacgtttactggcccggaatcgactccgaaatcgaacgagtggtcaagcaatgcgaggaatgtcactcagccgccaaaaatcctacaaaagcgaatcttcagccatggaaagcagcaagcgaagtttttgagcgaattcacattgatttcgccggcccatgtgctgacggccaaacatacctggtattggtcgatgcttactcaaaatggccagaagtatggcaaatggaaaggacttccagccaactcaccatctcaatgctaaaatcattcgtgcatcggctcggaattcccaaagaaattgtctccgacaatggaagccaatttcgatccgccgaatttgcacaattctgcaaagaattcggcataaagcacacctttacgccgccgttccacccaatgtcgaatggggcagctgaacggtttgtcgacatttttaaacgatcaatgaaaaagtgccgtcaagagggaaaagattggcttcaaaaagtgcttttggcgtatcgcacgacaccaaacacggcactcaacggccattcgccagacgaacttttcctaggacgccgcatgcgcacaagaatcgcacttgtccatccggaaaaacaaaaactccagccaccaaacttggaaaattttcaacaattccaagggcagtacatcaaaaagatggaaaaccaattcaacataaaacatggagcaaaatcagccattttccaaaatgaggaaccaatttatttttggaatttgaaatacaataaagccacttggcttccgggaaaaattatcgaaaaattaggcacatctccgacgtatcgcatcttggcaccgacgcttggccgagccattcatcgtcatgccaaccaaatcaggcgacgtttcccaattgaattggaggacaatgatcaagttgaagaaaatgatcagacacaggcacaaaatccgccgcactcgccgatcgcgcataaaccgcagacgaatcgccagcaaacgcccgccgctgagcccgtgcatttgcgccgatcaggaagagccaaacaagcacctcaacgactggacctggacccgtcaaagcctaaatacggcttaatccgatcatga

SEQ ID NO: 74788 - DNA, 742 bp, Heterodera glycines
atggaaaaccattcaaacataaaacatggagcaaaatcagccattttccaaaatgaggaaccaatttattttttggaattgaaatacaataaagccacttggcttccgggaaaaattatcgaaaaattaggcacatctccgacgtatcgcattttggcaccgacgcttggccgagccattcatcgtcatgccaaccaaatcaggcgacgtttcccaattgaattggaggacaatgatcaagttgaagaaaatgatcagacacaggcacaaaatccgccgcactcgccgatcgcgcataaaccgcagacgaatcgccagcaaacgcccgccgctgagcccgtgcatttgcgccgatcaggaagagccaaacaagcacctcaacgactggacctggacccgtcaaagcctaaataccgcttaatccgatcatgaatcccaaatcgagggacattcgacttaaggagggaggtgttggatagggatcaaagatcactttcccatcattgttatcgactattctctctccccctttctctgtccaacactatttccattctctctctctgcctatctcctccacatttctctgaccccacgtctttataagtgcgtccattccctcactcatggctctccgctccattcattggcattggacatttatttattattttattctcctccgtcgctgcactcctccgacctcatcaatttgtgcatttatttttatttgtgtttatta

SEQ ID NO: 74789 - DNA, 2910 bp, Heterodera glycines
atgaggacagccgaatcggagatgcgagggttagtgaaaactacacgtgaaaatccgtccacaacacggggatatctgcatcacatatgacatccagaatacagctattgagagaaaaataagacgaagagaaatacaaaaggaacgccgacagcattgcccctaaagccaccgaacaattcaactggctcgaaaccgtggcaaatctgaaaaagatttttggtgagacgaggtcgctcttcctccgccgtttcgactgttttcaaattcgccaaagccaaaaccaagacctttcgagtcttttggcacaaatcaattcatcgtgtgaaaacgccgaattggatttgaagaaagaagagctaaagtgcatgattctcatcatctctttacgcgacgaattttcggatttgaaacagcgatgtattcagcgaatggaagaagcccgaaccaatgggaaaagcatcgccctgcaggaattgggcgaagaatgcaaaaagtaccaaattttgaaggaaagcacattggcactcagcacaaaacagtacaatgccaatgccattcgtgccaagccacaacaagtaaaggacaaggcagacgcaacaaagcaatatgccaaaccaaaagcggttccaaaaccgtatgagagcaagcacaaattgccaaaccgtccatgccaatcatgcggaagcacaaatcattggcgctccgattgtgggcatagagatgccaaatgcccaaaatgtggtaaaatcggacatctcggcaaagtttgccgaagcaattcttcaattcgccacatccaaacggtgaatacaactgaaaggcatgtacaaatcaacacagtcatcatcgacttaaattgcatggaaatcaacgcagaccatccaaaatggtggaaaataccaatcaaagtgaatggctcagattatccaatgcatgttgattccggcgcacaaatctcattattcacaatccaaacatggattcaaatgggcaaaccgcctttgaagtcagcacatattcgtgtcaaaaattgcaacgaccaaacatttgcaattaaaggacaattttggtgcgaagtgcaatacatggatcgtccaccaatgaaattgttggcatatgttagccccgaaatcagtcataatttattgggcatgccatggatagaagccttggaagtgatcccaaaagagattatgcacccaaatcttcatccaaaaatcaatacaatttcaacgaaagttaaccaaatcaaagacacggagacattaatttcggcgctcaaatcaacacattccgatgtcttcagcccagaattaggtcactgcaccaaattcaaggccaatctcattctgaaaaacggtgctaagcctatctactgcaaggcaagaccagttccacatggcgctttgaacgacgtaaatgccgaaatcgatcgtctactgaaaatggaggcaataaagcccatcgaatttagccactgggccgctccaattttggcagtcaaaaagaggaatggcaaaacacgagtgtgtatcgatttttccacgggattaaacgacgcacttgagctacaccaccacccactgccacgtccagaggacatttacaatgcaatcgcaggctcaaagcatttttcacgtctcgatttgcgcgacgcttatctgcaattggaattgtctgaggagtctaaaaagctgtgtacaatcaacacacaccgcggacttttccaatgccagcgtttaccattcggcataaaatcagcgcccgcaatttttcaaagtttgatggacaaaataattacacccatcaatggtgcatttgtctatctcgatgatgtgattatcgccaacacaactctcgaccaacacgtcaaaacaattaccaaagttttcgacaaaatcaaacaattcggtctccgaattcaactggaaaagtgcagttttcttcaaaaagaaaccgttttccttggccacataatttctgaaaatggcatccgcccggacccatcaagagccgaggctattcgaaaaatgccagcgccgcacgacaagtcaactctacggtctttccttggagcgctcacatactacggcaaattcatcaaacaaatgcgcgaaataagaagcccattagatgaattgcttaaaaaggatgtaccgtggaattgggaagatgaacaacaaaaatccttcgagaaagccaaagaaattatgctttcggatttattgttaacgcatttcgaccccaaattgccaatcattgtggccgctgatgcttcaaaaggaggaattggtgcaacaatcagccatcaatttcccgacaaaagtgaacgtgtcattgaacacgcatcatgcactttcacggctgcgcaacaaaattacagccaaatcgaaaaagaggctttaggattggtttttgcggtacaaaaatttcaccgcatgctctacggcagaaaattcactctgttgaccgatcacaagcccctactggccatcttcggatcaaaaaaaggcattccaatatattcagccagccgacttcagcgctgggcgttaattttgtcaaattacgaatttgatattaaatacgtcaacacaaaggcattcggaaatgccgatgtactttcgaggctcatcgcaaattacccgaggccatcggaagacatactcatcgcaaacatctgcaacgacactgattgctgtgttaattttgtttttgaggcaaaaattgagcaacttccgatcaccgcgaaaataatagcggaggaaacagcaaaagacgaaattttgcaacaaattagcgctttcaccaaacaaggatggccgcaaaaattggacgacattaaattgtctccttttcttccaaaaaaggcacaaatatccgaaatcgaaggatgcctcgcctacg

SEQ ID NO: 74790 - DNA, 499 bp, Heterodera glycines
gaaatttgcattgaccaacaagcattttattatgttgagcatttggtgttccaagttgaatggattgcatcggacaaatggtcgacaagtgcacaaatcaatgagcacgaccaaaattttttggcacaaattggccaaattctttccatttcaagggcaaacaaaatagaggacagtgaacccccaattttatcatactttgagttgaacgcccccactctgggccgattgaatgctttatttggacgattgtgccaaaattggcaaatttttgtggcaaaatttaacgacaaaaacactaaatttaacgcatggacgaaactgtgcaaaaagaatgtgtttaaggacttttatcagcagaaatgatggaacaatttgaagagatggcaaaagttattttatttatttgtttattatcttatcaagttgtaggaaaaagaaatataaaagcagacaaatagccaaatgaaagagatgcgaattgtatccccaaatccaa

SEQ ID NO: 74791 - DNA, 1995 bp, Heterodera glycines
atgcgtgccattctcagcggatgcgatgcagtcgaattgaagcgtttgctgggagctgagcagaatggcgcgactttgctggacgtagcggcacaaaatgacaaaacggaggtggccaaacttttggtagggcaaacagtaattcaatttttcgttttgttgtttctcgaaaccattgaccagcagtgggacggttttcagaatttggcgtggaggggactccacacccgggcacaacaattttattatgttaataagcaatttttaactagtgttacccctccccccccccccctccgagtttaaaatttcttaaaaaaccgaaatttggctgaccgaagaattcccaacgggtgtaaagagcgcgcgggcggactgatcattttttgttttgtccttctcatgggttgtatttgtttttttttcacttttttagttgtaaaaaggcgcaattcgtccaaccgatggcaccgattccgttacaattcgactcgtcacgatgagtcagtgtgacagatgccgtctcattgattcatttttttatttttccatttcaaattcagacaaactttcgccattttgggctgcgcttctcagggaacagacaaaactggtggaaattatggtaataggcacaacaattagttgttaaatcgctgtattcctgcttttcagttggaaaatggacagaatcccaatgaatttggcacttttattcgcgacaaaaagaagcaaagtgagtcattgtcttcaaaagtgcgtcccccttttttatggttggggtgatgtgtttaccggggtgttttgttttgaaaagcgcgccgcaaaaaacgtttttaaaatcaaaaagaaggtcgtccatttacatggctgaatcctttcgccaaaatttctgtctgccccccccctttttcatatgatttgaacttcctttaagaccttttttcaccactccatttcgctgcccaaaaaggcaatttggcgctgtgcaaattgttggtcgcgaagagtgccaaagtgaatcagaggagtaaggacaaacgtggcattgtgcctttgcacattgcgtgtggcaatggccatttgccagttggtcagtgacccaatatttaatgaaacagcaaaatacccttaatcaaagacaattcatttctattcattcctccagtcaaattgctcgttgaggagggcaacgcggacatcgaaagcactgattcggagggggacacgcctttgcactgggcactgttgaagcacaatttcgaaattgctcgctttttgtctgacaaaggcgcgcgcactgatcggcccaacaaggtgagttaggaaaaagtaacaaaacaaaaatatgtttttcacgctaaaataacttttttgtaattgtggtcaagtgctggcaggataactggtggtttgagtccgcgtggtttagaataatttttttttcggggcgcagaacacaaaactaacctccatttcgaccccgaattcgaacaaataaattttttaacaatatttacgggtacttctaggttttgtcacctcctgaaatttttgatgctgatcacgaatctgacctttatttttagccataacatgttttacgtgaaaaatttaaaaaggtaaacagtgccgatggtgccccacccctttcgaaaaaaaatttcaaaatttttttctcggagcaaagtcttttaggggttttcacggtcggagaatccgattcttacatccatttcgacccaattcgaaccttgaacccgaattcgaacaaaaagtcgaaacttaaaattttttctagtttcgcatttttggttcaaaccggcttaaatgtaaggaaacaaattaaaagccatcaatgatgttttttgattaggttttacgaaatttgttgcctttatgtcgcctaattaaatatttttatttttaaatttttcaccttttcacgtaaaatttcacgtaactcatgtaaaacacgttatggctaaaaataaa

SEQ ID NO: 74792 - DNA, 342 bp, Heterodera glycines
atgttgcttcttgtcgatttcttcgttttctttctcttcgtcctctgtccgtcctttgtcattttctgcattttttcgactttcgcttctgatgggctcaaaaacggcacggccgacaacagcgaaagtggcagcatcgtcgatggtcagcagcgacagagttccgccattgtcgccgctgtgccctctccgtcctctactgtgtccgtcgccaacctttcgccaatggcggcggcatttaatgaggcgattgttcaaacggagcagcaaccaaaagcgaccggcactcaaaacaaagtgatggccaatgagagcgaaaaagtatggcaaaacaaaatttag

SEQ ID NO: 74793 - DNA, 647 bp, Heterodera glycines
atgagatcaatttggagttcattttcatttactatccgtccattagtatgactagcttttaaaaatattttgtattttcatacattatttaattagaataaagctaaaacaatggtttagaaattttagaggccggtttatggtcaaattaaggttcattttatcaaatttttgtgaatgataaaccaaagtcttacattcataacctttgcttggcactttcttttggcgaattcaatttaaactcaagaatttcagacgatcaaaaattgtgtaaaatcatttatgttaaacggcgttcttttggcacacaacgccggcgaggttggcacggtcacactgaatgtcgttccaccagccgcacgggtgccacatttggacacactcttccgcgggctcatcatctgcgaatattttaattagtagggttgcaaattatatttgagaaaaacgcaaaatatatataaaatatgtaaaaaaaaaccaaaaaatgacaaaaactgcacaatatatacaaaaatatgtaaaaaaaaaaatattttttatgattttttaaggcaaaagttcatagaaagggataaataaggacaaaaatggcataataacctaattagctgaaaataatgttttaggtatttttaaaccga

SEQ ID NO: 74794 - DNA, 171 bp, Heterodera glycines
gcacaaaagatttgtgccgcgatgggaggccaaattgtgtccattcattcggaggaggagaacactttggtggcacggctgatcgacgaggattacatgctgtgcaacggagtcaatgtgccgttggcggaagcgccgaaaatggacgcaatgcgagtggaaaattattaa

SEQ ID NO: 74795 - DNA, 472 bp, Heterodera glycines
atggaaaagctgaagcaacaaacagttgctccatctgccaatttcgatgacggtattttaaatacattataaattaatataattaaaatagaaaatgacaatcaaattaattaccaaaaaaaaatttgaaaagaacagtaaattaaatacatattaaatttaagccgaaatctgctggatctcttggcttggctatgagccacccagcaatttggaagggggtaagtcatttaagggcatttctgagatatttttatacaaatttaaagctgacaaatgggacaattggcatgctttaaacaacggatggccaacggaggagacggacgaacaaaaggaaagggtgaaaatttgggtttttggaattttaaatttggcatttgtttttcaaaagtcaataaaattcagagtccaagcaaatgggtgctcgaattgttgcaagggatgcgcaattttttgtctgacaaagtga

SEQ ID NO: 74796 - DNA, 214 bp, Heterodera glycines
atgcaaatacgacattggcaaatattgcgggaatcagaagggcgacaaagtgctcgactgtttaatggtgggaaaaaaataattaaaattcataaaaaaattgtaattaatatttaatttatatgaaaattatataaaattcaaaatttaatatttttattttccaatttcagaatacaaaaattgttcgactgcttcaaaagcgctgtcttaa

SEQ ID NO: 74797 - DNA, 800 bp, Heterodera glycines
  unsure (1)..(800): unsure at all n locations
gtgcaatacttcatgtcccgtgactggtcgttggacccgcaactgtacgaggcgtgccaccaagaggcagtgacgcggtgccatgccacagacaattggcacgaaaataccaacaaattgccaggacaggaccaaaaagtggtggtggacccaggaccacaggtaagccagccagccacctatcgcgactcaatgcgctgagtttgccccataatttacaaatttattcaggtgcttgcctgtctgtaccgttcaggtattcttgtaccgtacacccgtccattcatactgtataattggaaaaaaataaaaattcaaaggttacgatgaggcgaacccattgggcaaggagtgcgcgttgcatgtgcgccgagtgttgcgcgagcgtgcggcacgtgtcaatctgctcccggacattgaggagaactgtagggacgcactttcggaatactgtaagtacatttgccattggcacataaaaagaagcatttttgatttaactaattgatcgccaactgatcaattacggtttttttgggcaaaattgggaattccttggacaattaaacttgtggaatcctcgtcagacctagccaagaaatttagaatttttaacaaaaattgttgcgataatcgttttcctaatattgggaaccaccaatgcaaccgatcactattagctttgatcaaatgccgcctgatttttccgattcaactgccccattaaatatttaaaattaatccttttttccatttttcataggctcccaaaatgtgnaagccgacggaggagatgcact

SEQ ID NO: 74798 - DNA, 3230 bp, Heterodera glycines
tttttctattgtcgatagccgacgtttttctctactcacacgaatggcggattttacgaaacgatctagcatcgatctttagtgcaaaatgtgaaaaatgtaattgtttcttgactaaattaaattttaaatagtgtagcttcggctcacaacgtttaattatgtagcgagtgttttaaataatttatatagatattattaattaatttggattaaaataattattttgctttaatttgatcacttgcacttttcgtacttcgtctcagcccatctaattgttttcttcaaattaccattttttaggttgtaagttgtttcgtcggctgtcgtcactttgtctgcgaaaattgtcttttgaattttttggatgacaattgtccaaaatgtgcgcaaaacactggaaataataacaacacaaagtcgtgctttcttccgccaaaatgtttccaatcgtcggcaccgtgacaaaatggcacatttatttatttgatcactgttcgattgataattagggatgggatttctaagtttttacttattttttctgcggctttaactcaacgagaaatacacgaaaaacacattttttgtctgaaaattttgcgttttcacgcccttattcgaccttagaaatccttatttttgatgttcgcccttaaaaatccttattttggatgttcgcccttaaaataagtttttgccctgatttggcgttttgtccaaaatttattaacaaaaatgcaataaaaaacgaaaaatacacccctaagaatcgacccaaaaaaatttcgaaaaaatatacccctatgaatcgacactaaatttttcaaaaatagaccctaagaaatgaaaaaatttttctaaaatatagcttatttgtaactgcaatcagtgaataaaattgtttgccttagtctgaaattatttcatgtaaaaaacagcaattttaaaaattataccctaaatttgactttttcgaccttattttcgcccttatttcgcgaatttttcgcccttatttacggccttattttggactttttcacccttaaaaatcctatccctacttatgaaatttaatgaacttttctaattttgccaaattcaggctccaccttggagtgtttgatcggctacatggtcaatgtgccaaaggatgcgtacaaagccaaaattgtggagggcatttcgcaagagtgccgcaaggaagtgatgcgagtcgcggagctccagtcggacgactggcatttggacagtatgccaaatacaaaagaaaaatttgacaaatttcaaaaatgccgaaagttcagggccgcttttcttcgcttgtcgcattgacagagaggtgaagaatttaaaaataaaaattttaaaatattatttcttaatttttcttacaattttcagagattttgtggcgaaatccccgcgggggagggcaaagtgttccattgtttgatggagcacaagcaggacgagaagatgtcgccacaggtgggccaatttaaaaaggaattaatgtttataaatatttattttaagtgctcaaaaattttgtcggaacgagccggactaatgggtacggtaacacatttttacagaaatatttttcgttacctttcacttactgtaaaaaaatgcgtaatttaaattatctccatttattgggtcacattttctggaaatttgaatttaaatcgtcgtcaaaaatttgctttgggccatggaattgcgcaaattaactgtaagatgctcactaaattttcttttatttttttacaggccgtgactacaaattggctcatccactgctgaaatcttgcgacaaagagttgcaggtcaaatccaattcaattttaattacaaaatatttccaaattattaattaattttccactggtttaggcttatcgctgtgtgccgcagccgggctttgaaaaatcgctgcagttccacctcagctgggtggtgttgtgccttgaggtgtattgtacaaaactcaaaatcattacggcaaattattttttaaatttaattttagaatggactccactatttcaaaacgcaggagcacgagcgcaagaaggcggaggaggacaaaaatgccaaacaacgccaatggcccaaccttttggcattcactgatgagtgagtggggcgggggggggaggaacatgtgaatgggaaatgagtcagtggaaattcgtcatttgtcagaatttcttgaaaaactgagacacattaaatatttcggtatgtacctgttactgtatgcaaattataagcgtgaattcacacaaaatgttaacaacttacaatccagggatatagcggaaagtttttgccggttcttggacggattcggcattttacctgaaactcataaattccaaggaaaaaacccgaaaaagtgcacaaaatttttatagattttcagcatttttggctatccgaattaaattaggattgaacataggggagacaacagcatgcttcatttccgactttttgccgattttgccatttaaagtccgtgtcggcaatcggataccggcattttgtttgtatatcagttcattatagtcagaatttttgaatttttttacaaaatatactcaaagagaaaaatttcattggaaatttattgaattacggattacggaaaattgccgactaagacccaagaattgacaaaaatcccgcattcctgctttcaatgaccaaattaaatgaattgacgaattccaaatttgattgttatgcatttcaatctttcgcactacaatacttaaggttacagaatcttattttaaaagtcattctcactttcaaattttccactgacggatttattttccgggagtcggagaatgacagtataatttcgatagacacaaattatattaattaattagtgcaagtaaatgcattttcttattttgttaattttcatccaaacacaactttacatatggacattttaggggtttaaatgtaagatttttttgacgataaaatcccatccccaccgatcacaggtgtcagcatgagatgatgacacatcgtcaaatgatggtccaagaattccgcatgtcgccagaaattgtgatgggctgtgcccaagaaattgacaagtactgctcgccacagggcgacattgagtcggagggcaaaacggtgcactgtttgatggcacatgcgcaggagagggacgagaaaaaggtggg

SEQ ID NO: 74799 - DNA, 719 bp, Heterodera glycines
atgtatcgccaatgcaaatttgcatttgaagcggatgaagttcggtccaaccgatgtggctcaagctttcacattactcctgacgaaaaagacttgcagattattgaaattagtaattaattcattttttaaataattaattaagaaaaaacattttctcagattgtgacactgtcaatgggtccgactgtggcaagaaggcaaaaacaaattccgaagcgccaattttgtggccaatttgctgactttaatttcaccatcattgaggtccgattgtgccaaggaccctaattcattatggcacaaaacaaattatttactcatttttagggaaaaaaatcccaaataagtcgtttaaaaattttttttttgcaacaaagaaatttggcataaaaattgtaaattctaactttattaaacttaaatgtacaattatttcggtacttttccgtttggggctaagcccgtaattcagcgcccaagagcaaaaacaggaatttgtactcgctttcgccaaaaaagactacttggcggtgccgatagacgccgccggaaatttttttttttgaaattttagtacattttgttaaggaaaattgattaaaatttcttagaaattgccattttttcacaaaaaagcttattaaaaaccacaaaatgatatatatttaaatcttaatcttcgggccctttgggtaatatgatttttatttaataaa

SEQ ID NO: 74800 - DNA, 342 bp, Heterodera glycines
tgaatataacgttcaccccatttaaacgaatacaaaaaatgcaaccaaattattacgttgctttgtatggaaatggaaaagaaccgcaaaattcagccaaaaattatgtaaaaataatatattattatttttaaattttaatttaaattaatttagcgattattaaacccaacagtggatttaattgacataattggtgaggaaacaaattgtgctgaatttacgacggacaaaagttgtaaagtatgaaaaatagaaaacattcagtcattttaaaaaatatatatattttttatttaagcgtatcaaaaatgataactcaatcatcttggacggattggt

SEQ ID NO: 74801 - DNA, 392 bp, Heterodera glycines
atgaccccttcatcagcggacacaatttgtgccccaatttccattaaagttgcttcagtaagtgccaagcatgagctaagccaatggtcaaatgcggtccaattggagccggatgggccacaaattgccggaaaaatggacattgtgcacgtcaaattcaatgtgcaaaaagcaattttaaataaattaaattattattttttttaatttagagcaccccatttaattatgatgattatctctcaaatgccacgcttgacattgaattaaggttcagcatgaattcaggctggttgcatgagtttgaaaaaattaaatgaaaaaaacccttctaaagaaacaaatatatattaaaggaaaatgattaattttcaaaaaaatatagaaataaa

SEQ ID NO: 74802 - DNA, 394 bp, Heterodera glycines
atgctggaaaaatgcaaagacattggattacccgaagattttggtgacaaaaaaggtcatcatcagaaaatccaagtcccaaaagatgttgaggtaattttttctcatttcatttaaaattcttcccgagaaatttaaaattttagattaaatttttctattacggttttttgaaaaattttttacccaaatttttaagtcattagcattaattaataaatgatttaattaaaatttaggcaatttataatgagaatatgacgattgatttgagttggagccaaacatctgctccgaatggtgaactgaccaaaatttatttgctgcaaatggagactgaatttccgaatcggcaaatttcacaaattgtaattttaaaaaataaataaataaa

SEQ ID NO: 74803 - DNA, 561 bp, Heterodera glycines
atgtattctcctttgtttaaaacctctttgcctaaaagctctgtatctgtggaaagtcgtcgaaacaccatctaccttttgaacccaacgggcactgttaaaaaaatgtgtcgtggggaggctgcacagccgcagaaaggggcggatgccacggatgtcaagcagcagcagcaccaccaccagcagcagcagcgaaaacatcaggtttcgagcagcattttttgatggctttttaaaatgtaatcgtgttaaacctgcaggggactgaagccatccgagcggcggagaaaaaaggggcggatgccaccgatgtcaagcagcagcaccaccaccagcagcagcagcaaatgaaaaaaggggcggatgccaccgatgtcaagcagcagcagcaccaccaccagcagcagcagcagcgacaaccaatgaactgggcaaagggaatacggggggaggatggaaagtggtgcggactctgcaaggttgtaaaccattggccacacgaatgcccactttatctgaaccagcgtgaagacggcggggtgggtatatgtttgtaggtga

SEQ ID NO: 74804 - DNA, 526 bp, Heterodera glycines
atgaaaagtaaattataaaataattttacttaggtgttacataagttttgcaccaaaatttttttaataaaaatttatttttaaaaattcaacaaaaaaagattcaaaatttgtcctttactatcgataagatgttggcattttcaggcaaaaggtcaatagaaatggaaaagtcaataaggagttagagttgataaagtaaaaatggtcatttttggggtaagtatttttgaaggctgatttaaagaaaatgaaaatatacacataaacatagaaaatgtgaataatgaatctccaaaaacggcatttttcaagaccatcaaataacaaaatgtttgaagtggtgttgggaattcctaaactgggtaaattgaccacgctgagtccaaatatagccttagatttggtctctaggttctcactaaacctgtacagctccaacttcatgaatggagttagagcagtacaagctcaggttgaataaaatgcataattcttgcttgaaataatcatttgtaataataaa

SEQ ID NO: 74805 - DNA, 778 bp, Heterodera glycines
atgcatattgataatatgcttctcttccccaattgttatacatgtgcgaaaaaaacgaagaaagagtttgtgttggctaaggatgtcaaaaaatgtaaccatcggccagagcggagagctttgattggtacattcacttcgatagaactgcggaaatccttggcgttgggatatagagtaataggcttctatcgggcctatcactttgagcaatttgacagtcagctgttcaaaggatatgtgcgcatgttcttgaaaataaaggtggaggcgtcgggctggccctcggaggtgagaaatgaggaggaaaaaagagcattcatcgaaatgtacaaggccaagtacaacatttggttggaatatgataaaatggtgtttaaccatgggctacgtatgatcgctaaattggtgagaaaaacaaataaaattcaaaaaacaaataaatattaagggattgaacagtttatgggggaaattttcaatgaggaacacactttctgtgactgagattgttaataatttggaaagatggacggagctcatcaaagatgacacgattgagtttaaaagaccgattgagataaatgagggtgtgatgagagcagtataccagaagaagcaagagtttataaaggagcataaagtttcgaacataattttgtcattgtggaccacgagtgctgccagggtaaagctgtacgagtatatggagcaggtctacaggaaggagggttgtaagcttctatattgtgacacaggtggacagaaataaaagaca

SEQ ID NO: 74806 - DNA, 995 bp, Heterodera glycines
atgtactcgttcaaaaaatattttgaaactgctcttgagaaggaagactttttctggcctaagaacagagctgaggttgaagcgatgttgattgaatcatcccaatataaagtggccatacaccgggattatgaaagcccgttttccggctacatagaaatgcacgaacacacgtctgcgttttgttttaccatggttgagcgagatatgcgaattttttatgactcaggggcgggtactcctatgggtagatacacgttggtactacacggcatcgtacaggggaactattgggaaatgattcgggattgggactccctatttttttcttctggttttactgggagggaaggagctagacaaaccgcaacggtttttttaggagtcgtctttttctggcaaaggtccaaatgctaaaggttctggcattagcttggggaaaagaactgttgacttccccaattgaagtactattaaatgttttctttaatcgtatggacaggtctttaatgattaaaaatctatatgtcattattattacagagaattgcttgcctcttggtcattgctctatcgggtccctccaagtctctttgatatttctcgtcgaagtgttgcagaaaatatgatggaagaatttttagaactgccatcacactttcgaattgctttttataataaatattaattgtgtaatttatttttttgccttagttatagtcgaaatttatttttatacagacgttttgggggtgttgcttttttcggcgtgaaaaatgtagaaaagggtgacggaatggtatgaaaattgtttaaacacaaaaatttatttttttaggaaaaggttaaaaacttggttgggaccatttgtactttgaaggttaatgtgagtgtgaaagaatatggtggtaagaagggaatttattatactttgattgatatttatgaaatttgattttttttgtctataaatgaaatgttaattttttatttaa

SEQ ID NO: 74807 - DNA, 657 bp, Heterodera glycines
atgtcaaaacaagctcttaaaaactcgaaaaactacattgctcaacttacaccaatgtattttagcacagtacctgaggatcagcttggcgtgaatgagcttgcaaatcgtgtagtgacggcagtgaacaattttttaaatgcagaattaacggaaagcggacaaagagctggaacctatggtaaaaacaacagtccacgcaagaattgcagaaggtaggagtagtataaggccacaaatgtgggtgtaaattttaccgccacattgtgcccttcacagcgcgcgccggcgatcgcccccctcccttcccattgtgggagagtgttgtgcccttcacagagcgcgccggcgatcgcccccctccctccccattgtaggagagtgttgtgcccttcgtggcgcgcttaaccccttttttttgcacgagttgcgcgcaaatattacacaaaaccatgcgagctataatttaattagtcgcgattatttgattttgtaagattgaatttttattaaatatacttagatttagaataaaatatttctctatttctttctattctaaaaggactaaaaaatatttctttttcaggtttaaacaaatgctttactgcagttattctaattttattgtataacattctcatgttaaaccgataa

SEQ ID NO: 74808 - DNA, 734 bp, Heterodera glycines
atgggtacgttggaggacaacaccggtgccaccagcgcaatctttgggaattctacggggccaaacggtgatgaaactgtgcgaaaattctgcggccgtaaaatttcctctgtaggtgcctttagcaggtgcgaaagttctttttttgttgatttgatttgcatttgaggtgcgtttccttcatgaccattctgagtattcctcccgtttcgtcaccggcacttggtgttcccctgcgggttccggtggaaatgtgacactttggacggtccaacaacagcgcgacgaacagagtcaggaaggcggaagacggattgttcagaatggacggattgagttgcccaattgcgatgtcggcgacatttggtgagcgaaaagggaattggacagcaatcattgccgtactttagcgtggtaaatgctcaacaatttgtcgtctcaacaacagcgggagacgtgcaaattgtggaaagtcctttggcatcaaatggagcgaatttggcggatggaattgcgaaaatatcgtcggtagccaaatatccgcgagtgcataagtcggtgttaacgctgcctatttttgtttaaatttttatttttcagatttgcttcttcaaccgcactttgtctgctggacgaagaaatattttctggcagtgattctggtcaaatcattcgcattcgcccggacagccaatcttcacagtcgactcggccatttgcgcaggatttaaccg

SEQ ID NO: 74809 - DNA, 1110 bp, Heterodera glycines
atgagaactcaaacgaagtgggattggcaaaaccgacacggtccaactctgaatcagtgcgaaagagtgcgtctgctacaacccgcaatcaaaatgatagttttctgactgatcaaaatagtcttcgtccacaatcggagcctccaatttatcaattaatggaagggatttcgtcatgtgctcatacttcgaatattagttccgcttttcagaattcgcctttggtatttttgaatgttctattatattgggattaatttatttaacgatttcaaattgcctattattttatacattataaatatcaagttcattaaattttcaggtttcaacggaaaattgctgtgaagatgaaataatcgatgtttcaagtggagaaaattcaaatgggcagttggacaatttagcagacaattgtaactcacgaaactgccaacattcgcatcagaaagaggaaggcaacgccgaacgatgttcgtttaagtttttgtgaagggcgtagccagcagacccttggcttcggggggggggtcgtttttagggggttgttttcttttttagaaatccctacttgggagtctattttttgaataattaaggtaattagaattattgcttaaaaaattcgttgaattattattttttaaatttttttggatttccctttcctgactacgcccttggttttatcctttaatgttttccatttttcttaggtgcctttgatcccgtgacgaagagagtaagtgcccccattgaaaaggcaagaaccctttgacggtcatttccgtttttagcgattttatgagcctcacatgcgaagcggttgcgatggcatttattgtctgtctcaaataacgcaaattggcgagcgcatttgtaacgtggaaaacaaattggcaaggcttgctgagctgttcattcaactcactgacgctgaagttgagactgtcccaattcaccaaatttttaattatgtagaataatgaaacctgccaaatgccgcaacaaaaaccgcagaaagttggcacttcacgtccaccgtcgcgttaccttctcgcacaaagaccagtccctcaatttcgtacccaatccgccgttaacaataaa

SEQ ID NO: 74810 - DNA, 2838 bp, Heterodera glycines
ctttggattcgccattaaacagcagacagatgaatcgtataaatcagtgcgacataaaaaggacacttatgcatatgaaagtaatggctgtgtttggattaacgaagaattaaaggaagcaaatgtcgaatattcctactgtattggcgatactgtaggaattggtgttaattccatcacgcgacagatcttttttacaaagaatggacttcgtttgggttggcacaaatatataattaaacaaattttaaattaaaattttatgctattgatttttgtttaaattacagaaaatccctttacttttcacagatttttctaattttctctttgctccatcttttgctgatgattcattttatccattcgttactttggccacttttgatgacaaaattgaggcgaaatttatgccctttttcgagttcgatttggaaactcggatgaagaacatacaataattgttgaccaattcgtttcttttttatgcttttcttcttcaattgtaatttgggtttttgaatgtttaaaatataaaagcttatttaaaatcgaaatattattctgcaaaaaattccaccatccataatccagtcggttgtcctcttggttatgttccttaccgaatggtactgaatttgtcaagattcgatcgtttaaaaaaagttatagttccaaatctctcaatttttgagttttgaaccggctcaaaaaccggttttttggcattccgcaactcgaaaatattttttcgtgcttagctcctcgagagtggtatatcatttgaccctttttttcccttggcgttcactacaatttatccaatctttttatatttgtttattttatatcccaatcttttttttttgccgttttctgttgtttgtgccattttttggaacattgtttgccgaacactcaaagatgaatgaacgataattcttttatctttttttgcccatcgctttctccatttttgggtcatcgttttgccgtaaattatttactttttggcgtataaatatgtaagcaaattcagcaattgactttcttaaccttaaattctttttaaaaacaaaattcgattccaatattagattttgaaaataaaatgccatcattaaccaccactttttcgtcagcggacgaattctctccactccaacgtaaaatattttgtttaaaataattaattttttaataaatttatttattttattttcagcaatttttccaaatctgagcacatcggaggaaatgagtgttctgattgccagaattgctgagctgaatcgagctaacacagcggaaccatcaatcgcaagttctgctgatttgtttggacaagacggaaacggtaggaaattggaggaacacagtatcaaaattatactgtcacaaaggggagaggaaggatcacaaattgaaaaccaaaaatcgaatagaaatggatgccaaagtcacgcgatcaaaaaacatgaaaatcattgggaataaatttacgaaccaaaaatatgctaacccaaagggaccctatggttttaaaaaaaattaatgtgaccaatttttaagtagcgcaaaactttgattttttaaatattttaggatcggatgatgatgagtttagtccaacagacgaagaagatgagcaaaagaacgaagaaagggaaacgcaaacaaacgaaggtaagcagaaaactaaataaattttaaattttttttgaattaattcgactttaatttaagctgctgaggaaaagctctcacaactttttacgcttacacgagtcttttttatttagacttatgtagtttctgtcttcagttcgggtggttgtttccagagaaaattttaattttcaaaagaaatattttagaataaaaaatttaatttttttaccagtttttgctttttatttaaaaatgaagcttttttattgtaaatttatctttttaaattttttatcatcgattgctgcttaatagccgatttggtgcttattgttaggttaatctccatccagcatttcggcttgggggagggacgaccctaccctattttagtttttaactaaaatttggaaccaactcgataaaaggcttattgaaataaactcattaaatcaatttaaaaataaatttaaactatctctattcctgtaaaatagactggaaaaattaaagtcgaaattattaattcattaaaattaaaagtgattggtcactattattttattgtatttttattttattttttatttcacattatattttattttggcgatgatctcgttttaattgtttatgcgctttcttgaggacatttttaaataatgtttttgtcctcaatgtaagcggatttttcccttttgtggactttttctttattgacaataaactcatagaccgttcaacccagaacagtgatccgcaaaagtattcttttgttttgtttttatctttattttttgttatttcttcaacagaacatattttatgtaaatttttttggcacttttatagttcagtggcacgagttcggagttcaaaatcagtcattagttggcattaaatattcttaaaaggataaaatatcatttgtcatccatttttattaaataattatattttaagctggtgttgaggaacgattctcacaattacaaaatgatcacaagaaacttttggaaagaatcagtgaaatggaaaagcaacaaaaagaacagacaaaaggtgagggaaaatttcaaaaaataaaatttcgatttttaagctaccgcagatcatttgtcaaaaattcaaaatgatcgagaaaatttttttggaaaaaatcagtga

SEQ ID NO: 74811 - DNA, 322 bp, Heterodera glycines
atggtgacaggacagaccttggcatccccactgttactgctgctgctgctcgttgtatgcttcatcattttgagaagtgatgactaatgaaaagggcgtcaaaagccaataaattaagttttttgtactcaagaacaaatcattaattgcttaaattgtgtaattgaaaaatctccaaatttgtgcgattcggtccgaattggaattattattttattcttgttgaataatttaaaaaaaatttcgtcaaaatccaggactgggtccgggtccgggccgattttttctacaaatgattaactgcttaatgagtaaaattaaa

SEQ ID NO: 74812 - DNA, 566 bp, Heterodera glycines
atgtcagtcctccactgctcctgggagaaggaggaggcgcgttcccgccacgtggactttgcctgcccaattgtgaagagcaagtccaacccgagtttggcttccgccgcctccgaccctttgccgcaggtgccattttcagaggagacaattttttttgaaatctgtgccgttttcttacaattttcaaaaaagtgatttatcgcttttaaaagtaaattcaacaaagcatttgagtgctttttaagcctgcgccgttgcaaaacaacatcaacaatgggtgggcggcggagaatggtgccggcgaacattcggccaatttccagcaacggccgacgaatgacaacgacgggagcagcggaaatgagaatgaggccgttcaccacccaccaccgccctcctcctcctcacagcaccaccaccattcccaacaaccgttgttcctcaatgtcggctcggcaccacccaactacggtcacaacggcaacagtaacaacattggcacaacgccgcagcaactaccgtaccatttgatcaataatggggcaggcggcacacagacgacg

SEQ ID NO: 74813 - DNA, 132 bp, Heterodera glycines
gaaagtgaaagcgattaaacgaaaaacggagaaaagtgccgatgatcaatcttctgcttaatcttaatttcttaaacatttaacctgtacgtattttactttattattttttcgaaaagaaaattcatttta

SEQ ID NO: 74814 - DNA, 354 bp, Heterodera glycines
atgagcggtgatcaattggtgacagacgattgggttgccaaagagacgcaaacgttgggcgtgtgcactgcgcgggtgggtgaaaaaacatttgggcatttttgtaaattccgattttaaatattaccatttcagtcctctgactctgaaaagatcccttctgctgctgaccaacttttatggcccggtcatttgccgtgtccttgtgccaaaaaattcggcggcaaatgcccaaacggcgaccatttttgggggtgtgagcaatgcggacagactttaaaatttgcgaaacagaagaatgacgacatggaacagaaagtgagaaagtgccgtcagcatataagcgccaaatga

SEQ ID NO: 74815 - DNA, 90 bp, Heterodera glycines
ggattattttcaaaaacacctcgtagactgggggataattgagactgcgggattaatagagactgggctataattagagcatatacggta

SEQ ID NO: 74816 - DNA, 952 bp, Heterodera glycines
atggacaaccaaaacatggccaacacgttcggctttctccgtggctatgatgcgttgcacggcgtcggcattgtgctgaaagagaacgacaaccgtgccgacgcttccttcaattactgcatcaacggccttctgagcaatctgcacaaaaatgtggcacaggtgtgcttttggcacaaagaccgaaactttaaattttcgagttacgcatttttggttcaaaaccggcttaaatactagtacaaggaacccattgaaagtcatcaatgtttcaataaaaaatttcattttagagcaaaaatttgaaaaatgcctgcttcttagtcgattttgtttaaaatgatcaatttttatgatttatttctcttttgccggcggcaacaatcccaccccttccctcttttttcatgtaccttttctcaattttgcagaacatcgtttttctgatcacccattcgtcgggctcgggaaaaacaattgccctgttgcgcaggctgctgaaaccaattgaagaaaaggccggcgtaagtatttaatgttcttacggctgctgtttttaaatgcccatggagctacggcaagatttttgatggacttttaccaaaaacagtaaaattacactatttttgtcacagcaattactcattatccggcttcatcccttgttatccaggtgaaaattccattgaacgaaagcaacgtgttctcctttgacaatgccccgtttgaagcgctttgtttgatcaaagcgatgggtgtcgaatatgacgtggaggaaatggaagaattatccagaaaatggaccaaatcagtgcagcaattcaaacggttgttgaagcatttggccactgtgaagccccatttgactcgggaaacgttgtcggtgtatgccgcgcgttgtgccattgccgacattatgccaatcattgcatcaaacggggagcaaattcaa

SEQ ID NO: 74817 - DNA, 1133 bp, Heterodera glycines
atggtatgaaaaaaaggtcgtcgacctccctcaaaacgtaatcctaggagtatccctgtccaacccccttctataccgaatactttttttaaaatttttcggaaaattatttcagccggccaaatggttctcctttctgaagtcgtcggctatgaaagcatacaacgacaacatggagagatacatcgaattagcaattcaagacgcagagctgagagagacttccaacgaaggccaatcgaactacgaggagcaaaaaaagaggaccgacgggacccgagtcggttcatcagtttagggcagaaaaagcatggacgaacctcacatctggcataaaaaaatagttgcagggttttgttttagggaaaaaaagttttcctgaagagatgatgaaaaaattaaaaattcaaacaatttctttttgaatatcacaccgttttaaacaactttggcatttttcctccggctttaccacattttttgtaggcaaattagtgacgaaatatcaataccatacaattttttcagaaattgttggagttttaccgcaaagagcgcgacatgttcacagagggactggagaaggcttccgtcaacgtggaggagttcaaatttccgaccgaaaatgttgaacaaatttttgacggacttttcgcattggaaatcaccggcaaacaaatgaaggccaattacgaaactacgaaggaggcgcagcgagagcatcagaagcaatccaatgccgaagcaatgcgcgcacaaaatttggtcaaggcaaagccaacgaaatgccaaagtggtgggttggcgtggcgagagtcttgaggccggatttatagttgtgcccgagactgtttgtactttcatttaattctcgaagaagtttgcagtgccgttcaatgaattatttaatttgctattttattttaattgctttcatcatttagcgtacaaccaaaaggcgattcagtgctatttggacgaaatgactgagaaaggccaacaacagttgggccagggttggaaagcggacggaagtgccgagtgggtggataaaataaaatttgcgaaatatttttattgtttttccagggcatcgtccaatgttgacatgactgatggaggggaaagcgaag

SEQ ID NO: 74818 - DNA, 1056 bp, Heterodera glycines
  unsure (1)..(1056): unsure at all n locations
atgggcttctccaagttgaaccagttcaatggcatgtacaaaacggacgattttgtgccgggagactttggcatcgttccattgaagccgaaaacttggtggatttggatgccggagagtgggcgagacgaaactggggaaatggcactggttgaggaacggataggcatggaacaggtggctgccaattaaaatgtctaaatggtgtaattaattaatgattattatttaggattatatcgtcaaatggagaagcattgtcagtgaatttctgcagaataaccaaaaaatgcaattcaattattcaagatttgctgctgatgaagagaataatgcacctcagaaaaaattgtttgatctgaccaaagtaattttaattaattattcaattatttatttaaattaatttcaccttaaaatactaaaactaactaaaaaattattcgtttgaaagaagaaaaaaaataatgcaaaaatgaaagcagaaaagcataaaaaaatgaactaaaagacattaaaaaatcatttttactttttactcagtgttgaaaaatgagcaaaattgcactccaaatcggtgttggtgtctttaatgagatttaaatttttttaatttcagaattctgttagcttttacttttatgaaaaacaattcatttattgatgaatttaactgcaatttttaaaatttaccatttatgattcccgaaaatttgtaaaaaacatttccatttatttttctaatttttaaaatagtattcaaattaatttacttgataaattaaaaaagaacttttacacgaaaatccctgaattttcacgaatatttaagctgtaccactatgttgtcgatcaaacattcccaaattttccaatgcgtaaacatgccgactcttgaggatttctgtcagcagcagatgacaaatctataaaaaacaaaatctgaaacaaataggaaattttttcaaacagcaaccgtcaagaataataattttcattccctccggctgngcgagttataaataagaaattaattacaacgacgaggaaaataaa

SEQ ID NO: 74819 - DNA, 1298 bp, Heterodera glycines
atgccatcaaaaattggctcattagaattctgctgcttttttatggaccaattttgtgaggtcaaaacggcaaaaatcaaattcagtgcaatttttgcgattgttttcgatgacactttgtgataaaagccgtgataagccacaacagcggccaaatattcgttgagagggcatttgaactgtggcgttttgtccacccaattcattttccaaatttatttttggtttaataattttcttttcaattgcttctaccgattttttaggcgctgatttttagaaaaatatttttgagttaaaattattacaaaattctcaacttaaatatgccattttatttgtttgcccttactaattcgtcatggattaagttggatgatgcaaatcttaacaactaattttgcaatttcaaacaattcatttttttatttttaatcattaaaataaaaaaaatgcaaaaaccataagattattttccataagaatgattttcaagataataatgaagaaattcataaaacaccaattaaattacgaatttaattattgtttgggcgctaacataagattattttccattatgatcttattctgcacaattcatgatgatggagtttttttgggtacttttcgttatgcgtacacagggccaaattttaaaaaaatgcaacaaaggagcgacgtttgccttcgcacataaaaagctaaacaatgatgaatataaattaataaacattagtaaataaaataaatttaattaaaaacataattaatttttacatgtttctgttttggtagcaccgcaggtggccggccacgcattgttagagacggaggcgagcattaattaatgttaattgcactctcattagcgataataatggcagttcattacatggcctatttccaaggacatccttggaaatacaaaggactatttcctcccaatcccacaacccaatttaaatacttgaatactgatttaaatcattgatttcacttcaaaggcaatgaagctacttctggatgagcttgtgccaatttgtgctgtaccaaatttgccggaagcagccaaattgcttggcaaaaacaagccaatgatgaaggcgaaatgcttaaacaatgccactaattgggcaaattcggagctaaaacagttttgttgaaatgcataattaggtttttaattaatctatttgattaatttttcaggtggacatttgacgaacagtgatcaaagcacggacattttgttcgaattggatggtgccgaaaacttttttcgcgaaaacatttaa

SEQ ID NO: 74820 - DNA, 389 bp, Heterodera glycines
gcatttttccaatgcttcatctcccgtcaatttcatcattgtcattcgatttccgccgtctttcgctgacgccgttgtgccatttgcgctaaccaatgaattgacccgtgaacaattggcattgaaaagaactgctgactatcacgactgttttctgttggtccgttgtccaattgcgcgagacgaaagcaaatggacaaaatgggaagaggaagaggaggcgatttattggcatcattattatcagtggaacagaattgacattgaaatttatagtgatgatcacgtcggtgacgggtcagcgattttcaaaaatttcaaatttattgtatttaactatttttagacttctcgacgaaattcccggcccaagtgatcagcagcagtag

SEQ ID NO: 74821 - DNA, 1646 bp, Heterodera glycines
atgatcagccaccgatttgactattatgtggacgaacacttcaaaactcgcaaatggacattggcacttattcgaattcatagcaaaaatggaaaggatggcaccaaggaaatgaatattttcaatcactattggaaacttttgccaattccgcaaattcaaatgccacgcaaagtcatcggattcgaatgcatcgagatcaagtaaatttggcgattccatttcaatgaagtgaatgaaatgaatgttttttgtttgtaaaacgattccttaattttacagatacatcgaccaaaatgtcatcgcttttctccaccgttttgcccaactttttgccacaaattgcccaattaacaccacctttttccgccgtttgcgtcaattcgtcccgtcattgcttaatgaatgtccatcactttgctttgtctccttctattatggcggtttcttcaccgaatttccggccaatgacaatgccaatgcttcgaatggacaagcggtggccaaatggcttttcactccacttcaaaacaatgtgccaaagatgtacaaattctcgttgtacatagattatgatgagaattggacgtcgaaaattgcatcatttaaagcggtgcttgccattttctgctgatccgttgtccaattgcgcgagacgaaagcaaatggacaaaatgggaaaaggaagcgattaactggcaaattgatgatcaatggaacataattgacattcgtatttatactgagaattacatcggcgattggtaagtgaatgaatgcctcctattcaaggtcattgctttttcaatttttaggcttcttgattcaactcccggcccaagtgatcagcagcagaagtgaatgaaatgaattgttgagaagagaccgatcaatttgctgtcccaaccccccgccacaccatttgcgtagtaaaattcatgttttttaaggaaaagtgagtgaatggaagaaaatgggggaggggagagagcgttatataattactaaaaatttagaaaatggaaaaccgtacaaatgaaccaataaattcgtataaaagtggttgctgctcttcctctaccttccattattattcattcgccatttatttgttttcgtctctctctctctccgactttttctccctgaaaatgtcttcaaaaatgattctgtacgtttttcgcatttcttctcaacatttactcttttccatctcattttttagtctcttcggtgtgccaatgtttgtcggcggttgtgccattctttggatttattgggaccgtctcaaaaaaccaaaaaataaaatgtaaaaataaaaaataaatttccaaattgaaaatttaatttaattttttagttttatttctgctgactgttggctttgtgtcttcgatttgcttgagccgtcacaacttggcctcggaattgcactgatcagccaccgttttgactattacatcgatgaacacttcaaaactcgaaaatggacgttgaacttcatggaaattgggcgcaaatttgaagagcatggcgcatcaaatgaaatggaaattttcaattctgattggaaattgatgccaattccgctaaagccgttgccaaagaaagtcgtcggattcgaagccattcgatgcgacgagtga

SEQ ID NO: 74822 - DNA, 1884 bp, Heterodera glycines
atgtcagaccgccgaaaagaagcggaggaaaaactggcaaaagcaatgtaaaatttaaaattaaaatgccaatttcaattttgttttcccttttttcagtttcatctccgccgattgttggctttgtgtcttcgatttgcttaagccttcgcaacttggccttggcatttcaatgatcagccaccgattcgacttttacgtggacgaacatttcaaaacgcgcaaatggacattcggaactgttcaatttggaggcaaaattggagaaaatggcaccaagcaaatggaaattgtcagttccgatggaggaattccattgccaattccgcaaaaaccgttgccaaaaaaaatcatcggattcaaacggatcaacatcttgtaagatatggccaaatgtaaaagtttttaggcaacatctcccattcattttcagtttcatggaccgaaatgtcatcacttttcttcaccattttcgtcctctttttgccgcttgtcaaatcattttgtgcatcaacacggacagtgatcgcaattgcatctcgaaactcattttgcgcaacatttggccagtgctcgggaaaaaaattcatagcattgaaattaccgccacacatttccatcatttgcgacaaatggcgccatcagttcttaacgaatgtccatcacttcgttttgtcattttttatgacggttatctcttcaccgaatttccggccgatgacagtgccgcggcatcggatggacaagcgttggccaaatggcttttcactccgcttcaaaacaatgtgccaaaagtgctcaaatgctatttggacacggatgctgcaattttggtgtcgaggattgaagccttcaaagcggtgattactaataatagatttatttgacattttcacgatttattgggcatccaacggaccatctaaactgtaaaatgccatctttgattttttgtgccgccctccccaaaccgaaaaatgcgtttatttcttcatcaatttttccacctttcagacttttgccaatgcttcatctcctgccaatttcattgtcgtcttttggttttcttttgcttcctctgctgtgccatttgcgctgatcaacgaattgacccgtgaacaattggcattgaaaagaactgctgactatcacgactgttttgtgttggtccgttgtccaattgcgcgagacgaaagcaaatggacaaaatgggagaaggaagcgattgattgggaagattctgatcagtggaacgaaatttacattgaagtttttggcgataaggtcggcgacgggtcagtgaatgaataaattatttaggatttaatgtgtttctatttttaggcttctcgatgaaattcccggcgcaagtgatcagcagcagaagtgaatgaaatgaattgttgagaagagaccgatcaatttgaatgatttaattgttgacgtgctcatgaaaaatgttccttttttgttgttggaatgatcaatcaacctttgtctgtgtaaatcattaggataaatttaacgatttcctgaaagatttccaaaaaatccaaggtactgaagtgtccatttttaatcgggactcagttatccattatcacaaacaaagaagaaaatgaactatagttgaccgggaccaaaatacgaacaactgagtaccaaggtcccggttttgaccgggaccgggaaattcccggtttttcaatccgattaggtcccggttttgcccaaaattcccggtcccgctcaactctaaaattccatgcaaaatatacatttatatgaactaaaaaagccttcaccaaatcaaataatttccctttcttcatcatggcaaatgcgcagaaaattttttaataatatcaaatttattcaaataaa

SEQ ID NO: 74823 - DNA, 226 bp, Heterodera glycines
  unsure (1)..(226): unsure at all n locations
acagaatgtgaacatgggtactaagcagctgaagcgcgacaacgtttacgagctaattggcgattttgcaaaagcgctgcttccctcctcatttctttacggctattgcaaagaggcgaattgcgcaccttcgtccattttggtcaattatgctgttgaactgtgcaaattgtcctcttcttaaagaaaacgatgcgaantcgttttgaactttgcattgaaacag

SEQ ID NO: 74824 - DNA, 751 bp, Heterodera glycines
atggactcggcagcaaatgctccagtcagcaacagcggctatgaacatgacccattggggttgaacaatgtccaggtagtgtagtaattattcaaatcgccctaatggcttttttgagagacttaaaaatcattcattatctctaaggaattgcatcgttttttaattgattaatcgctccaacaggttggtgatccgctgattgacgatgagcaacagcagcgccacccggaaacgaacattgacgaagatgaggacgtacttcgatttgatggaggcgcttttgacgacaatgactacggagaagaggaaggaatgacggagtttaatgccgatgacaacaataacatgggcaaggaaaataatgcttccaatgcttgtgagttttatggggcgtggcagaggtgtcaaattatttttaatgcgtagttagttttaaacaatccttcatccaagtttcgtcttttttacatttgtaaatatgatgccattttcagcacccgttcattctgatgtgcttcaacaaccgctggcacttcagcaggactttggcactcctccgatgtccggtgtttccaacggaggctttgacaaagctgatgacaatgccagccaacacaggagcggtggtgtttctgcccatcgtcgcactaccggcgacgcgacggaccgtcattttcagcgcgttgtggtgggattcccctccacttatctttaagaaaaatactgctattgtataaaagaaatagca

SEQ ID NO: 74825 - DNA, 280 bp, Heterodera glycines
ggctgaaaattttttttaacaattattttttattgctatttcttttatacaatagcagtatttttcttaaagataagtggaggggaatcccaccacaacgcgctgaaaatgacggtccgtcgcgtcgccggtagtgcgacgatgggcagaaacaccaccgctcctgtgttggctggcattgtcatcagctttgtcaaagcctccgttggaaacaccggacatcggaggagtgccaaagtcctgctgaagtgccagcggttgttgaagcacatcagaatga

SEQ ID NO: 74826 - DNA, 606 bp, Heterodera glycines
aaaattaataaaatttgaagaaatgaattttcaaattatgtgatcaaaataccgacctattaggccatagaattacaccaattatgtcaagaaaagtgcgagaatttatattttttgaaacgacctaataaaaggaatagtcatggtttacgtcttccacgggtccaatggttgctgctgttcgggctcattgaagagatgttgttgcggcatgtcgtgcacttctgacatcgcatccgatgggcgcggcaaaacagtgccagcagcaccgacagagactggtctacttggcatccgttgcggtggcggcgtttgtggcggtcggggctgaaaattttttttaaacaattattttttattgttatttcttttatactatagcagtatttttcttaaagataagtggaggggaatcccaccacaacgcgctgaaaatgacggtccgtcgcgtcgccggtagcgcgacgatggccagaaacaccagcgctcctgtgttggctggcattgtcatcagctttgtcaaagcctccgttggaaacaccggacatcggaggagtgccaaagtcctgctgaagtgccagcggttgttgaagcacatcagaatga

SEQ ID NO: 74827 - DNA, 1339 bp, Heterodera glycines
atgatggcaccatcgtcggaaaacggcagcggtgacggaggaggaggacgtattcatcttatcggactgtcggattcgcgtggtgtttgggaatacgttatgcaactgagggaaagctggaacaaaatggtgtgtctactggtcatcaacagaccggagggtaaatatttctcttccttttaagtttttctaattttaaacagctaatcaattgtgcttttttgtagaggaacaagatttcctcaactacatggactgcttcgcgttctacaaccagggcacgcaggtgggcgtgctggactttgccgaccacccgaccatcaaagacggctatgtgttcacgctgagcccgggcgaaccgttgccatgtgagagttttttttaatagcaacttattactgactatgagaatccccttttccgcaacacattgtttaatggtaaaatgccgtctgtgaatgttatgtctttcagctgtgctgttgccgttggacggtgtcggattgcccgagtggacacagcacaacgggtgcattatgctgatgattgtccgccggatggaccacgaggataagcagtggaagcgccaacggatgggcatgggcgttggggacgaaagttggcgacgtcagcagcagcaacacccccaaatgatgccgatggacattccgctgacgccgattggccgcgggggaggcggcgaacgcatggcacatctgctcagcgaccccaggttggactatgagcttaccactcggatgggctctcggctgtaccgcttctcgcgcctctacaaatccatgccaatgattttcaaccgaatcttttctgaaattaacgtggacaacagtgggaacgatgagaatgcgaaagtgtagtagagggggagagagatgggattataccgaaaagagtgtttttctaaaaaatataaatttttcttggcatattggatgggtggtccctcttttctctctccctcgtcgctctctctttgtgccatattccggtttcttttttttaaactgtctttttcttgctttatattttacacattcagctacaaactctatttttgagaagaattaaaaaattctatcaatttgctttatttgttttcattcatttttctgttggtctctccgattttttgccgatcttctttttttgctgccgttttcatttttaattctgatgcgggatttttgtattgtcttttccatattctaatattattagcaattctttttgctaaatcttaccagtacctcccccccccccctgtgtcttcttttcacacagctcacatttgcctacgcattgttgaatctgcatttta

SEQ ID NO: 74828 - DNA, 267 bp, Heterodera glycines
atggaagaaaacaaccatagaaccgcggttcaaatggcatacaaatttcgtttaatcgattatgactctcaaggacaaataacgcctattaaactccaaagagttttaaaaaatggcacgcaacagctttttaatttggagacgtgtcgtttaattgttaatcagttcgatgagcaacgttgcggttacatcggtcttgccaaatttccagcgctatgggatgtatgatataaaaaatgacaaaataagcaaaaatattattttaaa

SEQ ID NO: 74829 - DNA, 508 bp, Heterodera glycines
atgtattgtgccagttgtgcccaccatgctaacaaggcaatccgcagtatttacttgagattggagctccgcgactgtgaagatccggagatttgccagactgttactgtcttttccaccgtagcggaacattacctgggcctcaaggttgaacgatttgccaaaatggtagaagagcagcctgaacagctcgaagcgttgcttaaatctaagattgagcgtactgtcaccgccaaacttagtataaaggttcacaaatttactacggatataaatattatctttttgaatttttaaggcaaagggtgagctcaagacgatggactggattgttctgtccatacagcatgagaacggggaaaacgagggagatgatgagacggctcctgatgaacaaaagaaaactgacattaataatgaagatggagaaataatcgagattgagaacactagcgtgcattcgacactcttaggcccaccgcttaagaaacgtgtaaaaaagaactga

SEQ ID NO: 74830 - DNA, 2077 bp, Heterodera glycines
atgaaaaagggacaatccgaaacggctatcattcgttcatcatcatcggcaacagcgcgcaatgacaatacggtggcagcctcaaccttggatggcaatgccaaacggcaacgtcgtaatagttgggacttcaagacgatggcccattttgaggagaagcgccctaaaggggaggaggatggacatagaaaggtgaagcagcctcagcagccagcacccttgtttgagcaaaaacaacactacgtgcaccgagtggagcggttcgcactgcagcgccatgtgaccgagtttgtgctgaacggaaaacacgatgagccggaagaggcgcttctccgcgccttcgagcatatcatcgctcgtgcaatccgaaacgcagaggattcccatcagcaaactgacgatggaagaggcacatcagcgggcgacagtgcacatcgtcaacggcgtgtcacaagacttggagttttacttaatggtagaggtgagatttaccgtcagcgttattcgctcttttgttaatgtaaaagttttctttgcaaaacaccaggtctaaccgacccgattgtgctgcccattcgtcctccggagcaaaacacggcagaagtgttgatggctgagctggacaaacttggccagtcggatggcgatgaggatgtgcatggtggagggatcagcaaacgttctttgttgctcagcgagccaattgaagtggtcgtcacatgtatagcacctccggttggtgcggcgccacgtttttaccaataccagcattggggttatgacgaccggcagctgatccgtgtgatgaatcaggacgacaacttttgttattccatgcacttgttgccactcgtgcgtacacggatcaggaatttttaaaggcaacttcgcgacgacaagcccgaacaggggaggatgatagtcttcaatgggatacggtgccagctgagattgcacaacgggtgataacgagaaaagacttttgtgctggctacgaagcactaaaccgtctggtgtccaaccgggagcggatgaacgcagcagtgacggagctaatgcaagctgcaggaattccagctgaccaagagtcgtatgggatggagcatatcgaccaaattcagcagttttgggttggttgttggtgttagaatgagtgctaaacggtagttttttaaaccaaacaggaccaaaactacgctggcatatacagaattgtgctgtttgaggatcactccgaagagttgcctcgcccaatttggaagggtccaatgggacgccgcctctgtgtgtcactgtttttgtcggatgggcattattatggtatcaaaaagatacattgctttttcaaattgggtcgaaaatattgcgtggactgtgaatgtgtttacacccgtgacactaagcacacaatttcatgcaagagtcgctgcccacaatgtgctaaaggttggtatttgtgtttgttgcgccagcagatggccaatcgttttttttgaattttggttttatgccctttatttccttcttgatccagttggcccccagtatccatgcgttaggcagcaaggcgtgtgccttcattgtacccgatgtaatcgctttttcttctcccgatcatgctttgacggtcaccggggcagtcagacatgcaatttgttgaagcgctgcactatttgcaaccgaaccttccagcaggaccccaagcgtcctcataaatgctacagcactttttgtacacgttgtaaggtattgcattttcgccatatcagattggaaataaacaaatcaaaattaatgtgattaggtgtaccatgagaaggatgctggttgctttatcaagaaggttgtggtaccgaatgaaaagcaacagtaccgcatcgtgtgctatgacacagaaacgagattggacccattggaagaggcagggcagcagcgtcataaagtaaaccaactttcagttcgtgttacttgcactgagtgctgtgattctgaacgtggggtgcggacaaattgccaaatttgtatttcggagtatggaacaatggaacgaataaaggattggtatgctgttcattaa

SEQ ID NO: 74831 - DNA, 1072 bp, Heterodera glycines
atgctttctccattctcctacgacccgttctatcgccgttcgttgttgcctatggccacggttggcaacgtcctttcgcccttccgccagttggagcgcgaactcgaccacttctttgacgggatgcagcccatggtgggggcttattcgacaatttgccaaaatttcaaattcgtttatcatttttgttttagcttcgtgaccacgccgctcagctgaacgtcacggacaagggcgaactcacttacaaagtgagaaggcacagaaattcaccgcttttcgtggctaattttcaattccatgaaattttcaggtcgatgtcagcggcttccgccccgaggagatcaacgtggaggtgattggtaatgaaatcatcgtcaatggggaacatcgcgagcagaacgacagtgagttttgccattgttcgagtaattttatcggggttttggattttggtgagacaaatttcagggcttgagtgttaatggattcatttaaaatgcttttcggaaccatatttagccaatttaggcttacatttagcgaatcagagaaatatcgagaaacttctttcaatttggaaaatttatgtccgtatttctgccatttatggccttatttttgcaaacccttgattttttacgtcccaaaatacctttgaatggatttttcgaaacgcaaaaatattttttttcgggtcgggcatattccgaagttatgattgatttaaatgcaataaatgtctagtcataatgctgtttttcgatgattcgttgccccctccacctcaggcgaatcggtccaccgtcagttctcgcgccgtgtgctcatcccggagggcatccaaaaggagagcatcaagtgcgagctggacggcggtcgcttgtgcatctgcggaatgaaaacggctggcgaaggcggacgtaccatcccaattgagatgaagaagaaggcggccgtggaacatcagccgcaagtggagaagaaatagagggggacaaatggagacgacggaccgatcgatccattaatatgggtctcctcctttggacattttaaattattttcaaca

SEQ ID NO: 74832 - DNA, 63 bp, Heterodera glycines
atgtccggtcgcggaaaaggaggaaagggacttggaaagggaggcgcgaagcgccataataaa

SEQ ID NO: 74833 - DNA, 985 bp, Heterodera glycines
aaagcattgaccgtgtccatttttacgccatacctttccgctagttattttatggtccgttttttgcacagggtacaacatgaacatgcttccctgggacctgaagccggtccaagacttcatcggcctttggcaaatggaccgcagcagcggaaacttcaaagaattgccgccaccaaatttaattgacttggccatcaatccaatcccgaaatttggagcacggacaatgaacattacgttggtttatgatttttaaaagccgacaaattcaaaaacccaaggcacacttacttggactcggcccgaaatgtcatccgaagtaagcaaacaattacagcttaataaatgccatttcgcttacacacattagcttaaggtgattacggcttttatgccagtgaaaaatgccacccgaagggacccgcggggtgcacgtggcatatctgacgacgagcagcgaaggtaaatcggggggtgggggggggtgatcattcaacggacaaatggacaaatgattgaaggatggtcgatgatggagcagggcttcttcaaggacggcaaattgattttccacctcaaacagtgagtccaattggatgggaagtgtcccatcacgtcgaagccattcacaacagattcttgaaacgctcattcggtgccgggagcaatttggacatcagagaagtgagtggagaaaaagggacaattggggggggggagaacttacggggactcaatggaagaaggaatatttgtgatgcttttgcccaaactaaggaatggcttttcaatcagcaagtgatctctgccaaatgagtacccttttagcctcaattaaccaaccaaagatgggcaaatttaaagttttgttcagtttgagcgtcaatttgaactgtccggcttccactcgatgacactcaaagtgcgcgccgaaacatcttttcagacggaggcttacacagcttggtacacaaagattctc

SEQ ID NO: 74834 - DNA, 830 bp, Heterodera glycines
atgtcctcctcgacaaatgaccccgtgtcggagtttctcgcccgtgaacaatcggcgctcgccgacctcggcgatgactttgtcgctgctgtgcccccacctcagaccaacaacggtttcatatacattggaattaattgagtctttttgagcaaaacaatgcgaaattaaattgggaagagattttcttgaataaaggcctcccaaatgatttttctgtttaattcattttcagatggaattctgctgaccaatggtggctcagattttggatccattgcaaatttagactcatttgacgcaaatgaacccaaattgccggtcaacggagtaaacggttcgttttgacctatttttttctttttgactatttactatgaaaggaaagggggaaaatggtattaaaataacaaaatacgtaatcatttcgtgaaaagatattttttctcactttatctaaattaagccagtgatttacaataatttgtgaaatttgttccccattttaaggatcgttgcgcggaagtccgtccttttcccattcgcgcagccaaagccaacaactcgaagaggagccggagaaaattcgaaaatggcgcgaagaacaaaaggagaaaattgcggagaaaggcattgtttgaattgccatttttaaggataaataattatttaaataaataagtgcttaaaaaagaaaatttgattcattttaagacaaaattgaggagcagaagaaggaggaattacgagagcaggccaaaaaggagttggagcagttctacgcccagcgaaagaacgaattggaggaacggaaaaagatgaatcggtaa

SEQ ID NO: 74835 - DNA, 464 bp, Heterodera glycines
atgaaaaaatatgcatatgcatatactttcgacgtggtgcgacttttggggatatgcaacttggggaccgacatttggggacccgacttttgggacccgacacttagggaatccgacattttgggatggggatcgaacgtcttttggggatcagacatttggggaactcgacatttggggaccccgactttggggattttattaaaataaaaaaatatttaaaattttaattttatgtccaaacttagacaagtttatgtccgctttagtcagagttaattccctttgcaagaaaaaacaaaataatatttttaaaattaactctaattccggactctaagaaacagaaaatatgacctcggcattttgttgctgtacgcaattagacagtaaagtcgcctttaactttttgaatgcccttgatgaatttctgttcccgttggcccttgggaaaggcgttttaa

SEQ ID NO: 74836 - DNA, 1891 bp, Heterodera glycines
atgaaattcaaattatttattttttcttattgtttcattttattttatgcacaatcagtgccaaatgacaattttaatgaggtattgcacaaaattgtaaaacatttgaagacaattttagggttctccatctgctgatgagcaaccaaatcaaacaccgttaaattttgaagaaaagaacccattaattgaatccaatgaaacaggaacggcaaattgtaaattgaaataattaaatgcaattttttcagggcattttttagagctattaggattgcaaaggattgggatttttaccggggattattccataaatgttgtattctttttttgtccataatcccggtccttccggtgattcaaaaaatttcttttcatcccgggattggtgttgaaaataagtattggtaagaattggctctaaaaataagtccaaaaattaattgggcgggggggggtagttgagaaaagtaaattctataatcatattcaaaccataattaattaaattaattatttatttatttattaagaagaaagaaattaaataattttagggacaaaaatttattcgaatgaacaaaaacaagaactaattaataaattccatgaaagaaggagtgaaattaagaattgtgacaagaagacatacaataaaatcgaagaagaaattgcgaaggatttggacgtcagtcggcacaacatttacaaatggaaaaaagaattgggactttcaagtaaatttaattttatattatttagatataaaaatttaataaaaaataaaatgaaatttatcgtatttattcaaagaaaacaaaaaatagaattagtgcagggattgggtctgttctgatttctcagaaatgttctgatttttgtgggtccaaatcagtgaaattaaaatgttaagatttaaatttatagttttttttgtccattttgggcaaaaatctgttattaaactagacaaaatttcaaaatttttcggcatgcgtctgttggcaccgcaggacccacaaaagcgttatttctggggccgggccataatttctctgattttttgagccctattgcactcaaatatatgaagtgcttatttcttccccaaaacgccaaaatcttattttttgggcacgatattctgattttgaaaaatttcgatccaattcctgatttaagtggaacaatttcaaaaaatgaatgaattcaaaaatttaaaaaatattagtaaaatcaaaaaaaaaacaacatcaaaagatttgggtattcaaagcccttttcgtttataaattgaaaaaaattatgatttttttggcaattaataatattaaaaaaacagttttattattttaggtagatgcaatatcaattatactaaatttagtttattattattttggcataggaatatacatttttaataaatatgattatataattattttaggtgtacgtaattcccataattattcgaatgaagaaaaactaaaactcgtccatcaatttcataaaatgaagaccgaattcaaaaaggatgaaaaaataaatacatctagtaaagtcgaacatgcaattgcaaaaggattgggcgtcactcggtacagcatttacaaatggaaaaatgaattgggagtttcaagtaaatttagttttttatttaaaataaaattgattttgcaatcattgtaattatttacgtttaggcataggaaaatgaaatataaatatgacataaaactcgaacatagaaatatatatcttttacaaatacgattatacaaatattttagatgaattccgttgttcccataatgattcgaaggaacaaaaactcaaattcgtccattcaagtagatttattattatattaattattcttggcaattaa

SEQ ID NO: 74837 - DNA, 1692 bp, Heterodera glycines
atggcaattcggagctttcttggccccgcttgctgttcaccaactggcgccgctgtattgctgctgatttctggcttggctaataccgtatcattggcctccattgccacgggcaacggggcacgccttggcatttttcgtccgacacgcagcatttcatatgacggacaacaggaggaggtactgtaggtgcctagtctgagtacaaatttttgttattcatttaaatagaaaaaacagcgggaggtacagtatgattaaaaagaattagtcattgttctacacaataatataagtcagggtgcagttagtcatgtagatcaagttaaaatggtttatttatttatatacaaataatacataaatccgtatacagtaacttgtcaattatcatattttatttgcaaaaagcaaagaaaaattgtattgtttagacattagtataacatttatttcaatacggtactgtagcttgtcaattcgtatattgtattagttaagaagaccacagaaaaatagagttgtcaaactttagtattcatttttttatatacagttatatatgaatcagggtacagtaacttgccaaatattacattgtatttgcaaataccaaagaaaaatagtgttgccaagcgtttgtataatgtaccgtatactaaaaaaaaagggttctaccttagatttttagggtatacaaatcaaatgcgaccagttatatgattaaaatgctttagacggaatatgaagtggagcccggctttgaaaagcgttcaatgacgcttggccgtctgtcatttcggcctggtaaattttttttttaatttttaaaaaatttaaaaaatgaaaattaggaaaacgttggtcctttcccgtctccggtgcttatgcacacgatcggcaaaacagacgctatgatttgttgctgctcagtgaaaaacagccgtcatatggtttggcaccgtctgaagtggaatacaatgtgccaattcaagccaagcccaatgtcgtccgtcacatcaattttcggtaatggaaataattaattaaccaattaacgaaaaatattcccattaattaattcatttttaattaacgataaaaagtacctttaattaattatataattaattataataataaaattacattacttaattatttaaaaaacaatacaaatatgaaattttttttattaatgctttttaaatctctcagtacgatattgatataacaataaaggaacggtcaaaattaacagtagcaaaaaattaattggaattttgaataaatttcaaaaaacaataatcgaaaattataaataaattaaataaaatgagtgcattttaatatgtacatttttcaaacattaatcattttcattttatcaaattaattatttattaaaaaattttaaacaatttttaaaaattattattattatttttagtcttctgcccgagactggaaatgagcaggaaaatgatcttgccgagattggccttcgagaatctgcaatgggcaaacgaacagccgcattaggcaataaattaaaataaaattttaaaaaaataattttaaaaactttttcaggccgagttggttttcgacccggaaagcgaagcatggctgttggtcggacaggctttcgtccaggaaaacgcagcattgcaactgggtaaaaataataaa

SEQ ID NO: 74838 - DNA, 1818 bp, Heterodera glycines
  unsure (1)..(1818): unsure at all n locations
atggcggagagagtggaggaagcggcggatgagggcgagggaggcgaacatggcgagggagagggcacgcccgaggcgccattcgttagccgaggcattgaaagcatctgaagagaggggggggggggtgagctctacccccccccccccacttcaaccccatttgattcgaaactccatggaacctagcgaccttcctttgttcgacctcattcttaccaattttgttttcaccaatatcctattgggataatgaaaagtcgggaggatttgttttttaaaaaccgaacacttaaccggactatggctgctagactaattaacctttatttttttctttacaatttgccgctcctgtttcattggattcaattagtggcttcttttcagagtttttcggtgtttgttttgatggcccagcagattgtgaatcctaaaattttgtaaatgtcttcattttctaaaagttgctttcaaacctcattaaaagtttcatctggcactgatagtgcataaaacaaaacgcaaaaatataagaaaaaataaaaattatatttcatcttaaattataaaaattagttttgaatttttttaatatatttttataatattattcatgctcataataatgatattaatgaaaaaataaaaccaattaataaagcaaatcatccgttatttgttggcaaattgaaatacgcctatttctgaatcaataaatccataaccacagaaaatttttatacagctctggcgatgaatacactgctaatgtatatattttttaaaaacaaatttacattaataaccggcccatatattttataattctcaactttatataaaatttagaaaaaaaaattgtaaattaataatgaaagattttatatttaaatgggttttgtatagaatttcaaatttgcaaaaaaatggaaagaaataaatagaagaaataatggtttaaattaataaaaacaaataaatactaagggattaatatgtgtaaaaactattaaaaaaaatgatgcaataaacaaatattatgagggaaagggatggacaggaataattaaagcaaaaattaatatttaaaaattaaaaataaaaacggcaattcggaaaatataaaagtggatttagcccctttgaatttcattttattcatcttaatctcataaaatgaaattgttttttatgcatcaatgcccagaattaacaataattgatcgctttcagttagaattnggaaaaatatttaaaaatgcccgatgcttacagaaaaataccttttcatgatcgctataagttagcttaaatttagttttccaaaagtaatgaccatagacacctaagatgaggggttagcacctattttggcgttttcgcactttttgtacctattttgacctttttcttgaaattccaaagcaaaaaaaaacgaaaaatacacccctaagaatcgatcccaaaaaatttaaaaaaatatacccctaagaaatgaaaaattttcccaaaaattcgtaggcaaaatttatttatttaataaataaaaatgactatggcgctcaattgtccaatttaaaaagcaataattttgattttttaaaggatattaaaatgaagaatttgtcattgtacagcgtcttaatgatgattttgcacattttaattggtatgggcatgcttttcatgatggtggcaaatgggcaatgcatatttaatgagaaggccggtgcttgtgacagtattggttgcccaggcggagcatgtcttcagagtggcaaagaatgcgcttgctttttcggaatgcacaaatga

SEQ ID NO: 74839 - DNA, 241 bp, Heterodera glycines
atgaaatataatttttattttttcttatatttttgcgttttgttttatgcactatcagtgccagatgaaacttttaatgaggtttgaaagcaacttttagaaaatgaagacatttacaaaattttaggattcacaatctgctgggccatcaaaacaaacaccgaaaaactctgaaaagaagccactaattgaatccaatgaaacaggagcggcaaattgtaaagaaaaaaataaaggttaa

SEQ ID NO: 74840 - DNA, 658 bp, Heterodera glycines
  unsure (1)..(658): unsure at all n locations
atgggcacaattggctggagcaagtgcgcacagtgccgagaacggcgaaatggtccgatccctttgaggtaattggagagaagttggagagagaactctcagccgataactctcgaactgatcgcttcaaccatntaataatgggtttcgatcccataanattccggcgcggcgataccttcttgtccaaatgggcggtgtcctcccgactngagttctgaatttgtaaattcttagaccgntttcgngcacttcgtcaaccgcgttcgtagtcagttgtgttccgatggaatttgcctcaaactttggtttcgcgaccaccaaaaaggtaactcaaataaaattgaaatagttcataagttcactcacattgaatttcattgtttaaggcggagatgggcacgtgtggcgatggtgtgccaaaaacgcggagggacgcctaagggcggactgtacgcacatcaaaagcagcaaaggtgaagcggaaaagctattaattaatcacataattagaatatataaattaggggaattggaggtatgcacgtgcgaaggcaatttgtgcaacggttcggcaaagacagcacaaaacgccgcagcaatgctttttttcccttcggtggctacgattgtttttttcattctatgaattaataaa

SEQ ID NO: 74841 - DNA, 1028 bp, Heterodera glycines
atggcatgtggcataatgggtacgcgtccgactacatttttcctagcctggttcaattccacgctatgcaaattatttttcccgttttatttttgcattttacgcaaataaattgccaaggaatctagcaaatttagttccgaaactccacggacagctactagggaccttcctttgtaagcaaaaaataatgcgggatattgggaaaagtaaaactatttacaatgagaaaatataaaataattaattatatcataataaccagggaacggatttttacgctttcaccttttttctttttgcgaatagcatatggtgagataagcgcataaaacacattttcttcgaacaattttcgatataaagcgactttttaacaactattttaacatttttgcttatgaacaaaaaactttttatcaattaggaaaaatgcattaaaaataaataaaaatgcacccctgagaatcgtttttttttcaaaaatacgcccctaagaatcaaattttcaaaaaaatttattataaatacatccctagcgatcgagttttcaaaaagcaaaaatactggccatgattttggcggacttaaaaatgtttgatttataattattcaaccgaaatggataatgaatgaatgaattttggaaaattcacacatttattgacatgtttttccaatatggttggcaactttttagcaactattttgccattttaaattctataattatattcaaaccataattaattaaattaattatttatttatttattaagaagaaagaaattaaataattttagggacaaaaatttattcgaatgaacaaaaacaagaactaattaataaattccatgaaagaaggagtgaaattaagaattgtgacaagaagacatacaataaaatcgaagaagaaattgcgaaggatttggacgtcagtcggcaaaacatttataaatggaaaaaagaattgggaatttcaagtaaatttaattttatattatttagatataaaaatttaataaaaa

SEQ ID NO: 74842 - DNA, 3007 bp, Heterodera glycines
  unsure (1)..(3007): unsure at all n locations
atggtttgacaaaatggcagatatgggaacccaaattcaaacatctcgaaatgaacttaaatcttttcaagaagtagagaaatctaaaaacacaacattatagcatgtggcaaataatgacatgaaacaagcaaagaaatcagccgacgtcgcaaagggaattgccagacatgcaaaaaccaaatatacatcaattctcgaggaatataatgataaatcagaaaagggttgtagcggaatggtggataggcttaatgaagcactggtgaacattttaaacgtaaggatattgaaaataaagaagtgccggaagctgaaaaaggaccacaaacaaaagagagattagccaatgaggatgctcaatttcaatatgatagcattgaccaaaaatttattgtctatctattctctgccgtctcccacatagatttgtcaaaacaactcgtctatgtgctcgtttttatatttcacgcggaagaggcgatttatatgccagctttgacgggtggtgtaagtcagctatacatttatgcaccaaatttaatagaaaacacaattatcggcaaccagatggctccacttttaagaattattaacgtcgtcaatgacccaagatcgattagtgaagttatatatagcgccgagtactttcatcgtctatttgaacgcgactaagcatctataaaaaaaataaaaatatttgtggccaacaaagtggtattttgctgccacgtgaaaagaaaaatgggtgaaccaccaaagggaccaccgagggaaagcaaaggggccaaaaaaagggggaaaaatggccgagaaaatcaaaggggcacagacgggccaaaaaagggcggacagtggccgacggaaggcaagtcggcacaaaatagccgcaagtgggcaattgccgagggaaaagcaacaaacggcaaatgggctcgaaagggccacaagggacaaatgccgacgaaagccaaggaggcacaagggaacaaacccaaaggcaaagggaaatgcaaatgggcacaagggggcccagggaaaatgcctgaggaaaggcaaactataggcgaataggcacaaaagggccacaagtgggcaaaagcccgcggaaaagcaaatgaataggggaaccgctgcgcggagtcccaaattagcaatggaaaagcacaaaaaaaggggcngaaattcggaaaattcgtttatttttggagcaaaagacacaggaaaagcgatggtttgttgagtcgttggtatcagcaaaaagtgaaaagcagtgctttttgcatcgtccgttcgttcttaagtagtggcgagagttgggcgggcacatcggggcgagtggcgagagttgggcgggcacatcggggtgaaggcactgtagtaggcaaagcagccaatcggaggagagcaaagtgcaacagatgaagaaagggaggaggccaaaaccttgcacgtgccgtgccaatttagttgcgatggtgttcctgtgagattaatgcgagaggggaagatgggacgggcctggcccagattagttgtttatgataacctagagaacgtgacaaaagatgaaccaattaatcccccaagaaatatttttgccaaaattattgcataaattaatccccaaaaatatttgttgctaataccaaaaaattttgccaaacattttgatactgtcgtagacagattccccccgccgcacggctcaagcagatagggacgacgcaactgccccttcattttcttgcgctgttgggggcactggcgggggtggggccactgcttcggggtttggagctggccagcgacggcatttcaaccagaccaaccggaccgatctgcacctgtggtccctgaaaacaagatgggccgggcgccagtgcctgcccttgattagccttagggcgggaggcccccgaaccgcccttagcacccgtaccccccttggtgcggttacgcaaacgttttccccacccttgttagcggcccccttaacttgctgcccgattttgttggcagtcagcaacaccaccatacgctccatcagatttcgctgaacattcgccacacgcagcaactccgagaaggtccaaatgagacggtgatcattttgtggagtcggagcaatgttcggatggcgaggttcaggctggccggtcggtggacatgcggaaggcatcaacggcaccgggtgtggcggcgcgcagcagatcggcagggggccggggacaccaaatcgggggccgggtggcgacgtggccggctggccttggtgcgaaaagggggcacccggaaaggccggtgccattaagaactgtccatttgtgggtggaccagcgatgacgtatccatcggttggatacgaggccaccatgtatggccgcggaacactgggtatcgcattgttgttcatcattttggggagagtattcagaattgtaaaggaaatttgcctatttttaagagaaaagaaaaatcaattaaaaaattaaaagtaactgaaaaagaaagtgaaagaaaaaaggggggggcaaataaggcaattaagctgggtcacatcgtgcgggcccaattacggcctcttgagctgcggaccctttctgtccgatttctcggtggcctatcatcaccttgcctttccacccccgtgccaattcgtggtaaacaacaaacagcggggcagaacatagggcaatagcgaatgactaacaaaaaaatgaagagccaggccaggccaacggtcaccgcgaatgtggcatgtggtaaagaccccactgattggaaaagcgcaaattgtatttgcggaaaagcaatcgactcggcacttagtctctaccttgggatgggaccacgaaagaacaacggagtttgggtgtcctttgggcgtacaccgggtcacccattctgtcccatcggcacattcaacacttgcaaaggactctccccgggaggaagtgcaggtgtaattgaatctccccccggttctacaactatggcaacctaa

SEQ ID NO: 74843 - DNA, 448 bp, Heterodera glycines
atggtaatttacatgatacatataattttttattaaattaaaaaagtaaaacgcctttgtgaaaaaagaatgtagacaattatatgtagttagaaatttcatttaaataaataattatgtaaatttacaaattgataatctgatgtgctaatgcttgggcatttaaattaaaaaagtatattaaataatttaaaaaatttttttattttttatatagcattattatatgtatgaaaagaaagataaaataaatgtttggtttgaatgggtaggaaaaagcgaagaaatgagaaaggaggaatcgattgtatgggagcgggaggaggaaatgggaaatgtggagcaagaagaggaggaggagaaggagcaggaggaggataagtgaggaaggaagaacagcagcagaagaaagagcaaccgcccaatgaatgagaatggggaaaataaa

SEQ ID NO: 74844 - DNA, 2846 bp, Heterodera glycines
atgatttctgctaatggtggcagcgccgccaaagtattaaaatgtctgatgtgtggccagtcggagtcacgcagcacgtttatggcacatattgcagaacatttgtaagagcataataattaataatgactaattactgtacccgaaaatacagtaacccattttttaattgaaatttgtaggaattatcgacctcaccaatgtgccgaatgcgatttccgatcagtgactgctgaacaaatggctgaccatgaagcaactactgaacatgttggacagttatacgtacgtttaattggttcaaccattaatactaatatgcaaattgattttccaattaattatgcatcatttgtattaattaggcatcgcgcaatccctacttggaccggctgtgccgttttgtgtacaacgactgcgattttggggacaaaaatgggggtctcgagaaagttttgatgcgcaaattggtcagcacagcggacgaggagcagcagatcatccgccaagcggttggcacaatgatgaaagccgaagaatggtgggatccatttttgtaaatttatatctttataatgtcttggttacggtacctttgcctttaggttactgtatgaaacaaattttaatttttttttttgactgccaattaaattacaattaaatttagcctaggcctagcaaactaagattaggcctaagcctatgcacgagttgccttttgtacgcgttgtcatgacactgaattgggtgctcaattcttatacatttttgtgccggatttagtgccaaagtgaacagtgccattgagtccgcaactgttggcggtgatcaacgcgttggacaaactgtacaacaatggcttcaacaacagcagcaccaccaccattttgatgctgccgaccaccagcaacaacagcaacaacaattctatgtacagtcaacatcatctaccgtaaccggcaacaaccgtaacagcaacaacaacagcagcaaccaatcccagcagcagcagcaacgtgtgtccagtgacgagttgaagctggaacaactgttgatggacactgttggggttggaggcggagcagttctcggtgcggtggccaatgtttcagcggctggcggtggtgccggtgttgtggcacaacaattccaccaggcatggcatggagaagagatattttccttttcttctgaacttggcatagaattgtgccatctaaacctgtttttgtttcttgcaaaaaaaacatttctaagtttttaatttaaacttgtttttaatgtgcaatttcaaaattctcacctaatccgaagctgggctaatagaaaatttcataaaaaatattttaacgatttatttaaacatagaaagtttcagaagaatctgcgttaatttgccatttaaaaaatcaaataaataaatatttttgaattttgtcattaattttgctttaagaaatttttttctaaacctccccttttatgtatatgcaaaaagtaccggaaaaatttttttataaattattgtgcaatttgagaaatcaaattccttaattgccccaattttatcttaaaatagattttgaattttcatcatttgacgcggatttaggcgaactttttgggggatgacattggcgctgcggatgaacaacagcaggacaaatcgccatcagcaaatgcgtgcagttcaatgcttcaacaatttatcacacaacatcaacaaccacaacagcaggcggtgagtgatcggaactgtgccgtggcattggcatttgttgatatcaattgatcattagtgatcaggatttaacaggtggcagtctggtgacagtattttcttgaaataaatttgctggatagacagactataagccagcagtctaatcaaaattttaacaatttttaatttttttttatgaatgattgctttcagtaattttataaaaatttatttttagaattatttaaattttttgttgtgcataaaaattttttcataatattttaatttttaatgaaggctccagtaattttttaaaatttatatttaaaatttatttaatttttgttttaggcgtggaaaagattttcataacttttatttaattaattaaattatcaatttgtttaaatattttatcatttacataatatttttataaaagtttttaaatatttagaaaaaaaatttccacgaaagacatttcttttaaacaaattttttaaaatttaattaataattttcaactgaaaatttgtttaaagttgatgacacaacactttgacggggttgtcgagcagtacatccatggccagcagcagccaccgccgccgacggcgccgcttcaattggccaacggtgaagcacatggagaacaacagccaaagacagtgaaggggcacaagccgtgcaagcaggtgttcgagaatgtgcaggtggggaaaatggaaaaaaaaagttaattaaaaaataaaaagtgaaatattatttaattttaattttaacatttgaaaaaaaatgaaaatattttttcatttcaataattgaaaagaatattaattaaaatggtaaaatttaaaagaatttttaaatcaaaaaaagtatatattaaagcataaaacattttgataactattaagaaaaaataataataagcataatacctaaaatgaaattaaaatagaaaaaaaaaatttgctaaaataattaattaaaatcaaaatatattatagtaaactaaactttttcaataaaacaaaataaatattttacagtgtttgaagtgtcgtcaatgggtgaaaggacgtggcatatgccttttgtatcacatgaatacaag

SEQ ID NO: 74845 - DNA, 476 bp, Heterodera glycines
atgaccagtgggcaaaaagtggttactgaagcaaatgaaattgtacattgtgctccacaaagacccgatttgcatgctgtagcacgtattcgacttcaaacggacgaccgtcggggatttgagggtcggccatcagcagaagcctcaacttgcccagcagagtcagcacttcgacaatcagttctcggtattctggctcagcaatcttcaaaagtcaacaaatggtacccataaattggtcagtattcataaaacatccatcccacctggttcaatacttgttcgacctgacaatgaatattatttttaacagtgttttttcattgttgtgtttacctgtaatgcaaattttatttcgtttcgggtcatttcttgggtcagtccataactgagaacaatcccatcaatcgaaattccatgtggaaacattcggacggtatcccaaaggttctaaagttgttccattgagaaataaa

SEQ ID NO: 74846 - DNA, 2202 bp, Heterodera glycines
tccgtcggacagtgaagattcgttggccggtgaagagtttcagttcggcatttggctcagacaccgacgcatcgacggagcactgaacagagtgccgtccaatttttatgcggttgtcctcgcacagacagcggatttatttctcaatggaacaactttagaacctttgggataccgtccgaatgtttccacatggaatttcgattgatgggattgttctcagttatggactgacccaagaaatgacccgaaacgaaataaaatttgcattacaggtaaacacaacaatgaaaaaacactgttaaaaataatattcattgtcaggtcgaacaagtattgaaccaggtgggatggatgttttatgaatactgaccaatttatgggtaccatttgttgacttttgaagattgctgagccagaataccgagaactgattgtcgaagtgctgactctgctgggcaagttgaggcttctgctgatggccgaccctcaaatccccgacggtcgtccgtttgaagtcgaatacgtgctacagcatgcaaatcgggtctttgtggagcacaatgtacaatttcatttgcttcagtaaccactttttgcccactggtcattttaatgtttagttcaaaaatcaatcactttaggcagaaatgggcacaattgtgttagagtgctgtggcagtgggatcggatgtgacggtgcccgtggaatttgcaggcatttttacgacacagcaccggcaggcgaatttggcaccgttcattatataattcgtgctgcgatggatattttcgccccttcctagtcacactgcttgtttcatagatttattctgttttcgtaaacaaattgcatctttagccgataaacatttactattgagtcaatcaattttcgaactttatttggtaataaaatccacaaaagacaaaagtggttcgtcgttttgtttcacttagcacattcattgatgagtgtttttctgaactccgtcagaaggctgtccgtcatcagctcagccatgaaatttcttaggtttttgttctttggtacaattggcacattgttttgttcagacaacaagaagcgattgacatcgaccgggagctgttcacctcgtgcggtttcagcgtggaccaactgatggaattggctgggttggcctgtgcccaggcaatcggtgaaacgttcgaaaagggtaccttgaccgataaattaaatttacttggtcacctaaaaagtgcctttccttttttcagggaacgttctcattttgtcagggcctgggaataatggcggcgatggactcgtttgtgcgagacacttgaagcattttgttcgtttttatgttatttgttagggcatttcttttttgggcaatggtaatgaaaatgttaatcaaagacggacggagaattaatttcccatttgaaagggttaattttaagaaatttaagggattttcgccttcgattctctgtccaaaaccatcacaaaatgatctgatgcaacgattgatggtcaatgcttttgataaatgacgaatcagggctgcacgaaaacaattttttaagaaaatgaaacgaaaaataataatttttcacgaaaaaaacgaactaaaaatttactaaaacgaaaagatttcgtgcagctctggtgacgacgaactgatgtaaaattatttcagcttcaattggaatgcctcggcattcccttcgtcgaatcattccctgaccccaattctattgagaagttcaacttcctcgttgacgcaatcttcggttttagctttcgtcccccaattcgggagccattcaacaaaattttgaagcaaatggaaagtgtccaaaatcgtgtcccaattgtgtcaattgatattccttcgggtaaatttgaacaaccgacggatttgtttttaataaaaggtcaacccaaaggttgggacgtggagaaagggcccccggatgaaaagagcggtttgcccattctgagccctttggcactcatttcactgactgccccgaaacaatgcgcacaattttttaaaggagaatatcattttttgggaggccgttttgtgccacctgcgtaaacttttaacaattttttcttgtgaaattgaacatttaagcttggtacagaaattcggacttgaaaatatgccaccatatgaaggatcttcccaatttatgcgtcttaat

SEQ ID NO: 74847 - DNA, 401 bp, Heterodera glycines
atggagcggaaccaatttccagaagataatccggcttttgatgcaccggacaagcaatcgcttgccgaatttgtcatcattctgacaattaggtaggtgttaattactccgaaaataattaaatttaaaaattaactaaatttaagaggcaataatcaacaatttaattcggttctgcccccatcaaatcgaacagcgatggcatttgtggaattgtttgagcgaatccaacagatcaccgtttcgcaccagaaactgatttataaggcattttttaaatcttttaatttgattttttacggattacggtacaaaaaaactttaatttgatatttttttatggattacagtacaaacaatctttaatatttgcgtaaaatttttttaaaagttttaataaa

SEQ ID NO: 74848 - DNA, 726 bp, Heterodera glycines
atgtattcgcgttcgccaacgccgaaatctgagcgacggcaccaaattagggtttgttatcccatatggaaggacttcattatgatttagattcgaatacttagtccatttttcaataattttaatatttaaactaccgtaataaaatatgataccattgaaaattttgtctaaatttaaaaccattctcaaccccagttgaatagtcgagatgataatgatggcatcaacaacaacatgaatattaatgcttgtggtggaacaaacattagtggagagcaacaacaagctgctgctggtcaatcaaaccgaacatccgtttaccaccaaatttgtaccattaatggtcatgaaatgatgacgtcatcgtcaacaacaaataatgaaccgcaattagtgacaaataataattacccatgggcattagctgaaccaggaacaggtggctgcagtatggcatcagcaaatcagcaaatgatggtggcaacggagcattttggatgtgcatcggcagaatcaggcatttcggcaaaattaaaaaacaagaaaatgctatggatatccctggatttggcggaatgttttttacaaaaaaaaaatctctgaattttgggcgcacaattaagattttaatattttggagaacatttatgcaaatggaactctaacaatttaaaattttcacaaataatttactgaaaactttgtggtggcaatgccaataaa

SEQ ID NO: 74849 - DNA, 1218 bp, Heterodera glycines
atgaccctcagcagttaattaagccggaaatcagttgtattccgcaaaagcgctgcatgaaaatgagagatgttgatgacctattagagaagagaacaagtggttgaaaagcagcttcagccattagcataatgtcacattaatactaattaatgcataaatttgactattcaaatgtttattaaaagtactgataactatggaaaccctaaataaatcgaaatgaggcgaacctaaaaaattataaaagaatttttgcattaaaaaaatattttatcgaaaaaaaaaaatatttttttgggaattcaatcacccataaacctaaagtgaggctcaccaaactcttaagggacgccaaaaagaagagaattataagtcgttacgaaacgagccaaaaattcataatgatggcgatttcgggaggtaataagaaatggaaaaggaagaattgacattgaacgaagcaaaagtattttaaaaaatttaattagttttttcatatttttgcaaaatattaattgcttaaatttgctacgtttttcactttttggcgatggctccttcgattgcattcggtccacaagatgcgcacgttgcggcaaatattgaaaacttttcgaatccgtgcgtatgcggtaccattaggctcagttcggcgagctgagtaaaacggtactgaatacgcgcagaaccgttcactttaagacaaatagcaagtgtcaaaaattttttttgaaaaattcagtggtcaccgaagtttacgctttcggcatttgtcgaagagtgaacggttctgcgcgtataaggcaccgttttactcagctcagcgagctgaatctaatggtaccgcaaacgcacggttttggcgactttaggacaaattttttgttgtctttgtgccaaaaaggggccttcattttcaaatgatttttgcctaaaaccaaattcaggccattttttaggttctttgctttttttttgcaattttatattttaatattttcagcaactgcgcacaatgcttggatggacattcttccctcttttgaccatgctcaactcggcctcaaattggcattactttcgccacgtttcgaacttttggtggacaagtatttcgatgacaaaagcaaaatgacggtggaccagaaatcgcaaaggcaattttgaatgcggtaagtttttaaagttttctcggttccaaaaatggcccgaaaa

SEQ ID NO: 74850 - DNA, 856 bp, Heterodera glycines
atgtgggcatcgaatttgggcttgaaagacatcgtacagcgattgttgaaggccggggcacgagctgaccaagcggacaaaaagggtaagtaataaatttttcccgcaaccctccattagtgcctcaccctttaataaagccccacaaatcgcgtggggttgaaaatgggaccatcactactattcccctccctttctgtgaaaatttgattttctgaatttttttagatttgactataaaaatttagaaaaaataaataaaatgtttcgttttactaatttttttgagagtggcgccgcagcccataggactgtggaggaatacttaacaatatgcacaatttaaacatatggactggcaacagcaggccgtaaattgaggcgtcaaaaattctccctcttttttttactctcggcaaattatccctacaaatattctcattcaaacacggttttttttgaactgaattccccagcttatgaagtatgcatttaaaaaaatttccatatcaaaaatgttgcaagaatttaaatatttttttttttcactgatttcaaattaaattaaggagacacggcaattgatattgctgcacgaaaaggacacgtcgaagttgtcaaaatccttcgtgatgctgcactgtatatacatagatatatatttatatataaatatatatttttaatatttaaacgattaatttttgtttttgaaagttttcagacacaacgaattgtgaccggcgcgggcgagagacaaacattgaaatagaagagtttttaaaaattgtttatttttgagtttacttttaaattactaatatgactggcaaattttatgtcgcaaaagaataaa

SEQ ID NO: 74851 - DNA, 1095 bp, Heterodera glycines
atgctagctgccgaatctggtagtttggagatgtgccgtctgttgatcgaggaatgggcagctgaagtcaaccagcaagcaatcgatggcacgacacctttgatgggcgcgagcagtgaaggacgcctgaacgttggtgggttgaataaattggaaaatcgataacatactacctgactctcttcattttcagtgatttatctcatcgatcatggcgctgaagtccaacacacagacgccgaaggatacaactcgctgatgcacgcggtgaagaacgggaagactgaagtggcacgacatttgctgaccaatggcgcaagcactgaccaagtgggcaccgatggtgggcacaacttcattcttttgatgaatcattacacaatttcccctccatttctaaggcaaacgggcacgggacttggccgaagaaggaggacttgccgaaatgatggacatttttcgcactaccacggcagccgaacgaacggaggcggaccattgaggggtgaaaatgatttttttaaatttttcactgacataaattaaaaaattcattttcagatagcaaaacgacgaccaacagcagcagcagatgacaatgagagggaattgcggctcacaaacaatcggacggatctgatttatattcgatcattttcatgtatgatgtattgcaaatgtattatcgccatgtatattttgatttgcttgtcacgctcggatatttgctgctctgattgtacatattgtattattgtgcctaacaacattaaatactcgataaataaattgtttgtccatcaattcttggtcattttggttttcttttatcgaagaaattacagcgagttctccagtagagttcattcgcatcctcataatttacaagggttgccagtattgcattcagttgctgaattgcgtccgcaaaatgaaaagatcaaaaaaagggcggcaccatctatagtactaccttaaattcttcaaatattatttggatattataaaaaattatatgaaattttttcgtaaacttttatttattaaaaagaaagttattttatttaaaaattttgaactttctttaagtaatga

SEQ ID NO: 74852 - DNA, 92 bp, Heterodera glycines
atttaacgtttactttgccttacatatgcaaatgaatcgcattcgcccgcaccagttaatctgctgaatgatctcaacattttctcatcagt

SEQ ID NO: 74853 - DNA, 1474 bp, Heterodera glycines
atgcaatttctcgcatttcttattgcttttgttggccttcttctcattgttatgcccacgccgactgtttcgcgcaccaacgccacaaccgagtcttttcactttcagcttgatcacactgatcagaatctcaaagtgcaggtaaatgaataatgaatgatttataatgatcagaaattaaaagaaaatgagtgattttacacagaaaatcgaaatggaagcccataatggaacagaagcggatcagaacaatgacagcaggacgaacaccactaacagcagtgcaattgctggacaaaatgtttacgatcagctgcaagcaaaaacggatgctgatttagggtaattaccgggaatgccaatctcgaaagtccaaaacgggagcgccggtcttcaaaaaaggggcataagagggcatgcaatttttggcatgaaatgggccaaaaagacacggttttaaacagaactcctaaatatactgattttgaagcatttttctttcttttaagggtcattaatttctttagtggaatgatgattttctttcgtgaaaatgatcatttttgacaatatttgttaaaaacaagaaaattagaaaaaaattttcagacagcgcttttcgacaacgtcgggcacaaaattccttaaatttcagcctaaaaatccacaataattgtcagtttttcgtgtttatttttgagtgtggttttttctagatttacaaaattctgctaaaaacttacgtgtttggtcaaaatttattagaaataccataatttttaaaaattttctccgctattggcaccactaaaggcccaaaatcaaagtcaaaaacgatgctccaaaattttgcaaaatattattttctaacaaatgattacagcgatcgtggacaataaaaaaagcaaataattgggagccgttttttaaaagttgttggtaatttccgttatgtccgtcccttttttcagtgtcgtcattttgtccgtgttcaaatggctgctttttgcgtgcattgggctcagttcgtcgtccatttgctgctgcgtttttgcagttggcaatcccctgagccgacaattgcctttcccttttctcgtgatgaatgtcgtcagtttgactgtgctcactttgtcaatgtttgcgatggcacttttgatgttccatggctttgtcggcactttgtctctgatcatttgtgcctcacttatcgctttttgtgccctctgttccgctgctgctggctatgtattgattgaacttgcaaagaaaattgttatattttctgatgattgatcgtacttttggcatcatgttttggcttttcgagataacgcatgcttcaattccttttcgcttatcgcattgtttttaagatcttgcatattttgacatattttttcatattatttctgattttgagcacagtcccggctttatcgtcagaacatttatttttcaaaatttaaataaa

SEQ ID NO: 74854 - DNA, 842 bp, Heterodera glycines
atgggaacaatcaatcaaattactttctttgtcctcctcctcttctcattggctgtgccggatgaatcggcaaatcacaccaccgcaaccatcgtcaattttactggaacgcaagatggtcagcagattgatcagcaatttgatgtggagaaaaatgatgggactgatcagaagaaggcgaatgacgggactgatcagaagaaggcgaatgacgggactgatcagaagaaggcgaatgacgggactgatcagaagaaggcagatgcaaagcctgctgagaggtaggttatctcatcgtcgacaatttccattaaaatcaccaaatttgccttttcgtgcccattttcccatatttaaatatccctcaccaaattcaatatccttaatgattttaatgatttatgtatgtttcagcctcatttggcccatcattggcggagttttgttcacaattattgcaatttttgtgtcagtcacgtgcttttttgtggcaaaaggcaagaaaattagcatcacgaagtgggtgctgccagcgtttttcattgttggcgttttgtctattattgtgatggcatttttggtgttttccgggtttgtcggtgttttggcattcattggcagttcggctctgatctgttgctgtggttgttgctcttgtgccggccttttgtttcaagaggattaatgcccaattcattatttttcattagaaatcgatcctaatgcaaaaaatttttattttcaaaaatcagcaaaaacaaatgtaattttttttctcttttttattttgacattcctatcgattaccccagattttcgcctatgttgaaaatcagattaaa

SEQ ID NO: 74855 - DNA, 496 bp, Heterodera glycines
atgccaagattgtttaatttggatgcttctagaaaaagttatggcgctgatcaaaaattgatcatttttatggtgatcaaatattcaaccaagtatatctttttatgtaaaagtcgtagccccattattcaaaattcaaatcagtagagaattttgtgctctttccagtggccttgcccattttctctagaaaaaatttcccaaccccctaggaatttcgaaaatttcccgattttcagtgtattttgggtgtcccggtcactaggaaggagtgatctgattaagttggtgtaagagacttttttgatcagcaccaaaagttgtgcaagcatgaattatttcaagtttttaaatgaactataagatagtttttcaggtttgagtcaagaatttttctggcactgtatttctctcacaaaaatgcaatttgtttgggaaatattaaaataataatcaaattataattatggtcaacaaatctaattaatagattaaa

SEQ ID NO: 74856 - DNA, 155 bp, Heterodera glycines
atgattgcacgtaattgccgaaaaaattcgagaccaatttccgaatgttgaccgactaattgcaaaacgaaagccgtctttgtcaaagcgccttaccgagtcaaaaaatctggaaatgtatctcatatgcaatttcaaccaataaatttgaagaa

SEQ ID NO: 74857 - DNA, 1553 bp, Heterodera glycines
atgaccaagaaagagatgagcgaagcattggacacatgggcacaagcacagggccaactgttcaatgtgagagaccgcgggggggggagggtgatcagaaaaggtggataattgaaaaggaaaagtgatcagaaaaggtgaagcatttgactgatcagaaataaaagtgatcagaaaaggtgaatcattttgtgatcagcagaaggaaaagcgatcataaatatgaagcattggactgatcagaaataaaagtgatcagaaaaggtgaagcattaactaaaagaaggtgaagcgatcaagtgaaaaattgactgatcagaaggcaaagtgatcagaaaaagatgaagcattgactgatcagaaggaaaagtgatcagaaaaggtgaagcatttgactgatcagaaataaaagtgatcagaaaaggtgaagcattgactataagaaggtgaagcgatcaggtgaagcattgactgatcagaacgaaaagtgatcagaaaaaggtgaaggattgactgatctgaaggaaaatgatcagaaaaagataaagcatcgactgatcaaagcgaaaagtggacagaaaaatgaagcattaactgacagtcatgggaatttgttaaaatgttgaatgaaatccattgcccctcggtgatcagactgtttaccttggcctgaaagcggcttatgagtcggcacggcaacaattggaccaacggcacgcggcacagatgcaaaaccaaacacaggtaatgaatgagttgatcatttaacaaccaaaatgccagattttttgaaacttttcttgtccccgaccggcaatcaccgaaagtctcatccccgaaaggtgtcggggatttaacccaaattaagaaaatcgttgactaatttttgatttggattaaataaagattaatttcattgatcagttacattttttttttggcattttaggcggtgcgcgaggcggacgccaaaattcaaacgattgccaagtgaattaaaaaatagaaaaaacgtaaacttttatgccattttcagcaaccaattcattacattagcggaggagaagcaacaaatggtggtgggttttcggacgaatttttctgagaaatttttcatgaaattttggagattttaaacattttatagggggatgatctagaaattatgatgaaattctgatttttgtcatttggaaagttttgaggagtttatacattttagattttcttgggcttagaagggaaagaggggtgccaaatttcgaattttcacactaaaatttatggcatttcatcggatatgccatttttaaatcagaatgcccaaatttgttgaacatcattcttccaggaacaaatggcaaaattcccagcggatgtgcagcaaacactgctccaatttgcgccctatccgtacaacaaaaagtgatgccgaaaaacgaaatggcacagaaaaagatggcatttttggcattttgtcgaaaaaatatgccaaaacaaaacaaattttgacaccccattttcatacttgattgttttttattggttatgga

SEQ ID NO: 74858 - DNA, 174 bp, Heterodera glycines
atgtcaattgcgttcagaggtcgaatggcggaggaggacagcggggggaagaagaaaaagtcggacgaagtcagtctgatgaggaaaaagtcgtgccaagaacaacaacaattggctgctgctgatcagcaacaacaacaacaacaggacgagaaggagggaccgttccgatcg

SEQ ID NO: 74859 - DNA, 1517 bp, Heterodera glycines
  unsure (1)..(1517): unsure at all n locations
atggaagaacagcggcgtccaatctgcgactattttgccataattggatatgatccggccagtggactgaaggttcttcaaaataggggctgggatttctttaattttccattggcattttaaacaaaaagtcaatgagttttttgcccacggaaaatttttaaccgaaaaaaaagaaaatcaaattaaatgtcaattttttattggatttttggataggaaattgacgaaattgttgataaattttgaatttttcaatttattaactatttttttaatgagttggggaagcgttttgttgagaaaaatgattatcaaacagacgctcaagcaaattttctgatgaaatttaccattttatatgtaccaaaaggcccattttaggagggattaaatttaatccgggtaagccgaatgtgggccgggtgcttattttcctctcacagaccgggcccatgtcgggtccggctaatgtaagtcggttgagctgttggcaagccggatttttgttccaaaaaatgccggcccgaacaccggtgcccagtacaatatctccatttaaagaaaaaatggtgggttaacccctatttcattccagcaagagcgcattgccgaatttggcgacccatccttggccacctgcagcaccagcagtgggccgccggtgcgcaagtcgccactggacgccacttatgagccaaaagtgattgcgcatttcccgacggaacgcccggggcgcccatttgcgccagaaatagcatcggtacaaaaatggggggaaacccggctttagaaaaattttaaaaaattccaaagagcctcagccaaggatttacgagtaaaaatgtattttttggatgggacaggtgacaaattaaattttattcgtcctaaatttcttaatggactactccttaacgggatcgcaaatgcatattttaaaataattaaaactctgtccttttagcggcctttgaggcataataatttttgggccaattttgccataatttattttaaaaaaaccaaataaatttgatttttctaaataaaattcatttaatatgtacctaattaaattatagctcgcattgccccagggcattcggcttcgaacagaacggaatgtgccccgggagccttttttccactcatttgtggtcattcgcgaaggtgtgtggccatttgagtgaataaattataccgcaaaatgccattaaaataatgaacaacacaaattttagatggttctcggatttacgggtgctcattgattntctttgaggtttatctaattaattttanaanatgtgaaatttgtttttttttttttttttgcttttttaggagctttcttccatcgaactccgacagcaaatgtatgaaaaaaggaatattgaaatatataatatattcaattaaaaatgtccttacaaattaggcattattggacatttatggctcaatttaaatttttttaaaaattaaaaatacattaacaattttttgggctgaca

SEQ ID NO: 74860 - DNA, 549 bp, Heterodera glycines
atgccattctttgactatcccattgaaacacttttcgcgcacattggtgttgaccaatttgtcaaactgttgaccagcttcatgttggagcagcagattttgctcatctccaaaagtaagggaggactaatgattattaattttatattttggcccaattttggaagttggccaataatttatgctaattaagccataacacaataatcggttaattgtaagattccaaaatgaaaaagtttttcaagaaaaatgagcaagtttttttggaaatttaaccaattttgccacaaaattcattaatacttcgaatttttcccggcggcgcctaacggcaccgcggacccaccattttacatatttttaaaatttgccactttttagaatttacgaaaaagtatattagtccttgagtgcccttgaaaatcgtgtccttcctttatgtaacagatcccaaattctaaattttgtgcatttgtacagtcaggcccatttctatccttgaatagccaacaatgttcttgaataaccaatgggataaaaatggaa

SEQ ID NO: 74861 - DNA, 1108 bp, Heterodera glycines
atgaaaaacacaaaaccaatcaataatagtctgatcagggctaatgccactgattgctcaagatattattggtcatttcctttcaaacagtgcaacatttgtttgttggacatcgatgcgcgacgcttggaagtgccggaggatttgccatcctttccacgccaacagcgcatgatcagcgagatcaacgcattgattgcccgatcagcatctgctgctgatcagcaacaacagaagcaggcgggggaggacaaaggcgtgcatacattttatatgcgggtaaattctatattctatatgttatattttgatgcataattggtatacgattttttcaattcgtctatatatacattatattatggacaagtatatgttgttgatggaattttattttatgaatttttagaacatttgcttgtggccaaaaaattcgttcataaaaatgcattaaagacaaaaaaaaatgaatatttcatttgagtaaaaaataaaaagaaaattaaaataatttaaacaattttttttacaaaatgttttaaaggaaacgtgataaattttctgggaaaatagttatctaataattaaaattttcatttgtattacgaatatgtaattttttacaaataaaatatagcaaatacatatttcctggatactaatactcaatcttttattataaatatacaaatttgtatgcacataaatggcgcattcaattatttatcaatttagcagtatattttaaaatgctgtggtgctctagccctgaaaaattgaatctaaggttttctggaataaaaatttccaaattttacagggcctccaattcaatgcggccattcgtcagctgtttctggaccattttgtctcactgttctccacctatgaggcgtatttgcttcatgccggcacggagcatggtggcattgtgtcggtgccgaagagtcggcgcaagaatggccgaatgtttcgagagtcgagcgcaaattttgacaaaatttcatttctggttgatcagccggagtcggtgctctcatttctgagtgcattccttgaaacacaggtgatcatgaacgatcgatcgatcaatagggctcctgattaa

SEQ ID NO: 74862 - DNA, 3255 bp, Heterodera glycines
atggccggtggcggtggccgtgcagcactttcggcgtacgccattcgtcaagaccaacacggcgcggatgctgctgatctactgaccaatgccggcgtcgccctcaacaaacacacgtacacgcttgatgacgtacgacaacttcaacaatggctaaacaatcagcatggagtggggcaaattcggctcgtggtgttcgagaaagagcaggagtaccggatagtgttcaaaggcgatgggtatgttaattattttttagtggattagtcaatgatatattgaagaattgccgcccgcttcatctctgcattttgttggagcgcgcgcattacaactatattgggcgcagtgagcagctgttcaaagtccccggctactgcattgactgtgagcgacgggcggatgcgcgttaccatgcctcggggtgcaaagttgcgtgtcgcctctgtctccgctttggtgccggatacccgtgcaagtcggaacaagtaagtattaatttgttgtcaatcatgtaattattttttcaaaaaaagttgccaaacggtgaaagcagtgcccgtcgttgtaacgagtgtggcttcgtcttcccctgcgacgactgcttcaactaccaccttgtcaaccaggcaactgacccattggacggccgtggtttgcgacagcgtcgtacgctttgtcagtggcgacgattttgccgagactgtggccgtgttgcctatcttgggcttcaccagtgtccaccacttggccaagccgatgagggagcgcaattcaggcggctgttcttccattcctttgacaacgcagcggcagacccagtggaacaatttttggactacctgacgcgtcatgggccaaaaaatgcgcatacggtgtgcatcgcgcacaacggcggcaagtatgattttaacctcgtgctagaggcccttcaccgtcgaagtatgccgcccaaacgactatgcacaaccggcctgaagatctactcgatgaagctgggcggatacaaccaaaggcggatcaccttcaaggactccgtcaactttttcgtctgtcaattggatgcgctggtgaagagcttcaacctgccacaacacctggcaacggttaagcccttcttcccgtacatgttcatcaagcgacaacatctgcttgagaggctggaaggacttcccgggcttgactactatcaaccggacaccatgaaggcagagaaaagggccaaacttcttcgttggcacggcgaaaacaacaacaacggcaacagatttcagcttcgtgagcagctgatcatgtactgcaccaacgacgttgccattctgcgcgagtcggtcatccgttttcgtcatctgatcgaagagcatgcacaaggccttgacccattcattgtggcatcaacggcggctggtcttgcgcttgccacgcttcgtcggtgcttcctgccggcaaaccatctcgtccactcaccagaaggcggctacctgcgtgggcgccgcgcatcggctgagtctcagcggtacatccgcttcttcgagctggagcaccccggggcgcaagtgcaatgcgcgagctggtccgtgggggaggcgcacattgaagacacgggataccgcgttgatgggctttggcaccgccacccgccccttcgtcctctcgccatcgagtggatgggttgcttttatcatggtaattttttttgtcttgtttcttttctttttcataaccaacaaaaccaaggctgcccaacgtgctttcccgagcgacagcagcaactggcagcggggcggacagcggaagacttgtacgaacggacggagcaacgcctttttgagttgacgaacctgcacggatgtgaactgcacgtggtttggagctgtcagtggatggagcgtcttcgtcacgacccggagctgaagcgcaggtacgatgccgtgttcgtcccctgcccgctggacccgcgcaacgacgcactcaggggaggccgcacagagccgttcaagctccaccacgtgtgcagcgacgacgaagagattctgtgcatcgacattgtcagcctttacccccacgtcatggtgggttttctgtgaaggtgttcatttcttacggataaaaaaaaaattcagaaggccaaccgcttccccgtgggcaacccacgggtcgtgacgcgtgaagtattgctccatccaccaacagcaccacttccgtggacatctccggaaaacaacagcttccgagggctgctgcttgtccgagtgcttgcgccacgcaacatccgtgtgcctctgctcggctaccgcacaaaggatgggcgcttcacctttccattgtgtggctggtgtgccgatcgacgacagcagcggccgtgccgccacggagacgacaggcgctcgtgggtgaccgcctacacgcacgtcgaactcaacaaggcactccagctcggctatgtggtcaccgacctatttgaggtagtcactcatttaaaaaaaaaatgttgtgcacgaaaacacaaattaggtttgggactacgacgagtgggacggcacgctgttcagcagctacgtcaacacgttcgtcggtctcaaagtgcaggcgactggttggcccgaggggtgtgtcacggaagagcagcgtcaagcctttgtggaggactttgagcgcactgaggacatccggttggactcgtccaaagtggagttcaaccccggcctgcgcctcattgccaaaaccttggcaaactccttgtggtaaagatttttggcttttaattttgaaaaaaaaaagagacctacagggggaaacttgcgcaacgtgtgggccagacggagattcgctacacgcggactccggccgagttccataagctgctagacgaccccacgctggacaagttggactttgtccacgtctctgaccacatggaccgctgcgtcgtgcggaagcgacccgtgttcgccaaggcgccactgacgaactgcctcccggtcgctgcattcgtcacatcgtacggccggcttcagctgtacagctatatggagcatgttttggccatcgacggtgcggagctgctctactgcggtatgtttgtcacaaaataaaactttctgtggacattactatgttttagacacggactccatttactacgtcaacaagatgggaggcccgtgcgtagcggaaggagaagcgcttggccaaatgaagcgcatgagcacagcgcccgccgcatcgtcgaattcattgcgggtgggccgatga

SEQ ID NO: 74863 - DNA, 723 bp, Heterodera glycines
atggatttaattcttgcaaccgattggataaacaacgcttatcctgaaatggatttagaggacgccaacaacgagaaaaaagagtcaacgaaaaagcaagaggaggaggcggaggatcccagctggatcagcctcattgacgaggagatgaagcgcgagccgctggcccccattggtgaggagtcgccatcaacaagctgtttggttttaatccgagattaaattttaaatttaggcaccccaaaaaaatgtacgtgtgccgaacgccgtcgccccgtcccgctcgtggaccacctctgcaagcggtcaaatgcagtgcccatgagctgcatgtgctcttcaaaagcattgagaaacgccgggacattgtggagcatttgcgctccgtccaactgcgtaccgcccacctgcggccgtccgtgagcaattttccggtgtgctgtaatgacctgtccatcctggacacccactcggccccagcctaccgaggctacctcggcatcacggttttttattattattattttttgtgagtgcaaaaaaaaatttgaaggtccggatgcactattacataaaacacggcatccgtttgcgccaccccaatttgccgtgcgtcgttgaatttggaggcggagatcacaaaacttttttccctcttgaaattttgtccattgttttgtagatgtattcaatttccaattgtactgttgtttttaaaataaa

SEQ ID NO: 74864 - DNA, 3399 bp, Heterodera glycines
atgagaaggtcacaaatgctagcaagaaacgaattctttttggagacactgtgtagttctaaaaaagcgaatacccttattcgaggcgcatccgatgagcaacttttgtgccttgtcgaaatctgcctaaacattctaaagggacgggtccctttgcgtcctcggcatttgaataagctgaaagctcatacacaggtgcttcgccgtctcgctcgcacacgctgctctcgctcagccaaaaaggttttgctacagcacggagatggcctccccgctattgtggggctcattgcgtcaattgctcttccgcttattgcggatgtcattgaaaattataaataaggtgcaacaaggtaaaaaaaaattagtaataatgcagcatacaaagcgctatttgcttgtccccgaagaaatttatcagagtttggcagcaccgccaccggctgacggaacaccaattgggctggtccgcacccgaattaaacaaatcaaaaacgatgacggcataaatgaggcggaacgggcaatcaaatatgagcaggaacttaagcgtctcaacaagctcacaagggacgaggatgaacgtcccgtgggtgttaaattagaaaatttgagtgacgtggttgacgccatgcccaaaccagtcaacgtcagaagaccaattgttgtcgctacgcggcgccatctcaaggttgggcgtgcgcgaaaagaaaatgttgaacaactagaagatgatgatgatgatcatgatgatcatgaccatgaaactccaaagccatcgagttcaaataaacgacaacccacacaaacggaaatcttaaaattaatttataaaaacgcccaatctcttggagtgtctgaggaaggacaggtcttgagagcgggtgggcgaccgtttataaccagcagtgtttatgacattgttagtcacctgctgaacaaggacaaacgtgctcaaaacaaagagccaactgcattcaaagaatttgttgaaagggcaagacagatcccgctcttgagtaggcatttataaaaacatcacactgaaatttaagccatcattatggatttgaaaaagcttcgcttgctcgagtttttgtacaaggacctaagttcgcctgtcgcattcacgagcgttgaatcgctgctgagagaggcgcagaaaagtcaacgaaaaattagtcgaaaagatgtccaaaattatttagccagccagcgtacatacacactgcatcgtcaggccaagcggcgctaccgtcgattgccaacattggcacctggcttacacactgaatggcaggccgatttggctatatttgaccgacttgctaaacaaaaccgtggctacaagtacttgttagtctgtattgatacccttagtcgacaggtgtttgtggagcccgtaaagaccaagacgagcgctaacatgataatagcatttggtcgtatattcaaaagatcaaaatatatcccgtggaaggtgttgacggatcagggaaaggaattcactgcccgcgcagtacagcatttcttccgagctaaagacgttgaacgcttttgtatgctcacttcaccccaatttcatgccggaatggccgaacgtgcgaatcggagcatcaaagagcggctttatcgctactttacggagcgtaacacgtacaagtggattgatgttgtgcaagacattgttcgtgcaattaaccactcgccaaattcgagcattgaaatgcgcccagcagacgtgaactttaaaaacgcagaagcattgcgacaaaaattacatgatgcagctgaaaatgttgtacgacgccagccaaaataccgtgtgggagatcgcgtgcgcattgaaaagtacaagcacgtgttccaaaagggctatctcccacgcttcaccaatgagctcttcactgtggcagaggtacactctgagcgttcgccagttgtttatcgattgcgtgatgaccataatgaaattattagtggttggttttacgcaaatgatttatgcaaatcactagaagacaaacagcaaaaaatgtatgaaattgaaaagattttggtgaaaaagaggcagaacggtgtggattatgcacttgtgaaatcgaaagggtatagcgctcgctttaatagttggattcctgcaaattcaattaccgagaaagatatataaaaaagcactatttaataaatttaacaaaaatgccttcaaattctttttatgttgttgttccgtcgaacaccaatattgaaggaaataggacaaattctttccgagtgcgtttaccgtgcaaactacaattcaattcggaatgggaggtgggtctggcggtgattgtgtatccccactcttggccttccataggcaccgtggagcaacagtttgttcaggttgagtggcaaacgggaaatacggtgcggattgagcttccatcatcaaatgtcaccaacccccatgagcttggcaaaaatttgtacagactcctgggtgagggcagcgatccgttggcaaaaaaggtacgctcaacgcagaattctttcatgcttacgataaacaaggctcgtcggtggaacagagaagagtacattaagcgaaagaccaaagaaaaacggggcgtccgtgacgaagagctgctcctacaggccctgttgacagatactgggacagtggttgacctcaacatcatgacccacggccttctggcacgggaaaagcgtgcggaaaccagcaatatagcgttgagaatcccagctgacgataatgattcatatcaacaaaaattggatgaatacttttctagattaagtgagaaaaatttgagcattcttgatgaattgggcatgacaaaattgaccgccgaaatcaaaaatttgagcgaagaggaacgtgcgatccttgaagccacaaaggaaatgggaacggaagcatggattcaggcgtatcgtgaaatacgtcttgtctgccaatttaactacgacgtcaataaaaatcgctttgttttaaacactgacccacggtacgttaaaaaggtcaaagtctcgcctcaactcgcgtacattctcggtttcaacaacacggaatttatgcaggccgaaaacgaggcgaggtttatgccggacatgagcgggggtgtgtcatcctttcacgtttacacgccagaccttattgaaccaatgatgattggcgatgtgacggccccagtgttgcgcattgtgaccatacgcggagaccccgaccaagtgattgaagaacaattttttgccatacaatatcacaaaattttattaaaggaagtttctgaaattctgattgaaatccgtacaaatagcggaagtttgatgccattccaatacggaacttgtacattaactttactttttagaaaaatgtcctatttttaa

SEQ ID NO: 74865 - DNA, 349 bp, Heterodera glycines
atgcctccaaatgaaaattctgaccgtccctttcaacaacccgacaatgttcaaccagatcaacaaccgcatcaacaacaaccagatgaagacaccgagttgcgtgcacaaattgaagacgcggaggaggatttgctcttgaattggtggcgtgaagacccaacaattgtaagcttttttttcaatttagcatagtttttttaatttcatcacatttttcagattcgttttctttttggacacagacgcgcccctgccatcgaagctgcgcttcgtcaacgcgctgaacgtgaggccgagatcttgcgccaatatgccgagaatcagcaatgagaagtgaccgatcaaa

SEQ ID NO: 74866 - DNA, 1251 bp, Heterodera glycines
  unsure (1)..(1251): unsure at all n locations
atgaaaaaacaattgtacaaattaagaaatgaaaaagagtcaaaaattatttcacaagggcaaaactcagttaacaaatttattcgaaataaattatcaaaagttaatgaaattcctacgttaattgataatgctggaaatatgttttccagcaatgttcaaaaatgtaagatattagcagaaatatttcaaaagtcttttttaagaaaatcaattgttaatggtccacaaactcaatcaacacagaataagattaaactttctgacattgaattgaatgcgggaataatttggaacatattaagaagacttccccggcgtaattccacttcaccggataatgttccttacattttattaaaaaattgtgcagaaccaattacaaaaatattagcagatatatttaggctaattttggattccggtcaaattccggaaatatggcgaacatcattggtggtaccaattttcaaaaaaggcgaaaaaactgatccattaaattacaggccggtgtcattaaccagcactgtctgtagagtttttgaacgaattttgagtagcaaaattttagaatttctgaacagtacaagattctttgataaagaacaatttgggtttttaaaaaatagatcgactacaacccaaatattaaaaatgatggacgatatatataattctatacaaaagaatcaacaaattgacataatctatattgattttgtcaaggcgtttgattctgttcccattgatttattacttcaaaaaatcaaaaagattggaattgaaggaaaaattcataattttttaactaactttttaaaaaatcggagttttaaggttaaaattggcgaagaattgtcagaaagtttcagaatattttcaggagtgccccagggaagtgtcttagggccattactctttttaatttttataaatgatctgccgtcctttattgcaaatgaagcatcatcagttggcataaaaatgtatgccgatgatgttaaattatattatgcccatgaaaatgatgataaaacaaatcatttagataaagcaattgaagctttggaaaaatggtcaaaaataaatgggttagaaatttcaactggngaaatgttttgttctttatttagggaaaaataatatgaaaaaagattatttaattaactcaaaaaagatttcagaatcggataatgttcgtgacctaggcattataattgactcgaaactgcatttttcaggacatattaa

SEQ ID NO: 74867 - DNA, 1833 bp, Heterodera glycines
tgcatttccctgctgtcccttgctgctgctcacctcggcagcgaacttgacaccgccgcggacgaaagtgccaattccaccgacgacggcggcccaaaaaatggcaaccgaatgccaaagagaggggcggacagccacggccaggaggaggacgaccagcaccaaactttgcaaggttttttgtttgcttgcttatcatttaaatcgtcttggtgcgtagtttgagactctaacgaatttttgctttgaattcggtttttttgtttggtgaaaaatattttgcaggcccattccattacttgacagttcggtactcttgcagtttacgggatacttttaacatacattttagtaattttttttaggttttagaaattagtgaaaaataattttcaaggggttttcgaggtcgctgatcatgaatgcagcaatccatttttgccaattccgtacccctgacccgaatttgaacaaattcgaaattttcgaattcagaattagccaaattttctttgaatacagctgaaactgccttttaattgcggaaaaaatgcatgaattataataccactgtgatgaaattggacggactcaaaaaaaaaacttaggtgctcctattcgaagcaatgcaaaaaatgggaaaacatttctctgcttcagacgctgctccactgaacgaattggacgcctccgccgtttatttgccgtcgttggccaagcgcaaaaaatgccacaaaaaggcgaaacaacggcaggagcaaaaatggccaaggaaaacgaattggaatcagcagcaaatggaggacaatgagcagggggaggaggaaaatgaagacggaaacgagtctatggacgaacaaatgaaggcattccgaaagaccacgttggaccatcgcaaacaatgtccgtttttgagggacatgggattttcttggccatccctctaatttcgaccttggcatttttaaattccatccgtttttgaggggcaaggattttcttggccatccctctaatattggaccttggcatttttaaattccaatcggttaatccgccgtcccccctcattttttttggtaaaattaaccatatttttgatcaaagaaaacaactaacgggaatatcggttcttcgttaccgtgggaaattttgtcgatggaattttaaattcattcttatagacttcgattggtttctttttttcgaatttgatagagtctccgattggaatcacaaaaaattgtttggtttttgtaattatttggttcgtctaaaatttgttgcacctggggggtttggttggtgtcaccggttgtaaaaattatgaccatttctgccaaattccttgccaatttgttaccgattttagttttttaattttaaaatttcattttacagaggagcagaaaaaacgtgaggagcagcaaaaggcgaagcaacgacaggggcaccgaaaggacgaagaagaatattttgatgcatcgaaaagtaaattttaattgattttttaaagaaattttatagagaccgtaaaaatttacggttttttattattcttacaattagtaaaatctggcaattcacaaaaaatgcaaattttttgtattttttacgaaaaattctaatttatccccctttcattttccatattttcagtgagtttcaaggcggcccatctacagcaaactgttgctgcagtgcgcaattcgcttgttggcggctgtggcaccgccgcggggagtgtcaatgccatcgatagcgccggcaccgcaaattcatccgccgctgtcgcgtccgccgggggcagcgacgatttgtccacccgagggc

SEQ ID NO: 74868 - DNA, 59 bp, Heterodera glycines
ggattgctggggtcgtgggttcgagtcccaccgggcgagttaccttttatgttctacaa

SEQ ID NO: 74869 - DNA, 56 bp, Heterodera glycines
tagaacataaaaggtaactcgcccggtgggactcgaacccacgaccccagcaatcc

SEQ ID NO: 74870 - DNA, 509 bp, Heterodera glycines
ggataagctattgtatgctaccaagattgtgcaatttggttgcgtctgagaaaagttatgagttgttttatcaaaaatttaacaaattttgcactttttgtccttcgactcaccacggtatttgcgtttggaaatttaaatggagtatttcttttaatatatatgtacttacgtaactcgaaacatataaaatggagctgctgagcttaaggggggggacaaagtgacgccgaaaaacggacaaaattatgtagaaaaggacataaagcgttttaagccatttttgagttctcagatcaacatgaaggagtgatctgatcaagttggtgtaaaatttggtcagcatcaaaagttagcctagcaataattttttaaattctgctaatttgaaattgagttagtgtctgttaaagattttgcttcgttacttttgtatcgccaaaaattaggtcaatttggttgtgacactataactttttgagggattaactaatcaggatccttttttc

SEQ ID NO: 74871 - DNA, 1801 bp, Heterodera glycines
  unsure (1)..(1801): unsure at all n locations
gntcgagtcgatccgctgagtgcctttgttgcggaactgcgaccgacgcgggtcgaattgtgccggatggcactggacgacccgtggtggggccgaagggcggccaaatgggcggaggaccaatgcggggcggcgtacaacgacatttactcggagaaatgcgtcaactcgcggggccaacgggcgttttactgctgccaattggcgggtaaatgtgaaaacagtcggaaaatactgtccaaaataaaactaaaaagcgattaattaaatttcaaattaaaaataaaaagcgaattaattatattttaaaattaaataaataaaaattcctttaaaatgtttaatcctttcacaatgaatgtttatctgttcagtggaagcgttcaaagcgaccaatcccacagaaaaagatgtgagcccttttttgccgcatgcgctgaattttgccggaaatgacggccaaattctgccgttttggatggaacattataagtaaaaatgggcatacaattgctttaccattttaattggactttctagaaagctttgtccccacaacccaatgcctccccagggtcggcccggatcgcacccaagcgtgactaatgactaattaaattaaaataatacccaaaaaagaaattccaaattaactcaaaattaatttaagaaattgcgcgcttctccgtgtgttttgattattgacagccgaaagattgggaaaaaagaggaaaagaagcgaattctactctgaatacatagttttgacgttatttaatatattgttgctgggtgaaattcatataaatggaaatttttttaaataataataaatctttattaatattttgcaaatatttctaatagtaatttgtgttgtttgtttatgggcaaaaaatccaaaaaaaaccccacaaaaaatgtctcaaagcttcactgtaaaaatcatgcttcatttgccttttaaaaaaccacaaaatgaggccaaagcctcataattgtgagccctgttcataattaacatttgatcattttaaaactatttttgtgtcttctgatttataataattttattcataaatatttttcgctacttttccatgaattttctttgcgttggcattatcgattctatcgattttttgacacgaaatattttattttgtcttcctacgtaaaacatgggggaagatacatttttcttaaagccatgattatggggctttaatgtaaaataataatttttacgaattttacattttttcatttttgtctttttcagtgaatgtcgccattttattggctattatttttgtttttctacactttggcaatatgttgctccatttcaaactctgtccaaacttttaatggtcaaattgtggccgatccatccactcctttcagagtgacagtgaattgtgaaaagtgcgaagaaaaggaaaagcaaatagatgtcgttggaaaaaaagacttccaaattgagatgaaaacaaaggaagaaaaagaacgaattggacgaatcaaactgcaaataaaatcattaacggatttgggcaaacagaaaagagtaattaaaaataattattaattaattaatgttaattgattatttaatttttcgaatttttgggttgggaattcaaaaattcaaacgcaattgaaattattaattaagggtcattgaaaaagaatttaatcaccaccatttcagtcaaatgaatgggtcattgaggagccgagttcagacaaaatttacaagtttttcatcggctattttacaccaaatgccgacccaaag

SEQ ID NO: 74872 - DNA, 570 bp, Heterodera glycines
  unsure (1)..(570): unsure at all n locations
atggtaaagcaattgtatgcccatttttacttataatgttccatccaaaacggcagaatttggccgtcatttccggcaaaattcagcgcatgcggcaaaaaagggctcacatctttttctgtgggattggtcgctttgaacgcttccactgaacagataaacattcattgtgaaaggattaaacattttaaaggaatttttatttatttaattttaaaatataattaattcgctttttatttttaatttgaaatttaattaatcgctttttagttttattttggacagtattttccgactgttttcacatttacccgccaattggcagcagtaaaacgcccgttggccccgcgagttgacgcatttctccgagtaaatgtcgttgtacgccgccccgcattggtcctccgcccatttggccgcccttcggccccaccacgggtcgtccagtgccatccggcacaattcgacccgcgtcggtcgcagttccgcaacaaaggcactcagcggatcgactcgancctgcgatcttatgaaaaaacaaagagaaaaacgatgtgtcaagagtga

SEQ ID NO: 74873 - DNA, 1596 bp, Heterodera glycines
tcactcatagccaccgcggcccatcattaagctttagcgtgcatcttaaaatctctggagctacgatcagcccacaaaagaggtctctaaatttgtattccaaatgtaattaacaccctcactcatagccaccgcggcccatcattaagctttagcgtgcatcttaaaatctctggagctgcgatcagcccacaaaagaggtctctaaatttgtattccaaatgtaattaacaccctcactcatagccaccgcggcccatcattaagctttagcgtgcatcttaaaatctctggagctgcgatcagcccacaaatgaggtctctaaatttgtattccaaatgtaattaacaccctcactcatagccaccgcggcccatcattaagctggagctgcgatcagcccacaaaagaggtctctaaatttgtattccaaatgtaattaacaccctcactcatagccaccgcggcacatcattaagctttagcgtgcatcttaaaatctctggagctgcgatcagcccacaaaagaggtctctaaatttgtattccaaatgtaattaacaccctcactcatagccaccgcggcccatcattaagctttagcgtgcatcttaaaatctctggagctgcaatcagcccacaaaagaggtctctaaatttgtattccaaatgtaattaacaccctcactcatagccaccgcggcccatcattaagctttagcgtgcatcttaaaatctctggagctgcgatcagcccacaaaagaggtctctaaatttgtattccaaatgtatcattaagctttatcatgaacgggcccatcttataatctctggagctgcgatcagcccacaaaagaggtctctaaatttgtattccaaatgtaattaacaccctcactcatagccaccgcggcccatcattaagctggagctgcgatcagcccacaaaagaggtctctaaatttgtattccaaatgtaattaacaccctcactcatagccaccgcggcacatcattaagctttagcgtgcatcttaaaatctctggagctgcgatcagcccacaaaagaggtctctaaatttgtattccaaatgtaattaacaccctcactcatagccaccgcggcccatcattaagctttagcgtgcatcttaaaatctctggagctgcgatcagctcacaaaagaggtctctaaatttgtattccaaatgtaattaacaccctcactcatagccaccgcggcccatcattaagctttagcgtgcatcttaaaatctctggagctgcgatcagcccacaaaagaggtctctaaatttgtattccaaatgtaattaacaccctcactcatagacaccgcggcccttaagctggagctgcgatcagcccacaaaagaggtctctaaatttgtattccaaatgtaattaacaccctcactcatagacaccgcggcccatcattaagctggagctgcgatcagcccacaaaagaggtctctaaatttgtattccaaatgtaattaacaccctcactcatagccaccgcggcccatcattaagctttagcgtgcatgttaaaatctctggagctgcg

SEQ ID NO: 74874 - DNA, 653 bp, Heterodera glycines
cagacattgtgcccataattcaccggcattttacacgcctttggtctgaagccgacatctgatcacggcaccacaataaaatgtgtctctgttaagcggcaatacgggaactgatcagattaccgtaactgcgggacgaactaatgcaaaacattgataattttggacacgatcacggaaaaaatcaatcctaagtgatcagaaaatgttccgccgatttcggtactttgacgaattctcgtacatcaatgcttttgtggattaccgtaacgcgccgatcagtagtgatcagatgtattcggtgatcagcaacatttcctttttaaaaatgccgtgatcagacgcgcagaccgtgccggaaataccggcaactctatcatcatcagaggggccaaatggccaacaattaaattaaaaatataaaaaaatcgacgaaaaatcacttcaaagctaggaaacaaaattatttctgatcagtgaggaagtgtgttggcgatggacaaactgattaataaaaaaatgtacaacaacttaaacagaagttgaacagaagaagagggggaggtgattagtgattaaaaagggaggaatcgaacaaaattcaaatgttcacagaggaaaattggcgaaatgccatcaattaacaaaaaaaa

SEQ ID NO: 74875 - DNA, 1473 bp, Heterodera glycines
atgcctttggcaatgccacttctttcgttggcattcgcttcggcactcacaatgctttccagtaaatttacctgtaaaacaatttatttgtttttaaaattttagttaaacaaagtattttaattctaaataatccctaattaattaatttgtttattttacccctaattaattctttaattacccacatttgcctcagctgtccatctctgctcaatatcgcgtcgaattgccaagaatggggcactctatcaattggcacattgcacttgtggccaagcaatggccggtgcggttgcattggcccaactgctggaccaaatggcaatgctcgccacggtgtgccacgtgctatccgaccatattgtaagcatatgtataattagttctttttttgcttagttcaggggtgcgatcgaaaaattttcaaaataagaacatcaaggccaaaaaataagatttttgggtccaaaataaggacattttgcaaaattgctttaaatcgcttgtataacactttattcaattaatatagcatcaacttttgtatttttcgcctccaaccaaggaattttggagaatgggggggggagatggtccggcggtgccgataggcgccgccgaggaaaattttttgtaagttcgttatgatttgttaacaaattttcatcaaaaaggccaatttttgaaattaaaagccaagccgacgacctttttttgccttcgaaaacgctttttttgcggcgaatttttcaaaaatttttgggggttggacaggggcgtccggtggcgccgataggcgccgctgggaaaattttgtgttttttaatgcgatttgttaacagattttgtctaaaaattgccccaattttggttatttttgagctaataacgatagcccgaaataaggacaaatcttataaataaggacatttttattttataagatttggaacctccaaataaggacaaatcttataaataaggacagatcgcacccctggcttagttatacattaattaattaattagttcttaatttgtttgtttcgctttgcttttcagaatttgctcttccacaacgcttttgcgccgttgcgcttctctcctcccccattttggccttctgttgccatttcctcctcttctgctgatagcgttgtgttgcttgacctgctcgccgccgttgtgctgccgttttgcgccgccctggtgatgacgtgcagcgtacgggtgagaaataaaaggaaaagcggcgggagagatttttataaatttaaaattagtaaaaaaaaaagctaaaaataatttatgtgttttttaatttgataaaccagggcttcaactttaaggaaaagctttttctaaataaaaaattattttttatttagaaattatttttaaaaaaattgagaaaaaatttgtttgctttcattttcaggtcccagggagtttaggaaaaaaataaataaa

SEQ ID NO: 74876 - DNA, 2205 bp, Heterodera glycines
  unsure (1)..(2205): unsure at all n locations
atgccgccactccgtccgacncaacggcacagtgcaggtcaattagccaaccaattaaacggcacaaacaaaaaagacagtgataggcacaattacagcactaaagatgaaaataccgtagataggatggagacaccgtacttttggggaagtcaaagactcggaaaattgttgtaatttggttattatgatatatgatcatattgatcagtgatcactttatgatcttttctaataaattaatatcggagagagcgagagagaattaattagtcgaaaatttatttcaaatatcaaattttaatgctttttacacagaagcaattaaaaaaaatttgcaggtcaaatgcaacaaaaagtgaccaatttgcggattggactgattatgagaaacaatgctttgatttggtcgcatttttattattgaaattattttccaattgtgccaacaattcattttaagatgccattgctcaattttggcctttgcacgccgtaatttaccgcttttgaaatttgaaattgccaataaattaattacttttttcagcgacacatgcacagattatgacgtcagaaagctggtccaattcagtaagattttattaaaaatagtaatttaatttaattaaattgcaattttcagtttatgaagcggccgaactttcgatgggccgcaaatttgtttgtaatgtgaggaaaaagcaaattaattaaatcatttgcttaattactttcgcttttttaggtgtccgtccactgcagcaattcaagacccgaaagtcaattgtaccacgacggaaagtcaatggtacgaaaaggcaaaatttaaaaaaaagaaaatttaaataaattttaaaatcgtttctctgctcaaggccgtcctttgccttctgctagccatcggctcccttatgctttttggcactttctacgacatttacgtgcatcggccactcgaacgtgccgttcttgaaagtggccaaactgtaaaaacaaaattaattcattaattaattaaattaatttattaattaaacgaattagggttttattgttttttaaattatttaaatgattttgggctcttttccagaacaacaacaacaagcagcagctgaacattgcacgaagtgttggccaatccaagacaattttgttcattcgattgttttccgtggttcgctttgttcaaaattttacaacaaattaattgccattaatttgtttttggcccgtaatttggactatataatggacacgcggatggaggagggccaaattcggtgtttgcatggtgggagaattaagcaaattttcactaattgcaacaccaatgaattaattaatttttggtaattaggtgcccgttttctcagcatgtgttgggtaattaattaattaatacacagctgttctaatgattttgaattttacagataatctttggccatacggtttgtcccaattgttttttttatttattttttaataatttcccattttcagtattattacattggcacttctttcaccggcggtcttttgactttgccctttgtaaaaaaacattgttaaaaattcagataatttactccaaacgctgcacgaattccccaaatatttctacaatcaattggtacataattgtttaaatttattatttttatttttaaattattacaattttaataaattatttttcggttgtccaagctccgctcgcggtcgactcattctttctgctcagcggccttctcaccgcgtacatttttctgatcaaattgcacaaaaatcagtttcgtatcgacgcggccagcacatggtatcattgtttaatttaaaatttaattaattttcaaattatttttttttgcttttttaggttgccttattatggacgccgatatttgaggcatttcaaattctaaaatgccaatttgattttgtttgttttttcctttttaggctaactccaatttatgttttggttatgataatgaaaggtaatggccagcccatttttttgattatcaatttttgttaattgaactttttcagtcactgtgctcacttatgtctctgagggacctttttggaggccaattgttagaaaatattccacaaaacttaatgatgatggcatttttaattaggacccaaacttttgtcgagactcttggtgggccaatctgttgtacataa

SEQ ID NO: 74877 - DNA, 288 bp, Heterodera glycines
atgccgtgttccctcttttttcccatttttggctttgttgcccaatgctttttcggctttgttccgtccctccgccaacttcgaatgggtcgccgacttcagttggttcgtcggctccgccattggtttctgcgcattcgccgcgatggaacgaataaatccgaaaatgcaaacggaaaaatcggcggatggacaaaacgatgggacaataacagaagaagaaaatggggcaatctgagaagaagaaaaacaaataaatcaattgaacaaaatgatttaaacaattaa

SEQ ID NO: 74878 - DNA, 968 bp, Heterodera glycines
  unsure (1)..(968): unsure at all n locations
tttcagtccctcctttattgtgccaatgcaaaccctttcgcctcctcccccctgcccgtttcagtccccccttcgttttgccggtctctccccgctcggttggctttcctttgtgcttttttggtctgtccaagtcgcactgttccgtgccggcctttccgccgtccgtttgctcatcgacttggccggacccgccgtttacgtggtaatgatggcactggccgcttatttggtgactaccgccgggatggccaatttgaggatgagtttgaccattgaaggtgaaaaggcaaaaacttgagaatttaaaacggttttaaaaataaatacaattaattaattttaattaaaattgtaaattttataatttattatttatccaaaaaatgttttaatttggccaattcattcactgcagatgaaccgctgtccctttctgagaccgttttgacaatgttttccgcaatggcattaatcgtttcttcgatgggcagcgcaattttcagtttctgcgacttttcgcgcttcgccaagtcgtggaattcggtcaaattgggcaattttttcggtgaacttaattatgaataattatgccaaattagcatccccccatttcaaggtttgcccatcaattatttgctgttcgccactctgaccgtgctgacaatctccgccactaagcccgtgtttggccaaatgaccaccgacccaattgaaatggtcgcgcaaatcgactcgccagtggcagtgaccgttggcgcactcactttgacggtctgatcagtgatcactcactcgctgatcagtggggaatttcattgacttaaatcgcccaaaaaatcatggctaaaaatgaaaaatgggacccaaaataagccaaatttacaatttggcatttcaatttggcatttctgtttgtctgttttaagatggcgtcccatcgcattaacattngccacttcgtttgt

SEQ ID NO: 74879 - DNA, 4803 bp, Heterodera glycines
  unsure (1)..(4803): unsure at all n locations
cgaatggattaccggatgctcagcgatgatcggagagagcgatttgtaagagcattgattttatataggctttagctcatttattgccactgtacagctgcatggaaactgtttaaactctaaagtaataaataggaaccgagttttatctggatcagagaccggaaaaaatttttatatagaaaaatagatacaggttaaacctgaaaaaatatcagtaaacgttacaggtacaggcaccaatgactaaatttctgtctgatttaaaatttgttcatgaagcgataaaaattgattgtttcaagtaatcaaaaattaaatcatttaaattattattatgtttttaatgtttttaaagagtttctattaattcgaccagagaatgcctttacaggttcaggcatttgccaaaagactttttttgtacaatatgccatgactccaacatcactgcatttgggatgccaaaaaagactaaaattcaaaaaaacaatgaacgggtctcggagattgctgatatattttgtgatggaggccgggttttgcccgattctgcagaaattaggcggttttgccatttagcacaacgcgtggctccaaatgaagaacggttacggttcccacgagtacgaccggctgtccttcttccactgcaatcccagcttaatcccttccgcccacgggggccccacctttcttttgtggcaccgtgaatatttgaaaaggtcagttttcttggtttttggcgcctcggttctttctccattctcggactcattgtcgatctttgttcttgaatttgaaaaagttccgaccctcgaatatctccatgtttttccatataaatcagttgataatttttaatgcaaaattttcgtcttgggttgtttcataaatccgccaagcggttcgaaattttttttcaattataaaaaattatggccataaaagtacaaaaaatctacagtcagaattcaaactttaatggaatttcgatagctctaagaaatgctctattaatatttaatattaaaaactttattgaatttcaaaaaaggtatggacaaaacattctgacccaatttttttttacttttatgataataacttttttctttctacataaatttatatttgaatagagaacacctagtgctattggatgataccaaggaatattaatttggttgaaactgagacaacttatgaatttatacgtgtgacatttttggcggatttaaaaaatgacctatcaaccgaaattttaatgcaaacaaaaaaaaattgttttatgatggaaatcgcaattcgcgcaattgacccatcagtgtgtcttccttattgggacgttacattggaccagcgattgccgaaagcggtaattgtttttttaaaataatttttacgaaaaataaataatactttttttaatgcagacagattcgatcatgtggagcaaattgttcatgggtgctcctgacaacggaaataaattcattgccgacggttttttggccaattggtatactgtaagttcattttttgtagcaatgattttaatttaaccctaattattcgtttcatacatatctcatcaatagattaattcaaatgacttgaatgaaaatatattcagtcgagcggtggcaaaattcgccgtgacctcggcttaaatggtcggctgtttggagaaaaggagtaaaaaagcgcactaatatttttttatccaattaatttagagttctctcaatgctaacgaaaagcaacatggatttcttttttgcctttacaaatgcagtaaaaaaatttaaaaataataatttttgtttttcccaatattttcagactccaaccagcgaatgcactcaatcgataccggacgtagaatctgagaacgcattggaattgatccacaattatgtgcattcatggataggaggacaaatggtaaatttattaattaattccaagtgttttaaaattaataattatattattatttttttaaaattaattgcggtatttttttaacctttttagacacgcttagaaacatcaacagaagacccaattttcttcgtttatcactgcttcctcgattatgtgtgtcaattaagactaatttaagtggaggggtctaagttttagaaatatactgctggtaattttatcaaatatattaattattattactgggcatagatttgggagcagtggcgccaaaagtggcagaatcgtgagcagcgcgaaacgcaatacccacccgatgaccaaattgttccggtgacaattcaaattttaaacatttttaaacaatttttaagaaattatttatttgaaatagaatcgaaaaaattggcattcgtaaaaataattttattttattattgtttttcagtgctcagggtctgaaaattatcgcctcagtgcaacaatgtacccattccaggatccggttctcctaattaaaggtgtcatattgcctttcacaatgctttggttttaaattttaatattctgcaatgtcctggaaaacttagaacaaataactgaaactttttatggcataaaattatgttttactctcggcactattacattctaattatttcataatttattttagctggcctaagcaatgaatacaccgacaatttgtacacatatgccacaagaccatcgtgtacagcaacaaatggatgcggatcaccgtaaaagttttttaaaataaaatttgattaaaaagaaaatttttggaaaaatattttgtaatatttttctccatttaagtattcattataataaagtaatgatgccattaattagccaagcagttaagttatcttttctgtgatttgacaaagcaacaaactcctgagcccttatgttgtgccaaaataaagtccggaggcgattgctcaatttttcaggggaacagttaattgaacccttttaaatattactcttaattagtttctttgttcattagatgaagagccatgttttgattccgtttgtattaatggcatatgtacagcaagcgaaaaaggcacgacaacggaacatggtgaaacaacaacaccacaaaccgagacaagttcaaccacgcttggtaaaaagattgtaactgatttggtgaaacatgtaattaatagacacatgttacaggtacaactcaacttggtgagacaaccgcaacacctacgacagggaccagttcaaccaatattggtaaacgaatgaaacaagattcttgaaataagtacaaaatgtgacagatacaaccctaattggggaaacaacttcaacggcatcggatcacttctctactgtgttttctctgtcaccctctcttttgacgacagaaccaactgatcagatcaccctttccacgataagcagcagcacaaccttaggcacattcacacccaacactaccgtgtcctcatcatacagtaaaccattaaaaatgtataaataaaatgcatcggatcatttttaatatattttgcagctcaaaatccatcatgttgttgtgtgtgtaaggaatgtgatgaagaggaacaatataaaatggtatcgtgcaattttttttaaaacaaaaaaactccggaataaagaatttctggccaaaagctgcaggattttaaaaaattctatatagaaatgaaaaccatgagaaccaatgcaataagagttttttctataattaatcattaaaaaaaaaaattctataaatacaaaaaaagaaaaataaataataaaatttttgttatttccttttattcaatcacatttnaatatttgaatatttatttttctgttagtccttcatcgttcccaatggttgaattggaaaagccaaacgcaagaaacaccgtaagcataagccacgctgcggtggtcgctcttcgcgcaaacatcgccaccacaagtcgagcagtaaaagcagcagcagcagttcgtcgtcctcgtcggaggaggaagacagtaacgagtgcgacggaaagcatactgtagtgagtggacaattcaaaaaaagagtggagtcggtacacttaagtgccgacactcgagcccccagcttcatttaagtgatcattaggcctggatttttagggtcgaaaaaacccaatttttggatcgaaatagggacgaaaaatggtaaaatattggcgaaaattttgaaaaatctgtgctttttttcaatgagaatgaattaaaatcgatgtaaataacttattcagcaatttagttacaaaataattatatttcctcttttttttgtaaaaatgtgtttttcatacatttctcaccgaaacaaagccgcagaaaaaagaactaaaacctaagaatccggcccttgtgatcataataaaacttgttatccgataatagatgataagcttttgattaacttttgttaattacaagtgatttaacaaatcacaaagaattacagttcgatatttttaaatgccaaaattcctttacataatttttcaaattatggcattagtttataagggatttacatacacaaaatcccttatttgttaggccgtcacaaccaccatttcttcatctcagcaaataacaaaatcaaccgacggtcacttgggcacgaccacaccttctccaacagtaaattttaataaaattgaatattttttatgaattttttaatctttttcagcctcctccacccaaaaagcgcgtttgccacgatggccatgagtgttgtgctcattgngccgcgaaaggggcgtgcacatctgcgccctcgcacatgaacacgtggtg

SEQ ID NO: 74880 - DNA, 757 bp, Heterodera glycines
atggaaaaacatggagatattcgagggtcggaactttttcaaattcaagaacaaagatcgacaatgagtccgagaatggagaaagaaccgaggcgccaaaaaccaagaaaactgaccttttcaaatattcacggtgccacaaaagaaaggtggggcccccgtgggcggaagggattaagctgggattgcagtggaagaaggacagccggtcgtactcgtgggaaccgtaaccgttcttcatttggagccacgcgttgtgctaaatggcaaaaccgcctaatttctgcagaatcgggcaaaacccggcctccatcacaaaatatatcagcaatctccgagacccgttcattgtttttttgaattttagtcttttttggcatcccaaatgcagtgatgttggagtcatggcatattgtacaaaaaaagtcttttggcaaatgcctgaacctgtaaaggcattctctggtcgaattaatagaaactctttaaaaacattaaaaacataataataatttaaatgatttaatttttgattacttgaaacaatcaatttttatcgcttcatgaacaaattttaaatcagacagaaatttagtcattggtgcctgtacctgtaacgtttactgatattttttcaggtttaacctgtatctatttttctatataaaaattttttccggtctctgatccagataaaactcggttcctatttattactttagagtttaaacagtttccatgcagctgtacagtggca

SEQ ID NO: 74881 - DNA, 1130 bp, Heterodera glycines
atgtgggccccgcagggcggttgggtggtggtgatgggggtgaacacgtccagcggaattgtgagcttcatcgacgcgacgggggcagaggcgaacaaagctaaaacgattgagcatacttcactcagtcaggtgggccactgtcaagaaatacaaatgatctttcaagaatatttttgcaatttgtttcccattttcagggttcttgggacccgaccgggcgatactttgccacgtgcactttcgcgggaaagagtcgctatgagacgggctatcgcattcactcgttccaaggacgtgagctgcgacgtaaggcggtagacgccctgctgcgattcaaatggcgtccgcggccacccgtttcattgtccgagcaaaaagtgcgggagactcgcaaatcgttgaagcaattgtcagcgaagtttgaggaggaggacaaaagggaaatgctcaaagtgtcgaaggtaaacacaaaaaaatatattggggaccgattgatggcggaaaattccctttttaggaaataattgaacagcgcaaaaaggcattggaactcttctcgaacattcgcgtcgctgctgctaaaacatacgaagaagaacgggaaaaacggactgagctcagaggcaattcatttaaattctaaataaaataaaaagcaattaaaacaattgtttaggtggcattgaccaggaaattggcgagaaggacctcgttgaagaaacaataacagtggcactaaacacggagaaggagaaaatcagagacgagagcaaatagaggagagaggtgtttttcatgcactttaaattatgttttctgttaattcattgttaaatatgatatgtactcgagtttattataaggtcggcaatttcggttaaaatttattccgaatttcgggactagcagtacgtatgtgggtctaccacaacacaggtacaatcaatagacgtatttaatatgcagcgtaagtgggtcagaacagcaaaattgaaccaatggcgctgctattcgttcggattgtattaatccattttttgtcaactgtttctgacccacagtttccgtaattattatgtgtacaatttggggatattatggatggggtgggccaaatttacaaggta

SEQ ID NO: 74882 - DNA, 2290 bp, Heterodera glycines
atgtccgtcgactcggaactgtgcacctccggggaatatttgtcgacagtgaatgtcccggcggagctcgtggaggaagtcaaatctttgggatccattgaattcgttgcactccaaaaatgtgaagaggaggaccaaattccaacattttcaccacccaatgagaaattgtcgccaaaaagaaaacgtaagtgctttgaaattgtcttcatttgaaattgttttttagtcagtgttaatcaatccatcggagcgaacggtgaaacgaaaagtaagtgttttcgaattcattcgcaaaaatgtgcctaaaattctcccattatgaattttgagccccaaaatcggttcaagatgttctcagcagcaataagccctcactgcatagaacagaagcaattccctttgaattcggcgaagaaaattcgtcagaaaaaatggaccgagaaaatgcgacaattgtcatgaaaaaattgacggatggtgaggacaaacaaacaaaataaaaggtggaggtgtgccatccttttttttctctgtccacgcttttcggttccatccattttaattaataatcacgctttctgaatttactttttcaatttttcctgtttatttgctccgctgttcttaacacttttactaatgacactataaatacaagcccttttgccttggaatgctattttggtcacttttagggtccctttcggccattgccaatttgcctttgcatgttcgtgacgctttgaactcgtacgaatggtgtgccaatggcgctgagagtgaattgctgagcctcccaaccatgtggattgggctggagaactttttgtgggagttattctccataatattgtgttttattttcatacattcagcattcacatccattcggctgtgcgaaattggagcaaatgtttgcggcgtgtgaaaatgccggatgccgttctctcaattttgtacgtcatcatttgtggcaaatttaaattttcaattagacatttaaacgggcggatgtttgccgcattggccaatggttcagtcgctgtttttcaccggaatacaagtcagtactgtacttacagttccattaattgataatacctaattcgtgttattttgtgtgccatctttgcgttttagtcggggaatggtccgccagtggttactttgtggtcaaattgggttctgccaccagttcggtgtgccatttgtgcactgttggcggaaatgtatgggctgcctgtaggaattgtgtgatggtactcgacccgacaaccctcaaaataaaggttgatgaaaaacagcggaacaattactcacaatcagagaaacccgtatttcagcatgttttcactgcccacccgaggaaagactcccaagttcgacaaatgatttgctgtggaaaaggcgtttggctttccatccgactcgactcgtgcatccgtctcttccacagcgaaactttccaacatcttcaggacgttgacgtggaaccttacatctccaaaatgcttggtcgtcttccgctttgctctctcatttctaaatcctttcgtcaattcaggggctaatcagcttgacagccatttgcgaatcacctctctgagtgagctgaacagaaggatttgggtgggcaccggatcagggataatcgtctcaatccctttaaaaggtaggtcaagcgatttgtgtcaaatatttggattttgttgcgtcagaaaggagcagtgcgactgttgtggctgacctcgaccggggacggacgccaggccaagtgattcgtgtccattcgtcgggcgatgaatccacggcaaattccaccccattctgtgacattacaaacgctcagctcagcttccatggccacaaagatgctgtccgttttctgctaccattgattgctggtgaccatttttacacacacagataaacaatttaaacgaccaaaatttacagagggattttccgaccttacacaaagtgtcgagacgaaaaaagcattgatggtgtccggcggcgatggatatattgattttcgattgggtttgttttatacgttgaaagaaattatttaaggggggggggcaaaagatcgttgggttttaaaaatgtcaaaaacacaataggtgacgaagatgtaatccctcatgacaagaaggagagcaacgaaagaagcgcaatgacagagcaaattcgagcgagggatttggcgcatttgctgatttgggagacggaatgtccggtgaaagagctgaccggactctccagggacgaagaaggacagtga

SEQ ID NO: 74883 - DNA, 1570 bp, Heterodera glycines
gaatactatggcaatgagtgccatcgacacaaatgtacgctggaatttccgacctgatcagtgcgcatatgtcacagagtacgcatgccgacttgaacttggcaaatcacatcagcaccgaaagtgggctttggtcttcgagataaagaagtaattcacccgttgttttatcaaaggggattggcacgaagaatttggagaagagcaaacggtggccgaaattctcgcgactccacgcgccgacacggagaaggaaaaagaagcggcaacagagaaggaagtgaaggaggagaaagacgggcgacaaagcaccgccggacaaatggaacaattgtacggccgaattttgtgccagcgggggacagtcaatgcccaattaaaagacaaagcattcatcaaagaattctttgggaattttagctggttttaacaaacatcgggaacaatgttttattgatttagcattaggattttcatattttttggggggggggaattctccgcgaaatttcagcccgttaaaagtccgataaaattgagcgagcacggaccgccggtaaaggattttattatatttttttgtaatttaccaaactatgtcgaactgttaaaacctgttggacgcttgagcccgtcctactttagtttacacttgccattttcagggacgttgtcgacgatggcgacggtgtttctttgggtgccgaccttacaggtgagtattgggccaagtcagtttctcggttatatcggctatttgcgcctttgcctcatctcccaaaacctcaggccaattagttgatccggcagagttcgcctcggcgggtaattgccccaaatttatgaatttttcgtaaaactttttcgttttttgcagtcaacgacacatttatcggtatttgctaatttgtgatggtgtttggtccttttttgcttgttttgtgtgataacaacctttcttttttatttaaaattttatttgaaggatttaattgtttaggaatgggcaaagaagtggagaatttgatcagagagaacacggaactgttggagacaaaaaacgcattaaatattgttaaaaacgacctcattgcccaagttgatcagctttccaggcattgcttttattcgaaaattaattttaatttccgattcattcagtgagaaagaagtgttccgcgaggaggtgcgaagtttggagatggtcaaattgaaaatgtctgaacgaatccgcgagttggaaagcgaaatgaaggaattgaaggagaaaatgaacaattcggacaccgtcattgacgaaaaggtcggttttgtgttttacatgaatttgggtcccccccccattcatcaaatgttctaaattgttaatttgtctgactattattagcacttttatcccattttaaggaggaccgttcccaggggaaacgtttcacacgcgtggaaatggcacgaatggtcatggagaagaaccaatacaaagaaaagttcttggagctgcaggagacggtcaaattcacggaacttaaaagggccaaaaaacacgaagaagaattggcacaaaggcgga

SEQ ID NO: 74884 - DNA, 502 bp, Heterodera glycines
tttttcgctcagcgccaacagcgacgaaacaatttcattcagcgtaaaatttggcgatgattggttttggatgattgttgatgagaaaatcggagggaaattgaggacgagtgaccttgacgatggtaattaaaataaagaaaaaataaaataaattgaattttaaggaacaaatacaaaattcaaattaatccctcaaacatctggcaattttgtgattaaggtttggaaactaaattgacaaaaaataaatattgttttaattaataatttaaatttaatatgtttttttattgtatttttaaggcatccaatggaaaatttgtgagctgcagaagtgaaaatcactggttagtggcggacatggaatcaccaaagagtctctatgaagaatttgtgttggatatggtcaccaaaataacagataccgtaaccgctcgcgtacctctaaaaatacaataattctttcaattcttttatcctttgcaccagaataattaaa

SEQ ID NO: 74885 - DNA, 414 bp, Heterodera glycines
atgaagttgttttcaacatttgttctatgtttgatgctcatcatcggactgatgggcattattgctccagtgaattcgggtaaatttaaaagataatttttaaatattttcaatatatgtaatatttatttagaagaggaacctggccaagaacaaggtaaagaaaaaagaaaataaagaaaataatttgcaaaaagaataactttgataatgtttcaaataccttaacaatatttcagcttctgctaaaaaggaagaagatgaaaagccaaagcccccaaaaggaaagggagcgggaaaattccgttttttgggcggacgacgaatgaaatgagcagagaagttgcagatttgcttagattagaggctattaaacaccaaattaccgatgaataatcatttaacaataataaa

SEQ ID NO: 74886 - DNA, 349 bp, Heterodera glycines
atgattattgcaatcattgaggctattacgtgtataatttttattgtattcgctttcgtaaatacaaaaggtaatcaatgccatttacgttaatgcattcattgtgtctttgcatattcaattttaatttgtcttatgtcattcatattaaatgtaaattaaagaagcattgacaaaaaaaaagtttgctgagaaaatgctgaaaaagcaaatttttagccgaacttattaagaaattattttttaatttaaaatttgttgcggtttttatgtttgaatattttttcaaaaaaaaaaaaaaagaaaattatgcatttcaagattttcaatttgtattaggaagaataaa

SEQ ID NO: 74887 - DNA, 2406 bp, Heterodera glycines
gattatagcaatgaaaaaagcattatttaatattattttatatgtgcatctaattatagaaaaaacgtctggaaacgatgtgaatgatgaagcacatttaaatggtaattaatatacataagaaaaaacgaataaaccccggaaatttttgtttaaaatttttatttttatttttttgcacaaccacagaaacagacgcagaagatgaaaagatgataaatcagtacaaaatgtatttgaaatatcacgaaaggttgctgaaattggatgcttatgggttggaggtagaaaataataacatggacgacgacacagaagcatttataaagttcaaaattgaagcagcaaattggcacctaaaagcgttgacattggaattattggaaaaggcatcgcaaattgcaaaaaataaccaaaaaataagcaaaaatgaaaaggacggacaatcacagctaaatgaggcattaaaaaagaatgtggaggaattagcgaaacgcatgtcaatggaaacaattgaaaaattggtgaaaatgcatggggaagttgagacaaaatgcgccaaaatgaaagatgatataatcggcaaaatattcaaattgtacgaccgttacaattttgtagtcagaattgtggtcatagtggacaaatggacgacggacaaaagagcatggagcaacattggacatgaaaaacgcatcaccgaattatttgaggttcattataaagggggaagaagggcctaaagccccaaaaaataaatggaaattcccgatatttcaaaaatattccctaaaaggtttcatatccgttctcgcaattggacgaagaagaattgagcaattcggaggaggttgtttttcttgacacttccgtcgctttcgttggcaataaatataaattgcgaataattcatgccgaaaatgtgaagaaaatggtcaaagagtcgccagtttttcgcgattttctctgtaaaaactcagacgattttgagacaaatataaagccgtcgctcgaacaaatggtgggctcgtccgaactaatacgacttgaggaccaattccccgaggctttgagaatcggtaattttgaaatttatgattaaaaataggtggatatgtccgggaatggggggggaggtcttggatataattaggaacaattaatttcttgatcaatgactgatcaataattctatggcttatggttgttcttccccaccttatccagtttcaatttcttcctaagaatgctgtgtgttaatttttattttaatgattttttgtaatctcttcaaattttaaaatttggcccaaaattcaccattttctccacaatgtttcaaaaatatccgccgctgccttacggcagcatcggactccattattctcttaaattttttagttcagcaaaaaacagcaaaaagaagaaaatatgaacaaatctcactcaaaattcaaaattttctcggcacagccggacatttgttctgattagacttttaaatcggatatatatatatatatatatatatttataatgtaaattctgaaccacacctgtatttttagttttatttattttatttcatcttttgtattttgtgcataatgtaagggtattaatgtgccgtaaagaaaattaattaaatattttaatccataataatcgtttacgaccacccatcatttgttcgtataagggcaatgattaagaatttaaattattatagacatgcttcaagtaaaatagcattaagttatttttttagatattatgagccaacagactttgttagaaatttatcggcaaatcctttcgccggcaacgaacgaagaagcaattgacgacgacaaatatggaagcaaaaaaatgttagcacgaaaaatgatggcaatgaccgtccaaattatgcgagaaaatgaaagccaattcaaaaaacaaaacccaaaaaatgggaatttgaaagaaatttttggacgaaaaatgaaagcaattttggcaaaagcatttgacaatttattctcagcaaaatccctttgtgagatggtcaaatttattagctttacgcgcgaaaaacgggcgcaaaagcaattggaaacggagctgaaaaagtgggagatgaacaaatgcgaaacggagcaggagcagaagcagaccatgtacgagttccgacagaaggagctgaacagtcgatttaagcaggacattttggtacttttggaggccggcggtgaacagaagaccaaaatgggcgaaattttggcaaaagacggtgccaaaagtgggttagtcgagctaatcgagtggaagcagtacaaagagttggacgacggcggatatttgcttggcatattcccatcaaatagttggctttttagggaaattcatttattttcatttgtttag

SEQ ID NO: 74888 - DNA, 3180 bp, Heterodera glycines
atgctttccgcccaaaatgatgagcaattttttgagtggctaaaccgtaagtgctccactgatgagcggcttttcgttgccaatgccattcacacggtctgctccaatcgtttgcaagtgcgagaagccaatttcatggcatttcgccatttgctgctgagttcgcagcaattccgtgcctatttctgcaaattggccaactcatcacaaaataattacgtggaaaacaaaatttatgacgccgaaatttggtgcgacgatgggtggacgaaagtgtgctttgaagtgcaaaagattggcgaagtgaaggagaaaatattagcactaatcggcgacgagaaaatgcttttgttggaggcgcaatttccggaagttttgaaaattggtgggcatttgaaaatgaatggaataatttgtggcttttcttagatgccataatgctccaaacacagccatttctctacaaaaacattttggcacacaaatcgcacaccgacgaaaccaaattttggtcggctcggcttggcattgcgcatttggtgcaaatggtcaacgcaatgctttccaattttgggctttcagtctctttcgaattcgacattaaatatgggttcaccgtaaaaagtcgcgacattttctgcgaggcattcaaacatttgacacaacaaaaattccacggagggattggacggactttgtgcgcattggtccaattcaaaaattacgcgcaaacattttacgaagtgttttcggcagcaaacgatcgcttgaacttagaagcaattgccaaatggaggccaaaatgtgcagagaatgaggagcaggacaaggcttatcaggtgggcactgatcaaattaatagggacgagttgagaaaaactttctgatgggggaggactccgaagagtttcccttttggatgtaatttttcaaaattaaaaagcagttggcggaaaacaaagcgtaaatttaatatttttcgacaaaaaattgaccagctttgttcattttgagtctatctaaaaattttgcaaattttaagaaatttgttaagaagatttatacaaattttcataaaatgcacccattttcaaataattttatttctggggtccctccccccctcactttcccctatttacgttaaaaaagaaatgggtaaatataattgtcataatttgttaatgctacattttttaatgggaacgaatttagcaaatgaccaaaagccttgctacacaaaacggaacaatgctgaaaaatttaatcataggcaatgatgaatttaaaaagtttgtacaaaacacgcggggtgcacgagcacgaattggaaaattgctggtcagcgcagaggagcaccaaaaatttttggaattttgtggcgaaggaattcgaaatgaaaaaggtatttaagcgcacaaatggtgattggcttataccccacatttgcgcctcggattttacgttcccagcagatcccaaagaattattttaacagaaaatcatttgattctacatattatctcaataccttggcttgctcagtgcctgtcaaaatgggatttcagtttaaaataattcaatttttgtcccagtgggcttataaataattttttgatatttttgccaaataaatcaaacattcgaaagccattaaaagaaaaagctgcctttataagcataaaagaatcaggaaataattaaaataaagaatggatttttttatctgttaaaaattccgattatttaaaataatatgtgttaaaaccccttcaaaaaatcatagaaaaagttatccctaaattttttttatcgctagcaaaaaatcctttgttttcctcctcttcaaaaatgtttcattgtaatgtatttttgaacatattttttgtgaatcgcttcattatccaaaagagcactaacttttctccactaattatcttctctctaattgatggctctgcgatttttaaaaaacattcttttgttgctcgcgtttaaaagtataataattaagtgtttaaatttgtttaaatttttattatttgccacaaatatagcattttcagtgttcactgatcaatggcttatggaattgtatttggaattcttgaacaaatttgcaataatggacacagaaacacaaatgagatactttttgtcgttgtcctattcagtttgggtgcgttggatggaccgccaaattgacccaaaaaatgcaaaccttccgattggactgagacaaatttatgagcaaatttggaagaatcaacgcatacagtatgaacaaattgcgtatgataaaatatttgacgtaaattttgaggaattgtgtttcgaatttgcactgattttgaaggtatttgagccgttgaaaaaatttgttgaaacgaaacgaaacgaaaaaaatttgagaaaatttggcatcgaaataacaaaacgaaatgatgacaaaaactcaccacaaaagcagtacaaagagcacattgagaaaagtgagaaactgttggagcaatgggaagcaatttggacaaatgcgaagcaaaacattcgaatttggaagacgacggaatgccaaacgacggaatgccacacaacgcaatgccaagagggaaaactcaaaatggcacgaccaaccgaatggctacaaacattacattttgacacattgatggattttctggagaacaaagcgatgcaaagccaactaaaaaatagtatttcattaataaaaagaataaaaagattttcggatttataaaacaacgaaaataaatattaaatttaaattctaaatttattttgtgtcaattaaacaaaggtttgaaaaaacgacgagaaattcttaaaaaatggcttatgcaatttatggacaaagaaattgttgaaaaaattcaattggcaattcaattaaataatgaacaaattggagaaatgagaaaaaaacaaaaagagaaaaaagaaattagtgaagaaaaacagaaaatttatgaagaacatttgggaaatttagaaaaggaattggcggaagaagaagaaaaggagcaaaagaaaaaggaagagaaaatggcaaaagaaaaagagcaaaaggaaaaggagaaagagaaagtggcaaaagataaagagaaaaaggaagagaaaatggcaaaagaaaaagagcaaaaggaaaaggagaaagagaaa

SEQ ID NO: 74889 - DNA, 2094 bp, Heterodera glycines
atgcaatttatggacaaagaaattgttgaaaaaattcaattggcaattcaattaaataatgaacaaattggagaaatgagaaaaaaacaaaaagagaaaaaagaaattagtgaagaaaaacagaaaatttatgaagaacatttgggaaatttagaaaaggaattggcggaagaagaagaaaaggagcaaaagaaaaaggaagagaaaatggcaaaagaaaaagagcaaaaagagaaaaaggaagagaaaatggcaaaagaaaaagagcaaaaggaaaaggagaaagagaaagtggcaaaagaaaaagagcaaaaagagaaaaaggaagagaaaatggcaaaagaaaaagagcaaaaggaaaaggagaaagaggaagtggcaaaagaaaaagagcaaaaagagaaaatgaaaataaaacagcaaaaaagaaaagcaaaaaaggaagaggaggaaaagcaaaaaaaaagtgaaaaaagcagcgaagtgacgaaaagcagcggcaatttgggaaaatcggcagaagcaattgggaaagaaagggggaaaaatgaaagggatgccaattccatcgaaattggggacgaagcagaaggggatgaattggaagatgtcatggcaaacattggcttaaaaggtaaaacaacccgaaaatggagtgggagtaatttaattactaattagtaggcaattaaaagcaaacaaaaacctaatgacaaataattttgtttacaaaaatattaaaaagaatggggggaaattaagcttaaagacaacaaaatttaagattttttgcaagagaattatttaatgacaaaatacgacgaattcttagaggagccaaatgaattacaaaggaaaatcctcgacattggcatttatttttacgagatttcaaatagaatttctgccgccgaaggaataaaaaaggctatttttatgcttaaaaaaagcgaaattgaattcaattataatagggagaacgaatttaataatttaaagcaaaaatgggaaaaaatattgcaaaaaaatgcaattaaaacaacgaaattgagccgaattgagtaccaagatatgaaaaataatttcaaaaaattatgaaaaaaaattattttggcaacggaaggaattgaaagtgccaacatagctgagataaaaacggacaaaaacaaaggagaaaacagaatttaaaaacacaaaattccaaatgcatcgaaataatttggcaaatgcaataatagcacgaaacgaaatgggaaaaagtggccaaaattgggccaaatgggacgacgaaagacgatacaatgcgctgattttgttgtttgagaaggacacacaaaaaaggacgatctgttcaaatttggtcgcccaattcggcacacatttggagggatggcggaaaatgagggaacagcagcgaattggtgggaattaattaatcaattatttaattgattcattagtgattagacattaaattcaattaaatttagaccaaatttcgataaatgagcatgtgaattacacaaacagcaaaatgagttgctctaatggagggactgaacaaataaaaatgaccaattcacattcatttatgctgccccaattaaaccagcaaatattttttaatgataacaatgatgaagagcatttaaaagaggcatatgaaaatgtattttaaaaaatttatgaataaaatcatttagttggaacgaattctcattgaagagcatttcgtgctgacaatggacccaaccaaagcattgaatgagctaaaagcagttgtgtccaattgggtacgatataaatcattttgcattagaaaacaattagcaaaattaattaatttcattagaaaacaataaaaaattaagtaatttcattaagtcgcaaggagaggcaaagcttttggagatcggctccttaatgttgggcacaaacacagcaacttcggacgtggacataatttatattgtgccacaaaagacaaccaaatcggaggcaatggacaaattctttggcacttttcaatgcgatttgtcaccgcgaaagtgcgaggacaattcgctgtattgccttctttgcctggtcaattaa

SEQ ID NO: 74890 - DNA, 297 bp, Heterodera glycines
atggaagagaaaacagcagaacagaaacaaaatttaccatcagaaaaagaggagggacaaagggaccgaatgataagccatttaaatttaaaatttaatgagcaatttaatgaaaaaattgtgcaaaagtatttcgaatctttgaaaggatgctttcaacgggtttcgctggtttcgaaatatgtcgatgagaaggaattggaaaatcagtgattgatttaaacctgttgattcttttttgattaaatgtgcatttttggaatacccattgtaataataattcatttgttgtcaaaa

SEQ ID NO: 74891 - DNA, 1361 bp, Heterodera glycines
atgcttactgctaatgaggccgttcaaagagaccaagatgagaaggaagtagaagaagaagagtcgtgggccaaacgttttcctccatacagtgcagaaacggagattgaacagcttgacgaatttagtttgcttcatcaacaaattgtggccggccgtgttgtgccgtgttgtgtaaatttgccagaaatcacggtcagcaaaagcgggactaaaaggccaaaattttcagttttttgatgtcatggcaaaactatttttttacatataaaatgatgcattaagctgaaatatttatctttctaagaaaacactaactggcatttcactaagttggaaaattatgttgaaatttttgaagaaaaccaaaaaagattgtgtattttgtgtaaatatgctcaagtgaactaactaccagataagcttggtaattatcgaaaaaaaacttaagggaaggcaggtatttttcaacaaatgacgtagaactcgaaaatttaatttaatcacaggaaatttccgaaattgcggcccaaaaattgaactccgatcggtctgccgggggcatccctttgcttgatattgtcaaaattatcaatgccacaagacaaagcgttgcaggcacagcttatcgtgtacaaatactgttcaaattgagaaaaaaggtgaaaaatatttggaaaaattaaaaagtttttattcaaatttaaaaataaaaagattaacacaaaaatttaaaaaattattcaaaaaaaataaatgaactaaataatttacattatttattttaaaataaattattaaagttaatttttaattttttattaaaaaaatgtaatagtataatttttactttaattttcttcgagttgtttcaattaaattagttaatttatattatttttggttctgttttttttctctttttttattaatttttgattttttcacaaacaaattcaggacttgggaaaaaaatcggaggccaccggaagcgaagtgcgttgatatttaattaatttcatggaaacgaagaaatagtttattttttgaattttagcaaactactgaacaatttatgactgggattttgtttttcaaaaaacaccaacgaaattttgattttaatatagtttttttcagaagagcaacattcaggagcgtagctattctttaagcccggtaattaaacaaaaaataattttaaaataattttaatttaattttaatatatttgttgaattttatattcacagatttatttgttcaaaatttatcgcaacatcaatgaaaccatagaaatcaattacaaaggtgtgtctaacggaggttcttatcattattggaaatagcaagcaaataaa

SEQ ID NO: 74892 - DNA, 358 bp, Heterodera glycines
atgttgatggatgcctgggggatcctcccaggcggggatcgattggccgttccactgaaatggctcccgactgatccgactgcccctttgactggctctccattgccttttaagcgcccctcgggatgggaggagtttatcggagtaataaatgtgcgtgggaaaataaaatgccatttccggtccaggccttacaatattaacttcagctcgagaaaagctcatttcaaagacgtaacatttaatctagcaaagacgcgaaagtgattgatcgattgatttctttgaaacagcagataagcatttcagaagatgagagcggatcggtagcatcttaaagtgagggacaacaaataaa

SEQ ID NO: 74893 - DNA, 934 bp, Heterodera glycines
atgtatcaaagggagggcaccggaagagaatcgccaacaaattcaacaattgcgatgggtttgcggaatgtacggaattcaaaatgaaaagaataattgacactcattttttcagatgccgacaccacaatttcaaagaggactgcttcaaatgcggcgccccaaagtccaaaggcttttcctgcggaatcggtggcgagtcgttggacgacgggtcgtggtattgtgtcaggtcagtcgattccaaccgagcagcaaaacagtgccgtggcgccaattgccaataatgtcgctcagtttatttttgagtcataaaaaatctttttaaaattgtggggctatgcgcaagtgtcatttgacaactttactcaccactgaactctcttcaaaaaaaaaattgtttttttgaaaaattaaatttaaaagggtgcacccgaaatctcgccgccgaaagaagatttgaagaaaagaaattttgaattttctgatttttctgattttttccttgaaaaatttctattttttaaaaaccggtggagacattttgtctcggcgaaattttgtgtccccagcatttccgttttcagtgttttaccttttctttgccccttcagttgctggtttcttaacttccccaactttttgatgtgtcgtcagtgccgtgagggagtgccgaccgacgatcaattatttgccattcgcaattctcgttgggaatgcctcgagtttgttggcacattccgtgtccatccgtctctcccccgtttccttttcagttgcggtgcttacaattacgcgtccatcgcctcatgttacaaatgctcttcgcccgccccttcccttagcattttccctccgtcttaaaatgaaccgcaaacaacgcttttttgttttgttttgttatgatgtattgacagccgtttcactaaataaa

SEQ ID NO: 74894 - DNA, 428 bp, Heterodera glycines
atgtcttcaaattcagcgaatgaaccgaataacggtaagggatgaagtgatggttttgaattttgagtgaggaaaacaattgcttctttagtgtttttaattggtaatttgtggtcaagggagggcgtagccgaccctcggcttcgggcggggagctaaaagtcctccacctattccagcgacaacgccctttttacttttcggttttgtaatttttcatcgcaattttccaaacaaatttgaaaacttaagaacgaacgaattttaccgaacgtatttgggttcattaggttgccttcttttcacaaaaaaaaatttccatcatgtttaagtttctgtcgaacaattcgaacagttgcaaaatgatcagaagaaacttttggaacggatcaataaagtggcaaattcccaacagcaggaaaaatacg

SEQ ID NO: 74895 - DNA, 178 bp, Heterodera glycines
atggatgagttgggtatggatgagttgggtatggatgagttgggtatggatgagttgagtatggatgagttgggtatggatgagttgagtatggatgagttgggtatggatgagttgagtatggatgagttgagtatggatgagttgggtatggatgagttgagtatggatgagttgg

SEQ ID NO: 74896 - DNA, 573 bp, Heterodera glycines
atccatactcaactcatccatacccaactcatccatactcaactcatccatacccaactcatccatactcaactcatccatactcaactcatccatacccaactcatccatactcaactcatccatacccaactcatccatactcaactcatccatacccaactcatccatacccaactcatccatacccaactcatccatcgggatccgggacgcgaaaaataacggaattcggaataaacgaaactattacatatttacttggatgctcgaattaattaaaaaatggttaactccggttgctatgtttcgactagctatattactgctgacctgccctttaattttgtgtatggaatggcaaggctttatcattgacaaattcggatatttttttccggttgcggaacgtgatgccgcaacgcttttgacgctgattgctgataacattgaaccgggaacgttgattgtgtctgacggatgggccgcttacggagggattcagaatatgcagcagcgatacgaccaccgctgggttaatcaccgtgttttttttgtagacccccaagaccg

SEQ ID NO: 74897 - DNA, 1681 bp, Heterodera glycines
atggctaatgctaatttacaattccctttgcctgattggggccacttcgacgcagacagaacaaattacgacgcaatttacgacagtgatcagcaaagcgcttccaacagtggcaacggggtgatccaggacttgtttaaacaggtggacagactcatgactcaaaataaacttctaatgtgaaagtaaattacaggttctccgctcgggcttgacaaatttagtgttaccaatttctgttcttgaacgacggtcgatgttggaaatgtacgctgatttcttcagtgagtggcattccattttgaaattttaactttaacagtgcttcccgtttttagcccaccccgacgaattggtctgtgcatccaccgaaaacacgccagagaagaggtggtgtttttttctccctccgccctaaacaaatgttcaaattttttaattttcagattccttgccgtgctcaagttttacctcaactcgttcttccccgcccggaaagaaggtgtcgcaaaaaagccgtacactcccatcgttggtgagacgtttcgttgtcgctggacgttgcccaaccaattgccgagcggtgaactcacggatagaggaccttttcctggatcagctaccaaccaggtcgagtttgacgggggggcgggggtctcatgattcaacatattacaattatcattttcagttgaccttcatttcggaacacatcagcaacagcccgcgcctctccgccttttatgctgagcacccggactctgccatttcgtgcaccgctcaaattgaatcaaagccattcatcgcgggattgacttcactgggcgtgcacaacgtcggaacgatggttgtgcgatttgggagggtatgttcacgaatgtgtctggccatttttgatgtttttcaccatttttcttttagcacaacgagacatacaccgccacattcccggatgccgtcgcccgtgattgtcacgccaccccttgggttgaactggctggcaaagtgggtgtgaatctattcgtgtttttgtattgaattttccttttctttaaaggtcgaaatacgttgtgcgcagagtggattcgtggcggcgatcgagtttctggcgaagcccttttttctcggacgggcccatcaaatttcgggacaaatttcacgcgacggcggacggcgggcgtcaatggtgctcaaaggcgcgtggaacggcgagattttcctgcgaaaaatagcgcgcggtgacttccaactcttcaccaatgtcaaggatagccctgaagtgcgcaaggtggaaattcatacattttctctcaaaattaatggacaattcaattttggcaggagtgcattccagtgatggaccaacagaacaacgaaagtcggaaaatatggcgccacctcaccactgcactgttccatcgcgacaaaacgctggcaaagctcagtgggttttgaatgaggggtcaaaaggctaaaaactaatggatttcattttttagttaagaagtactttgaccaacacaatcacctgccggggcatcaccatccgcgttatttcgtccagacaactgccgacaattgggagtaccgcgatgcgctgttgtgaacgatcggatgagcctcgcagaactctgatgatttggcgagcgaaaaacaaatgaggaccccgatatttaataaa

SEQ ID NO: 74898 - DNA, 1128 bp, Heterodera glycines
atgcttcttcctctcccttccgttttgtgcccttttcaacttttgcttctcatcgtcggcgctgtgtttattattctcgctcagtgctgtggttgcggtgggaagaaggtaagcggacatttcaaaaaacaaaatgccattcattctaaccatttttttcattttcagggaaagaaagcggataaaaaaggtgaacggcagcagcagaggacttttttatttatacaatgggggaggggaagccactacaaattaatgtcatcaaaaaatggcatggtttgagtgaaccaatcctctaacattttcataattaagtgctgctctgaaaagaatttttgcagttttgtgggcccgatttttttttcttctaaattcgtacaaaagcagaaaaaaatctattgttatgggttttcggttggggtcgttgatcgcggaatttgacattcatttttgtacattccgtatcccggacctgaattcgaacgtgaactcagaattcatatttatgttcgagtctttaaattacatctcctactcaaaaagcaaaaaacaattcatttaaatgttacagcaaagaatggcgctggtcaggcgaactcgggcgaacgcagcaaattggagaagtcagccgtaggcgtcggcaacggatcaccgaaagaagcaggtaaaaggaggaggtgtagaggagaaatgtgatttgtctgcgagtttaattttccctttttcagccgtcccggccaccacgccacagccagcagcaggagaagcgagtggtgagagataatggggagacgaaaacggcaaattcataatttcttttgttcgttcagcaaatgccgcggcgaaagcggagggttcgcagcgcaaaaaggaaaagccggacattttcatcacgaaaaaattgcctgagaacaagaagcgcgaattcgtttcaggtagagcgaagcaaggaatacgaataagggcgaatttttccaacaattccgttccttttcaggcaaaaacccggactacgagacgctcaagcagttggacatgcaaatcttcctcaagaagaaactgtcgggaacgcaggcgaggccgcacgacttccaatcgcaagtgtcgtcgcaacaatcggccatgtag

SEQ ID NO: 74899 - DNA, 1308 bp, Heterodera glycines
atgcgatccatgaccgcctcgggcattcggaacgtgtccacaaacagctcgggcaaccgcagcggacatgtgtacgcaaacgcagccaaatggaggtatacggcggcaacaacggatggtaggatgtgggccagcgcgtagcagaccatgacaacttcactgacgaagttcgcaaatgcccacacactctttgacggcgaagtgtagaagcgatagcgacgcagaaactgcatggagtatggcacgctgaggttaaacttgagcacggacaacacctttataatgcgcacacaaagttatgactttttgaaattttcaagaaaaatcgtgaaaaacatttcaactttatttctttaacaaattttataataataagtttagttatttaaaaaattcgccggtgagatttggggtgtacacataaaaatccggtaattcaaaattaggtttcctattcacccgcggttccatgcgcaccaacagttgcaggatcgtcttgttagttcctgggactaccaacagagagcggtcgagaatgtgcacggataggctgagcgtttcgatggtctgcgttaagcgaacttgtacctgaattaataccgtttcaccagttttcaacatttttaaaatggacataaacaagccaatcgacaagaattgtgccaccaccgaatttcaaagaggacatcggcttctcaatgttttgctgttgaggttataagactgggaaatgactcattttaatttgctcttttatcattaatattctaaaaaccatattttttaaattctttttgtcaatgcttttcgaattcggttcatttgttttggtgggttaagtgttgatgatcagccgaaaatggcaaagaataaagaaccttattgacttgaaaaaaatagggaaatgaataaggttgttagatgagaacgacggactgccatgaaaacaaggaaaaatcgaataaacaatgagaaaatttttcaaaataaataataaaatcgtacaaaagtaatcatgtaggtaaataactgttataaaaaaatttttatgagaaaaataaataatttatttgtaaatttaaaataaaaaatataattattatttcagaaataacaataatttgataaatctttttaattacttaatttaatttataaatattattttaattatttggtcaaccatttcctttaactttaaagtttggaaaattccgttaattatttgtttattggctcccttcccttttgataatttatttagttggctcgcttaaggagtactgtaattaattttaacgaatagaa

SEQ ID NO: 74900 - DNA, 372 bp, Heterodera glycines
tatacatcccattatgaacgctataattatcagagtgccgaaaatcgcatgtgatctaagcctagaaaaaaatggtgtaagtaaaatcgtaattacgctcaaaaagcttctcaaacaattttagcgcatccaattccttctacaatcgcctttatacatcccattatgagcgctaaaattatcagagtgccgaaaatcgcatgtgatctaagcctagaaaaaaatggtgtaagtaaaatcgtaattacgctcaaaaagcttttcaaacaattttagcgcttccaattccttctacaatcgcctttatacatcccattatgagcgctaaaattatcagagtgccgaaaatcgcatgtgatctaagcctagaaa

SEQ ID NO: 74901 - DNA, 180 bp, Heterodera glycines
atggcccgcgctcacttggcggcgctcaaatggctggcgctcagttggccatgcacccctcccacgcctatggggggctaccgtaatccggacaaaatggagtctctaactactattatgagcgctaaaattatcagagtgccgaaaatcgcatgtgatctaagcctagaaaaaaatggt

SEQ ID NO: 74902 - DNA, 162 bp, Heterodera glycines
atggcacttttgctgtttctcaaagtgctcattccattcttcgtcctttcattgtgctttgtttctgccgcttccatcgatggcaaaagttttgcggaaaatcggcacaaaatcggccgactttcggcaatggttgcgatgataacgaacacaatggcaatg

SEQ ID NO: 74903 - DNA, 379 bp, Heterodera glycines
atgtggccaagtcaatgtttggatgctctaaatgaacgtaaagcatcaaaaaaatggagaatattggcaaaaaaagcgcttcatggccaattgaaaggagcacaaaaggtaactgaaaaataaaaagagaaaatgttaaaaaagatttaaacaatttaattatttaataaatgaattaaatataggaaaaagaagataaatcattaaataataaatggatatttaattaattgggcagactttaagggaagaaatccaaaggattaatcgatcagaaagtcgcgcgggggaagcccaaattggaagaacaaatgccaaaggcaacgaaagccaagcaaagggacggattgaggtggaagaaccctaaaaatgaacaaaa

SEQ ID NO: 74904 - DNA, 1518 bp, Heterodera glycines
  unsure (1)..(1518): unsure at all n locations
tttcggcttttgctttgtttcgtcggcttctccgtccatttgcttttgctctacgccgtctttgacatttatttttcttctccaattgtgcgcggggcgcggccttttaaaatcgccaaaaattcggagagttttacgcccgccgatcgcatcgtttttttctcggcaggtcaaacaaatttgagacatttaccagtaaaagttacttaaaggtaattttaaaacaaatgaaactttgagaattggacacatttaaagcgaaaataaaaatttaaaaaaaacaaattaaaaatgaaagccaaactttctcaagatggacttcgagcaagaacattctaccaacacccgcatctttctccttttttgcatgggcttattcgtgatggaaaagttgtaaaaaataattaattaataaaaaaaaaaatcaatttttgaggctgcctggggcaatttggaaagtcatgtgccaactgagtccaggccgggccatgtggcgatgatggctgggttttatgaggacgttagcgcagtcacacgaggatggaagtagcgaactttaagcatagaaaggggaacatttaatttatttaaaaattaacagctaaaattaattataacatggcgatttaatccatgcaaatttcgttaaaaattaatggagaaagtttaatttgggtcttaaagggcttaattcataaattaaaacctattcaattttatttgcaatcctttgcccccaggcacaatccggtgccattcgacagcactctgaaccaatcctcaatggcatttctttggggttctccggacattgtgcacttattctccgaaaatgtggccaatgtgcgatccgacgcttattcgcccgaattggaggatttttcagacgaagacgcggccaaattggacagatgggtctttgatagggttaaggtggtggacaaattggaaaaagcgaacccgaattagttataatggttttttaattctctagttgttttttgatgaaattcgttccgatgcgaatgccaaaagtcgccttttgggcctccgtcgtgccatttttttccttcatttgctcggccttgacaccaatgggcatgggcacaagccgaactcggaacagtacttaaaaaacattgccacggtcgacgagggcattcgcggcattgttcaaatggttgagggatttttcggcgacaatcggtccgatttttttaaaagttttcctaatttaagcttatcaaatttgaacctccaaacttcagcactgcttttttgttcacagctgaccatgggatgaccgattggggctcacatggtaatcaatcgcccaattttttcatcgtattattggccattgacgcagtttaaggggacggaactgacgacgaagtgaatgtgccatttttggcttgnggtgccggcattgagccgagcggtgcgagtcgcaaattgtcgttggccccagtggacttggccccacttcagtccgcgctgctcggaacgccattccgt

SEQ ID NO: 74905 - DNA, 292 bp, Heterodera glycines
ggcgacagtggtggtccgttgttggtcaaaagttacgacggtcagcgctgggaacagatcggagtgaccagccgaggcaatttcgtatgcgaatcgaacggtgagggcagccaattaacaatcaattaactgatttaatcaatttttaattacccattagcattcattaattactcactgtgttatttttgaattgccttttcctattttaggcttcttctcctgcgtttatatctactgcgaatggttggcaaaaataacggagggcgaagttcagtgtctaaataatgag

SEQ ID NO: 74906 - DNA, 2696 bp, Heterodera glycines
atggaagtgattgaccctcgaaacactttattgtcaaatcaagaagtattggaacttctgaatcaagcaaagggacgtcatattccaacaaagggtcagcaaatgaatccagcccaattaaatctcattcattacctttttcgaaaatataattcccttccattttagattctcagaatcataacacaattgtgtatgaggcactaaagtatttgaatgaaacccccgcgactgcgcaacgccgacaggacataatttcgttgattaatgcgctgaaaaagttcaaattgaccggagcagaggtcgtcttgcaaataaatagcaacatttggcacctatcaggaatcctgcattatttaaatcatttagtaaaaattcctaaatcgaaaaatttgactttatgttcgagtccggggaccggaattgatcaacaaaagactgggttcataatcagcgacccaaaaaaacctagaacttttttaatgatataaaattttttgaaaattttattaaagtccgggtccaagattttcagccgggtatcgggtccagccgggtcctgaaaaaatccaaaaaaaatcaattcttttcaattttttttcatgaaaataaaagcttatacttttaaaaaagcatgaaaaatattaagttttacaaataaacgctttattaattgtctaatttttttattgctatttaaaccatttttttgcggtgcgcttttccaaaaaacttttcgggagcaggggctgtccggtggtgccgataggcgccgccgggaaaaattttgaaagtgcttcgagttgttagcagatttattggaaaaatgaccaaattttgtgattttggccaatatgtttacagaatttcttccaaaaatgttcaaattttcaagaaatatatagggttaaattttcaaaatttcttatggggaaattataaaaaaaactaagaaattttttgtaaaatactatgaaagcaacttttaagctttatttacttaatgataaaatggcagttttcaacaaaaattaaaaaaaaaatgcgagaaaaaacatgtgatatgagaaggaatgaacttgagcaaataacgaaacgaatccaacagaataaccattaggccacaggatcgcactccttaacaataaatattaaattttttccttcaactttggtcaacattttgaccctacccacattcttaccagtgtatttttggacccggacctaccggatcgggtactggattttcaaaaaatggggtctgggtcttagaaaagccgggtatccggatctggacccggtcgggtgcccggacccgtctaaccctaagatataccactcattttttcacatttatttcacttcacagataattcaaattgtaaatctacgaccaaaacaagcagtagaagtgcaactgatcgttgaagaatcggaggaaaggcttacggaggagcaagtcgatgaattagttgagacaatcatcaacagtttacctcggaattattaatggacttttaatattttaattcgaataaatcattaaatgtaaaatatgtagaaatcaactgattatttaccaaatgttttgtcttttatcgtttttcatttttgttgttatttatcttcgattatttcagacaaatgaacaaaagaactctttggcatatgcttctcaaaaacaaaatttgcaatgattgtgtgcgacgtattattttggatggcgcgagagttcaatcgacctccagtgtttcaaaaaggtgccaggggtctatgttagcagaaatgtgccaattttatgacttctaccccttaaaatgcatatttttcctgcgggcattttttaaaaaacaaatttgaaaatgcttttttatgcattgaacttattcctgtgtgtgccgaatgtcgcctattatttttagcttaattgtgcataaaccaacacgggaagaaattgcgcaaagagtgaccaaactgctgagagagttccacttggccaaggaatggcaaacaatcgaaggcattggcagggaactgagggaacagttgctgaattacccggccagtcgaatggtggtcattgaggtgttactcaataagaaacacccaaaattgccttagtttgaagcaaatttaggaccgaatcgtaatcaaaaatattaaaagatggtcaaaacgatgttcgaacgagcaaaccaaggcattgttgcaacagtgcttggcattgtgtggaacggtgccggaaacgaagaacccggatggcattgtcgcgttttgcgaaatgattaagccttcttcccccccccccccctacactttacaacgcctcctcgcccggtcaatgatgcctttgcttatccaccctctcccccttcccccacataaagcctttaaaagggattgttccctgctcctttttgcttattccctttctgttccctattcgtgcaatttccgctttttccattgcgtcccatcgcttttcaccgttgcatttcttcgccaatttaaagagtgatcgagaaatagtgatttgttgaatttttgtgtgaacaatttttgagtcctattcaagagtctggaagggttaaaatcgcattgggcaaatccccgccaatcgcgacaatataatagaaaaatttcctaaaatagaaataagaaaggaaatacacatgcaccgccactgctaaaag

SEQ ID NO: 74907 - DNA, 275 bp, Heterodera glycines
gaagcttactgtgggtgtcactattgccatcattttggtttgtgtttgtgtcatctgctgtgttccgatttgcatcatttgttcctgtgtgatgtcaaatattgcgcgggagaagcgattccttcgtcaaatgtcttcccacaaccgtgttggaggtggagggtctattggacgtgtgccgtgagcattttggcatttggtggctgccggcggcacatttgtcttggacacggattggatttttaaatgcgaagtgaaaactgatggacaataaa

SEQ ID NO: 74908 - DNA, 357 bp, Heterodera glycines
atgtcatttgtgaactatcctctggatagaatggaagaccaagtaactattgcaattgttgaaagaaatttattccaaaatataagcgctcctccaaattctaatgccccaatctcacttattgataaggttcaccaaggtgtaatacgtcttgaggatgccaccaaccgcagtttaagggtaattaataggagggcgactcaaaatactgatgccattaaccaaacaacagctgatatgaatgcaaacatggacacaattacgactaggttagatcaattggttgataaagtggatacacttgaatggtcagacaccaatgataacaggacatcactacaagggaattgcaccgtg

SEQ ID NO: 74909 - DNA, 282 bp, Heterodera glycines
atggccgaatcgaacatgaacgcatgccccgcattcggagtgtgtcccacatgccaatggcattgcccttgcagtaagtcaaattcataatttttttttttctcccccttcgatttttcgctgaaattcgatctctaattttttttcaattcacttcaaatatcgtttattcacatactcattttcaattccgaattaagtatccaaagttactgtattattatagcagcatttccatatgaactttgctcattacagtcacttaatgttgatgatttctaa

SEQ ID NO: 74910 - DNA, 1864 bp, Heterodera glycines
atggttccgaacctcattggttcggaaatgacgccgatggcgaggatgggtaagaaaccaaccgtggtaaaattttttattttttttttaattttgagaaattcccgttagggaatcagaaaagacggccgtctataaataaaaaaaaagaaagaaataacgagtacctctaaaaaagagaagagatgtctataaatataaaaaaaagaatacttttacaaaagagagtgagaagagacgtctataaaaataaagcgctatagaaatgaatggacaaaagtgatcactcaaaatttggcaagaaaaatgtcccagaaatgaaagttaataggccaaagtctcaaaagtgaaacgccaaaagagctaaagtgaaaagcctaatatcccagtgctgatcagtttaaaaatggattactgtagagcgtcaatgaacttacctacggtaagagagagaaaaacaaaatgggattggtttcaccattaacataaacattcaaatcgtaaatatgcgccgtgcggagaggggcctaattgatctttgccctaagcaaaataacaaatttgttctctggtgtgcccctattcattcgccaaaagcaaaatgaagcacaaaaacccaaaagatggacgacgatttggcgtcgcttcacttacaatgtgcagcgatagtcattcccctcgtcagaggatgaacaaaacaaaatgttattttagttttaatccaagtgccctcgtcagaggaatagaaaatttttgaaaaatatttatttagctaattttttttttctcttttattttaaagtgccaattaccgtctttaattaattggaatctaagcaatcagcatttggcattggatttgaggtagacaatcaattaattattcataaatctaattagtcattaaaataattagttaagtaaatttaaaaaaaaaaaaataaaaaaaaacaatcttcttttgacgcgaatgtttgttaaaaaaaaaaaaaaaaaaaaaaaaaaagacaaccgaaaatatttatgttttttgtggggaccaaaataacccaaatttaataaattaaaaatgttccaagtggctttttatcaattcattttttatctttatctattttctatacactatatatatatatataattgttattatggcattaaaaaaaaaaatgaaaacgaaaaaaaagaagtaaaaaaaaaaaaacattcgaaatcgaaactttttgggggtagcgtgaatcgcaatggaaatcccggaggcccccttgccacctaacccataacaaatatgcgatatttccccaaatcagccaacgggatgacctaatgtggttcgttgccctcaataagtgagaaatcgaaaaaaaaatcaaaaaaaaaaaaaaaaaaaagtcgaaaaaggcataaaaaataaataattgaaaaatgccaaatgccttaacatgccatacaaattgccatttttacatcatattcatcgtcctaattactcatttatctctaatacaaaaaaggcagttggaacatgagttttccttacatgtttaattaatggtcactcatttcgaacaagaaatcgtatttgacagaatttgagttgtttttttttctcacgtattttacggtgtttttcgcggttttggttgcttgcgtttctgtaaattttcagtaaatttcagttttgaactcagcacagacactcaacgcatccggcacatttggtatgtacatcacttgttcagtgaatggttattatgtggtaaacaatgctggtacataaggtttattttaatttttgggctgatattactgattcttcgacttattcacacaaaaattctcagaaatagggtcaacaattaaa

SEQ ID NO: 74911 - DNA, 1921 bp, Heterodera glycines
atgttgttgccccacggaaagacagcggggcaggtacgggagcgcgacgcaaagcggatggaatacatccgggcccgagtgaatcgtgtggacgtgtactgggagtgcaaaatcacgtccatgctagagcggagcaaagccatgaggaaatccttcgcgaactacgtggatgacgggccactggtgatcagggaggcatttacgggaggacggaccgggccactgaaattgctgcgcaaggcggggcccggagagaagatctcctattacgacttcacgtcgttatacccttacataaagtcagttctttttctccatttgacaaataaattttaaatcttaagcttcaccactcgctatcctgttggacacccgaaagtgcacgtgctgaaccaacaagtgcagtggacaagcgcagcggacaatcctttcccgctggcgctgctcaaagtcttggttgtgccaccccgccaaatcgatgttgcagtgttaccggtcaaagtggacgaccgactgtgctttccgctgtgcatcgcctgtgccaaagaatatccaactggaggcgtggacaacgactaccactgtcagcacactgatcaacaacgcgggtgggtcagcacctgtacatcgattgagctcaacgcagcgctcgacgagggttaccgcgtcacgagggtgttccgcgtgctggagtacgaacagagcgacgacaaactattccgcccctacattgctgagttcatggcccagaagatccaggcaagcggttttgacagcagcataagaggggacgctgagaaggaagaacaatttgtccaagagtgtgctgagcagtttggcatcaacattgacccggcaaaaatggtggtcaacaaggggaaacggtccctggcaaagctctgcctgaacaatttatgtgagttttgacatatgaattttgacaaaaaatgtaattttcagggggacgtttttcgcttcgaaatttcggtctgtcccagacacttataacggacgacccggtaacgctagccgaatacttggacaacaaatcgatcgaagtcacatcgattgatcagctggacgagatgcacatcctcatcacctacctccacaaaaaggaatgggtcgatgagcacgcttgctcaaacatcggtgagaataaacttataaaattgtgctaattttataactttagtcatctctctgtggaccacttccgctgcgcgacttgttctgctcaaagccatgcagaatgtggttaggtcgccggggtccgagctactctacaccggtacatatgccctaacaaaattacacaaaataaattgcaaatattttttagatacagacagtctcatcctcgtccacccggaggagcgatgtccgctcaaaactggtccacacctgggccagttcactgacgagtacccggaccacgacattgtggagttttgcagtgggggtgcaaaacaagtaagtttaatgtttatacattaatttgtattgattatttcacattttagtatggtctgtgtttgcgacgaaagggagctggggcggatgccgaaaaggaatacgtgctcaaggtgcgtggattgacgctgaactacgacgtgatcaacaaccaaggcatgcgttacgagacgttcaaagaagaagtggtgcggtacgcaacaacgggtgattatgagccaatcattgtcacttatcctaacttcctccgaccgaacattcgggagggagggagggtcgtatccatgcccctacagaaatgttaccgaccatatgttgggaagggaattataggcagcgatttcaatgtgaagaattttggccacactttgtaatgtttttgttttctgatgtatctgtctttctcatcaatacaccataaattgtatttaactcgtttttcaataaa

SEQ ID NO: 74912 - DNA, 1164 bp, Heterodera glycines
atggtggccaaaagccgtggctgggcaagttggaagttccatcgctaccttcacagccaacacggccaacagggttgtcttcaaagggatgctttgcaactgatgcaacaaattggcgcacggcctggactcaatgcgtatgatgctgaaattgttgtgccccgggtggtggaccattggaacaacagccagcaacgacatcgttttgctgtgtttatttttggctccacgggtcagtacaagccgctgtacaaatacatcaacaactattacgacacaccaatctcactctacctaaacaacggccattttgatggtgtgcagaaggaatatggcttgtttggtcaacactactgccttgaatgtgagaagccatatcaacgaccatcaacacatctaaattcttgcaaagcacgctgcatgctttgttctcgtgttggacctcgcttcccctgctctccgttggatgggtttttccgtgaatgtgcggggtgcaacaaggcatttcgcaacaacgactgtcatcaacaccatttgacatcaaacttttgtgtcgaatcgaagcagtgcaaagagtgtggagttatttggaatgttcgcgacaacaatcgaaatggaagaaaagtaataatgggaaaaatatattaaaaagtgcgattgtattagggtcacaaatgctacgagacgtattgccaattatgcaacacctaccacaatcccgagaggggctgcttcatccagcaaattgaaccgaaagaaaacgacccctaccggattgtggcctttgacttggagactatgcaacaccaggcgatggacccccaacaacctgataagagggaacatcagccaaacttcattgctgcccgggttgcatgccccgactgcattgaaaacggcaaatggaagagggaaactgcaggatgtcaaatctgtggaccacatcggaccgttgtgttctgtcaacgccgattcttgggcacatacgtggacaagcaagtgatagctgagaacccactggagccatttgtgaattggctcgtgttcgaactgcccaataaattcgacacctatgcctactcgcattttggcggtcgcttcgatatggtgcttgtcttccgagagctgttccggattggttttaaccccgaaatgctgcgacgg

SEQ ID NO: 74913 - DNA, 326 bp, Heterodera glycines
atgcgcttatgcaaccgaaatcagaaaggtaaaacggtgtttagaagagctacaacagtgatcagaagaggtacaagggtgattagaagaggtacaacaatgtgaaagaggtcaacatgtttaaaatcaaataaataaggaaatttttttattaaatattaaaaatcgaatgcatttaatttaaaaatcttataatttaaaatactctttttattaataaaaaaacaacgttgaaaattaataatatttattttatttaaaatgaaattaatttttttacaaattcagaaaaaaataatgctattctttaatttaaaaaaaataaa

SEQ ID NO: 74914 - DNA, 1060 bp, Heterodera glycines
atgtttggatgggcattttcccttaattttgaccatcttcaactcggcctcaaattgtcactgatttcgccccatttcgatgttttagtggacaaacacttcaatggcaaaagtggattcatgccgtaagttttgagtttataagcacaaaaattttctcagttccaaaaatggcctgaaaattaaaaaattttcgaaatacgtaatttttttgattttttttgttagtgtcaggttttttttaagtgtttaattgttatgtattttttgggggcttaatgaattttaagctgggccttacatttatattttcccttatattcatttcttattgttagtttggcaatttcatggcagaaaattttttttttttttttttttggaaattttgtaggtttttggttttaaatataaaaattttggttttctgtaacattcactaagattttaggccaaaaaatttttgtccaacacctattgcttcttttccgctatattattaattttcataattttagttggtttgcagcgatgtttggatggacattttccctctttttgaccgtcttcaactcggcctcaaattggcacttctttcgcatcgtttcgaacttttggtggacaaacattgcgatggcaactcgaaattcggcaagtttttgttttttgagtttttttgtaaaagtcaatagtcttttagggttttcattgtttttttatgtttgtgtgcccaaaaaccgggaccgcctatttcaaaatgactttaaagtaatttttttttgctaaaatgaccagttttttaggctttcttcttttttctgagctttttcaatttataaaattttaagtgctttttccagcaatttcgcaacgacctttggatggacatcccctttttgcccagctccgcctcacattggcactgctttcaccccgtttcgattcacaggtggacaacaattagatggcaaaacgaattccggcaagtttttagagtttttaatgttgcttaaggattttgtgcccaaaatcagggctccatttcaaaacggccaagaaa

SEQ ID NO: 74915 - DNA, 581 bp, Heterodera glycines
atgcccgaagggccagtcagcgaaccgcaaatggtgcgacacatgcccgaagggccagtcagcgaaccgcaaatggtgcgacacatgcccgaagggccagtcagcgaacagcaaatggtgcgacacatgcccagaagggccagtcagcgaaccgcaaatggtgcgacatatgcccagaagggccagtcagcgaaccgcgaatggtgcgacacatgcccagaagggccagtcagcgaaccgcaaatggtgcgacacatgcccgaagggccagtcagcgaaccgcaaatggtgcgacacatgcccagaagggccagtcagcgaaccactggtgcgacacatgccccgaagggccagtcagcgaaccacaaagaaatgtgaatcaaaaaggtgttaaaggacagaacaactaaacattccaaaaatttgcaaaatttctatattttcaattggcagtttaattgttcttattattctatcaaagaacttatagcgtacctcgctatacagtattacctattccatcctcagatttgggatagaaaaactatttctatatatagcaaggtataatttaaaataaa

SEQ ID NO: 74916 - DNA, 4458 bp, Heterodera glycines
atgacgaacaaacaaaaagctaagagaaagaagaatcaagagcggtaccagcggcaggcagagcaatctgtcagcccaggtagctcacccgtcccagacggaagtgcagatgagaatggggtgacatcacacccgggcatcaaaacgcccaatattggtgctttgaaattaagcaccccggcttcttccatcggaagtaaaagaaggggcagacccccaaaagccggagcggagtcaattgtgacttcgcaacacagtgtgtcatcagttggcacacaaattgtatcggccactcaaaatgaagagtcatcgcctcgcaacaaaaaggggaagatcaacgattttgatcgacccatgtctgctcttgaggcaattgcttcgacgccggtttccacacaaaggaaccgtggagggcgaccatccaaaaaaagaggcggtcatgctggctcaggcaggagcaaagctaatgattccataagcgagagctcgttaatggatcatagctctgaagctatcacaaatgtggttgttttgccaactgtgactgataaaataaacttcagcacagtgcaaatcaatttcgcaaccacgcgaaattttgcctgtaaaatttggaagtgggcagcaattggcctttacgaacgtgatggcgaaacagcgcttgccccaaggtctggtccaagattcattgaaacgtgctggaatgatctgacccagtttctcaatgacggctttgctgccacatatttggcatacttggcaagcatatcacaacgaaaagtggtcgttgttgacccaatggtatgggaaaatggcttggaccgtgtcatgcaatataaaaatatgacatttgggtatgacccaaatgttcaggcagaagtcattcttttgccagtacatttccctggacattggactctaattatccatgatgttcagtgcggtacacattttgccgattctttgcctaccccttatggcaggttggattggcaactgacggaaaaaattggaaagatcatttctgacattttgccgtcaacagtgttgaccgggatttttaatgccgtaaatcttacggtacaacacgatggtaacagctgcgggtacttcgtgtgcctatatgctgaatcatggctcatgaacaatcgcacgtttgttctgccagatttgtccatcaattatgaaaagcggcgcatattgtggcacattaacgagctgtataactctgataatgttccatatcatccaagggaaggggtacctactccgtgcccaattgtctatcgacatgcggatgaggctccatcgacatccaaggccgctgagccagttgaagttgatgatcatgatgatataatgatcatcgaaccacagacgagtggacaagcagttgatgccattccaacacaagcccaagtggcaggtgaaaaccaagctgacacgcttggattggtgtcggaaacttgcgtcccgcaagagccaattgcgcagactgacgattcaatatttgtcagaccaaagacgcctccaaggcgttcatcgcgcattgggagacggcaatcagcttcgattagccgttctccttcacccgcgccgagacgtcggtcatcgacaaatgccgctgagcaagtcacagcatttactcggcgttgctaccttgtccacaagggttggtgctgtgctgcagcagcggcaaagcattatccagaatactcagattctggtaagcttggtgacaagaagtgttctcactgtggagcattacatttcccacacgaggacagcagcatttgctgtcgtcagggaagggttgttttgccaaagctcaaccctcacccaaaagagcttgaagagctaattgtggaggaaaaacaatcccgtaaaggaaaagaatttgtacgacaaatgtcgcggtacaataatttgctccaatttgcaagtgtttcggctggccataagccaagtcctgcaggcggaccgatggcagtaattctcaacggagaattccatcgccgcattagcagcatgcaggcgggtacaacacagatacctggcttcggtcagttgtacattctggatccagttgaagccatggagcagcgacgaaaaaatcccacctttacgggagagaaaatcacaaacgaggaagagtttgtgcagggtcatcagcttaatgaagagacccttgaaattttggaacaaatgatccaagaaaatcacccggctgcatctgcttacaagcaggctcgtgagcagctacaagagttgttaagacaacaaaggactgaagagctgcggttcttcagaatgactttgttggacgagcgctctgccccgggtggtatgaaagacccgaagttgcatccccaccagatcatcaccccctcaacgggtgaagggatgttcgcgattcatgcggatcccactggtgcccctgcacctaaagggatatgggtcgaaaacaagcaagggcagttaaatgaaattgccccgttcagtgcatggactgatagcttgacctatccattaattaagcctaagggcgacgatggatataaaattcgcattccatatgccaaacctgcacaaagaaggcggaaaagcgacatgtctgctgatatgtttgccactgaagcaatgtccgatgatgacatgtgcgagactgagtcaattgcagagtcagatgccggatctgaagcatcgatacaatcagtgaccagtcgttatgacaactcgaaaaaatttgtctccctgcgagattactgcaagtattatctcgccataagggatgaaaatttggagtggcaataccaccacattctttcatgtggaggtggtcttggacagcgctgggtcctagaccaagcgtccaaaattgactggcaaattgccacttttttgcgccgtccagagatggacctgcgcgtaagtactccaaaaaatttgctgcagtacttggtaaaccaatacaataagcagcaagttcggcaaaaccccaatgctcgacaaaagactgtcgatgacattggcagcgttgttcgcctttctgaaaagaatgttaattctcttcagtattggaaaaaaatgtatgaagactgcaacaccatttttgcgcgttgccacgacgcaaaaaaggcgcggctcttcatcacattcacgaacaaccgtgagtggcccgagttcaaggagaacatttacaaaaacggtcaaatgttcactgaccgttttgacatgtggatgcgtgtatggtgcagcaaaattgctgttttccaccaggagctctatgaaaagagtttcttcggaacaatccttggctcaggcgagtcaatggagttccaagggcgtggtggcccacacgcacacattgtagcccagactgacctggacgcagtcccagaagtcatccaggaatacatatgggctcatattccacctttgccagacaaagatgatgactccccaattgcacaaatgcatcgcgaagtacgagattatatgcatatgcaactgcacagatgcagtgatagttggtgcggtccacgtgaccccaactttgggcggtgtaaaaaaggcttcccagccccgtactcgaaatgtacgattctgcacccggacaggcccgcgttgtattaccggcctagcccaaccgatggtggtgccaaaattgaggtgaacggcttaatatacgacaactcacaggtcgtgccgtacaacccatacattttgctgcgttaccgagtgcactacaatgtgttattcgcttatggtaacaaagcgaacatcaaatatgcactcaaataccctttcaaagggcctggacattgttatgtcgagtgcaaagaggagtccggcagcaaaatcggtatcgatgagccggctcaatatgccaaaatgaacttccgtggtgctacggaagcttttgcagttgtgcattcaatgcaatttgcaaaactctcacatcacgttgttcagttgtccattcatttgccaaaccagcagcccgttgtatacagggccttccaactggtgagcaaagctgaggaaattcagcgaggcgagctcccagagacgccatgctctgcctattggaagcaatggcaaaacgaatggcagcatgttccttcgctcaaggacatgctttttgaaaaagtcccagagcaatttagatgggcaaaagatcgatgggtcccatataaaaggaagcctaccaagaggcccccaatcggtcgtgttgtacctgtcgctccaaaggacattgaaagatttgcactttatgtgctgatgcgtcactttcctggtgatcccgaccacttaaaactggtcaatgggcagcagtacagcaccttccaggaggctgctttacagcatggtcttcttgaagatgaccaaatttggcacaaaacgctcggcgaggcagccttgcatcgctggccggatcagatgagatggctcttc

SEQ ID NO: 74917 - DNA, 85 bp, Heterodera glycines
gtttttttggactcaaatcggcaaaatgactttgacacacatttgcttttgatcagattgtatattctgtttcaaattaaggaaa

SEQ ID NO: 74918 - DNA, 2188 bp, Heterodera glycines
atgtccctcactaatcatgataaatctaaagaccaagcccaaatggacgcatcgatccgactgattgacgatgaaatggaactgatcgacgctgtgaaggtgaacgacaatctctcgtagaagaaagtgactgttgctcatttgttcaggattttctcattgagtccaacacaaaatattcggtcattggtgcgattggggcacaaggtgaaggaattcagaaaaaacagcatttgatagagaatttaaggcactggcaagtcgaccatcctcagttcgtaaggttttctaatgatttgcacatcccttattttaaggtatgctcgccgggaacaatccggtggatatgtaccggtgggtggcagggatttttttggatttcgaagcattgtacaatgcgtgaattgagccaatgtatcactacagtacaagaaacgaaagtcaaattttaccgaatttttagtcttaaaatactttttgcctttggttttcggctaaatttgtgattatttcttcaaaggcttttccattaccagtattaagccagtacatttttcgtcctgctgcgagggaagctgttgaggcgtgtcgttaccaaaccacaaaagtctcagtgtatgttgtgcccaaactgcgcactttctttttggactgtcaggtaaagtttcgaaaataggaaaataatttataaaatttaatacaaaatgtttatgaaattttttagcccttaaattgtgctccacttctcgaggacttttgccgtgcgcgacgtgtcaaaggggcggaggcattggacgcaattgaagtggaagtaaaattttatgtgaatggaaaggtcatttctcttttatcaaatgctttttagagcctccacttgcttttgcttctgtactccatttgccattccgtcgtcctttgcgtcgattggttcatcgacttgagcattgtgcggcgattgatgcgcattgagctgttctacccaatacttttcccacaaagtgaagcacgacgagtgaatttgggtgattattggcattttaaattcatcctcattcaaaaaattttctattgttttcctattcagttgtccttcaccaacgtgccaaatccatcgatctcgagcctcttttggtgtcccaacggatgcgcacgttgaatgccatgtttgagacaagttctttcaacgttaacggcggactgacaatggccaagcttggattcggcatttatgagcatatttgtgccgatttaaacgtcaattacattttgttgggcgagctaaaaccccggacgagaatggatgaatttggtgagtgacaaagtccatttaattctctgaatatcttatgccttaattgatttatattttctttattgaatgtcgcagaaaaacatgtgatgcaccaagatgattatgggacagtaattgcaaaacttcgccgtcagatataccaattgcctaatagtcgctcaattttcgctaaaaaaacagaggcccaatggtctgattttatataggtagttgaatattttaaaaaaatcattaacattttaaggtttaccgagctggcagaagcatggaagcgaatccgagaggaattgccgacaatgacagaggatggatgcacatttaagcgacagcgtggcattggtgcccattcacatttgtttggaattttaaatcctcggtactcatccttcagtgactccattttcacgcaatgcatccaacgatgtgtttatgttgaagcaacgaacggcgccgcagggaagtgaaattgggcgcgggagacaaaggcgaaggagccgtaagggaggcaccaattgggaggacaacaccggaagcatcctccggagagaagcagtgaattttaccgaaacagctacggatgaaaccgaggaagtggagtcgaaggccaacgaacatcgaaagacgacagcgacagccgagacagagggacaacagcaccaaaaacggagagtgtggcgaacgcgaaatcgaacagcacttgactgtaagaatatgacaaggaagcaatggaacatcgagcagaagacgaaggaagggtcatcattaaagcacaaatctgttgtagaatgggtggacagagagcagcagttagacgaaagtggaaggtcgggcacaccagaccatggagacaatgaagaatttgaccaacgggaatga

SEQ ID NO: 74919 - DNA, 129 bp, Heterodera glycines
atgccgaacattatgggattgcatggtggctccatgattgccatgagaagcaaagatagtgtggtgattgcatgtgatctgcgcttgggagagcaagccatgaaaaacattgctactaatgcgacgaag

SEQ ID NO: 74920 - DNA, 4113 bp, Heterodera glycines
atgtccacactcctttcccagaaagttttttggaacaaagcgaacgtaggtgcttgaaagaagaaaatctaaattgccaacgcaacattaaaggccaaatggtattcaaacagaacgccattttattaaatgtttgtgctaactttgactttgcttttcttttgattttttaatttttatcatcacaaatcatcaaattttgctaaaaaaaagaaataagtgaattttagatattccatctttcaatttcaatggatgtagcgaattcagtgcaagaaatattggttagcttatcttttaatagtttattttttcaattgactcagattaactgttcatcggtggaaattggcgtatatttttttgcaccaactaaacaaattgaacttacacatgaatttgttacattgccattggacaagggaaaagaaacgctgatgctttccctttcattcaaacacattactaaagttgaagtatgtcatttaaattggccacttcaaatgagtgaagttgaggaaaaaattttctgattgagttgatttcttgaataaaatttaatgggatatattccctttttattatttatagtttttggataattcggaaggagagggagcgggtttggtcctcttcgtcaatgatttcatggcgagaaagatccaaacttacatcgaccgagaaggagctggctttacggactttgggttggaaagctacacaagcaactccaaggataagttggtttctttctatttgtctttttattttacacaatatcagtcgcattttcaagatttattgtgttggccattcaaaacaaagagttgaaattctttcaccgtcttcacgaaattcttcatagagcggacgcgtaccatcgaaattatgttattcagcaaatgaacaaaatcaaaaagaaacattttgacattcccattacatttattggtcagtttgtgtctactgtaattgataacccactcatataacttaatttatctaattacaaaattgttattagtctgaatttagatgtgatctcttcatctcagtggaaaacactgaataaattgctgggtaattttcaatttcagttacaatccttcgctttgaccaacataatcacatttaaggtattgcaagatccgactttaaacaacgccagctcaaactgatcgacaataacaatcagaatggcgttggttctcatcgagtgtcggtcgtttcgactctttctgacagtccgaatgtacacccgccggtgaatgttgaatgccaacttcgagttcaagttggacaagtgcatcagcaacaaccaaagtgtcatctgccagcgtacaccgtaatggcccttccaattctccctcacaatcagcccagcgcggtagttacaatcaatggttggttgatcgaaacgtatttatggaaatattcacttaattatgtgatttttccgtcgttaagctcctttgccttcttcatttgttttgagtgttcctacttctcatcagtcttccgcttctcctcaaatacgcgctaacggtattaaaaaacaaaataatttagcatttcattttgattggttatgaaatataatagttttttttatgtgttgtactgctctagtaattgtcccttcagcttctcacaataagtcttcacctgcgtttttggccattccatcccttcggtctccatctgccgccgttacgactgtcgttgcttcccaattgtctccaactctttctacgcaattacctatttcaagtcaagacacatttgatatgcttttccaacttgaacctgtaccaaatcatttatacaatgaacagcaaacgccgagtctcaataatcacagtccgacggtatttggtgagactacagtagcccaatatttgtccctaggtaaagcgagcattgtggaaaaccccaaatattcaaattttaggcttaaacaattgtcctttttagcagttgtttgtttagaatcgccgagcgttaataaatttctgccacggtcactcaaattgccaaaggctccgccaaccaatggaaactctcaaatctgcagaagcgcacctccttttctctctattcaaacgccccccagcacttcgcaagacctgcaaacgcaattttcaccccaattgcaaagtcacagaatgtcaaaaactacaaccagcggttcagcaaaggttggcaaaagggagagagaagtgcatttgattgacgacgaggaaaatgagtcggaggttggcctcgtcatatttttggtggaaaggacttgctcattttaggttaaagatagtccgtccgataaacgttccaacgacactttgttttcatttccaccaaccggaagagattcctgttctgtgcattatgccgatctgaagtacttgtcgaggaatttcatgctcaatgatacgatcatcgatttctacctcaaatacattcatcattggtcagtactctcatttggttttttaatttctttttagccttgtcccacaggagaggagagcgagaattttcattttcaacactttctttttcactcgtttaacacagcccccagctggtggaaaaccttccaatacggttactgcaactactaaaattcgaagagttaaaatgaattttttaattggtcaaacaaattaaccaccacttttaggtcaccagcaattttcaaaaagtgaagaattggactaaaaaagtcaatctgtttgacatggattatattattgtgccgatcaatgaggacattcattggtactttagttttgcttaatgtcactattttgcatttaggtatttggcaataattgtaaacgtccgacatggcatttgctctctcaataccacggacaatgaatccatttttcctacttcaagtcattattcaccagtgccgcatcttatcgtgctcaattcagtgcgttatcatttgcaaatattaccccttatgccggcaattcgaaaaaatatatttccaacggtaatatttcagctcatcgacccagctgaagacaaacatttggcagttagggaccaactcggagaatatttgcacttggaatatgcagataaactcggacaggacaccaagacttatttcaataagcaaatgatggacgtggttgtgccgacgatgctgccccagcagaagaacttcatcgactgtggactatttctgctacattttgcgcaattattcctcagcaatcctccaaaagtttgtctgatcaacataatataaaacaattttaagtacaaccatcattatcacatacttaagttattgataatcgtcatcttttaaatactgtaaaatataaaaatcaaagatttgacgcaattagatggaggtttaagcatagatttcttggcatcaaaaaaaaacagttagaataattgttatttttactaaaccaattttaactcgaattttattttgtcatcaattttgaaatctgattttaatttttgcaagtgaaatttattgacgatggtggtgcattaaactatcgcttatttttcttcaatcaatcatagaaaatttttcatgacataaaagcgacactaaccatgcaaaacccaataatggttggattaattgcagtttatatcgaggcacagctcatttcgccgctggtatccaacttttaaaatcaagcataagcgagatgagttaagaagtgtgataatgcaattggcgtcccatgtcaagtcctctgatttcgtccaacttccaactccgaaacggaaaaacaaaaagattggccgtcgttcgcaagtggataaaatgcagatgatcttagacggtaagcaaaccttaaacattttcttgtaaaaggagcattcacatattcaggaatggcactgatgggccgaactcgacgttacagcgactcggaattagacggcattatgaaggacgaacatttctcttgtttgtacagaccgcgctcgttggactcgctgatatatgagaacagagagaagccgctggtgttgcagccgccgaccattgcagaaatgtcacgtttcaaacaattgcgaagagtgcggcaggaaatctttgcctcccaagtgcgccagggataa

SEQ ID NO: 74921 - DNA, 1705 bp, Heterodera glycines
  unsure (1)..(1705): unsure at all n locations
atgcaaatatgtgtattattaattttatttttaatcactttaattgatcaaaccgaaacagaaaagaaaaagttggaacaaaagtcatttgatggaatatttggagaaaaatgggaagaaagggaagaagaaaaacgaaatgaactcaaaaaaagagaaataattggcaaatattataaaataaaagaaaaaataaagcaaaaaggaagaaaatattcaacaaaagaatggaataaaattaattcgaaaatagcgaaaaaattggggacaaatcgacacaaaatttatgaatggattaaagaaattggactttataaatatcacaaatcaaaaactgatgaacaaaaacgcaaaattgtgcaaaaattcattgtaatgaaaaatgaatttaaacaaaacagaaaatattcgcaaaaagaatgggagaaaaattatgccgaaatttgcaagaaaattggagttagcctttcagtaattaagaaatggaagaaacactttggcattcgcagtannaataacggagaaagaaaaaatggaaaaatgaaaatttactggaaaataaaaagagaaaatccgaaaatgaatgacatggaaattggaaaaacattgaaaattagtcgaaaaagcatttcaaaatggaagaaacaatttggagaagaattgttctaagaacagtagaagaattttttttcccgccatttttccttcatttattttacaaataaaaaatgattcttattttgtgcccaccctttcaaaattgtttttcgtgttctatcgatggtggcatttttttttctttttttttttacaaaattttaattatttttctgaaattgagcaattttagcggttgagagcggccagttcagtgttgtccagtgtagggtcgacaactcgtcgttccatcggtgctgttagttttcgacagtggtgatctcgacagtaaagtttgtttttaaaaacttgttctatatggtaaagtttcgataaattttgaaaaattaaaatgattaggacaggctctttacattgcagcgggatttgcgattttcgaattctgctataagaaagagcttgtagatatttgcatcttggcactcaacgccagcatttgttagcatattttcccacacgattatgcatattcgttctatattcaagttgttataatcattaaatttaaaaatcgtgatttcagagttttatggccataatagcaataatagcaattatatgatcattttacaagcattttttaccgtagtgccacattgcggatcgacatttacggaccagtatttcccgattgaactgtcaaaataaagaaaaaaatttttttttgaattttcaaaaaattaaatactccccaaattgaaattagtgaaggtaagctgatgcaaggcgatctgttttaattggagaattttattttatcttagaagtcccaaaacaagtggaaatttttttcttgcttctctacacgtagtgaaattagcgaaaaaattcgctattttaatacacataaaagtcagttcaggattttataccaaggaaaatttttacgtgtttcacttccatgctttggtaaagtcggtccgcaaatgtcggctaaccttttttactcctttatttgaatggaatacaaaaattatgagaatgaaaagaatacggtgaatacaaaaattgatgtggtcaaaataaa

SEQ ID NO: 74922 - DNA, 315 bp, Heterodera glycines
atgcgcgagaatgcgataagcaaatgcattgcacgcaagtgagattttgtgcacattcaagcgcttttatatgtgcgtaagagcaccgtaacttcgtctttcacgtagcgcgcagcactgtacattttcgctatataaaagcacgcaaatatgatgcaaaacttcattttaatcagaagattttttgcaaaataaaaatgaatacttttaataatgttcagcaaaacatgccggaagaatctaacaacaacaacaacaacaacaccagcaacaataacagcgtcaatgagaatgctcaattatggtagcttgtac

SEQ ID NO: 74923 - DNA, 402 bp, Heterodera glycines
atggcgcaaaaccctgctcaaaacgacgaccaagtcgtttttgccctgaccgaagaagaaatggtggagtgggatgaacgcgagaggagatggcaggaagaatcgcgtctcaggcgtgaagaacggaggagggaagcggaagaaagacggcaagagcggggcggctggcacagtgacatgctgaggcggcaacatgtttgggagcaacaaaaagaggaacgagaaagagacagagagcgatgggagcaaagaatggaggacgaaggaagaaagtgcgacgagagaagcgcagcaacacgaaagaaagagaaagaagaaaaggacaagaatgatgttaccgatcattactctttcaaatgggaagaatggagggaaaaggaaaaattattttttggaaaataa

SEQ ID NO: 74924 - DNA, 1744 bp, Heterodera glycines
atgtgtcaagaattagcagaagaggccaaacaatcaatcgaaatagccaaaaattatcggcaagaaattgggcaaatttatcggaccgcttactcgcagcccgatttaggcattggagacttggcaaataaactaaaagaaacaatgcgcgaaaaccaaatacggtttgaaaggcaaagacctcaggaagaatttagggatgaatttattgcttataaaatttaagaaaaaaataaaaattcgagaaaatgaaactgcatgagaatcaaaggttgtgggacataaaccaaaaacaggtgaaaaaggaaacaggtgaaaataggtgaaaaggaaacaggtgaaaacaggtgaaaataggtgaaatttcacctaaaaatatatagaggtgtgcatttaatggggcatattagagaatgtctcaactagtatcaataaaaagtgccaaagggaaattttgtgatggttatcgctattacaaacataaaacgaccaagttcaaactttggtggaaatgtgaacttaattcacatgggtgccagggctggggttttgaaaaggaagggttttttacaatgacgcgccgacacaatcatcatcctgacactatattgattgaaatcgaagaggacataaaatatcataatttttctgcgggggcaaaatgttttttgggtgacaacaagaattagttgatgatgctaagaaaaatccgagactccaaactgaatttagagatgaatttattgtttgtaaactataaataggatcaagaaaaaaaataccaattaaataaaaatgaattctgaaaaatcagaaaaagctaattccatattattggaagctgcaaaaaagagacagaaagagcatggcgggatgtagctgcgctaacggatgaagtaagcgattttgccaaatcttctcgcgaaacacttaatcgtgcaataaaatctagagaaaaggctccttacgctaatggtattcgagaattatatcttaaaatgtccgattcaatttgggaaatcttcacaatcctggacaaaatcaatttggagtcagaaaaagccgaatctacgtggcgtgatttcgagagatgcaaaacttttgaccaggcaacaaagctcgaggaacaatcgcaaaattcattaatggaagcccgaagattacatttcgagtcccggagggtgcagagccaaatgttaaattatgaaaataggctccaaacaattgtttgggagcatatgggtatataagaaccaaaaaactaaaagggccacactcaaaatggaagggtgttctgtaattgagtcattatgtcatgaggacttaaaatttggctttacaaaatataaaaccaaattttattttaaaaatcctttcctaattaatgcggaggaaaattttaaaaatatcctcgcatcaataatcgaaaaaatttataaaaatgaacaaggaaaattcaaaagcattctgaagatttcttttggttttgaatcattttattgccctcttagatgccctagcgaaaacacagctgaggctttgttccaacatgtcctattaaaagaagaattatattcgcttttctatcctttggatgatgtcataacactagaagtaactataatcccagatgtcgacaatagaccaagaaattaattttataaaaaacaaaattacgagaaattggaaaatttctggaaaaatacttaaacgatcaattaatctcgaaatttttgcaaataaa

SEQ ID NO: 74925 - DNA, 918 bp, Heterodera glycines
atgtccaaaatcctgcgttctttggccattttgttggcatttttatctttgactgatgccattggcttcccaatgcaacaatgttgttgtcccatgcagcaacagtcatgctgtgggggtggaggaggcggttgctgtggccggaagaagcgcgaggcagcggcattagaagcggttcagccccacttcaaatcggacgaaacgccgtgcccacagacagagtggagacaagtcattgacgaggttggcaaactgatcacttatccaatcattcgcatatccctaattgcttgctaattttgtagagcatccgcaccgacgatgccattggctcggtcaatgccattcaaactgctttgtaccgccgctatgccaatcagaagttcctgatcacctgttcggcagctgatgaggacaaaactggcaccaacaaagtgcacttcagctcatccggcgacggttactgtaacttggtcaaagaacgcatttggtgccaggcggtcgcgctgagcgtgtgaaaaacgcatgctatgcataaacaattaattctttttgatctttgattaattaagttaaataattttccattagctaattcattttaatcttttgattcatttgaaaattaacaaaaattaatttatgatattacatatattaggtagcttttaatttttcgaattaaattcatcgtcaatggccatacactgtataaaagcattgcttctcctgaccaatgaatgacaacactttagcaaaagcaaagcaaatcctaattgacttcttcttcagttttcgctgaaaagttttagtgtgaaaattaaaagcgtgctaaaactgtcaatgggcatttcagaggaaatttttcgcatccgaattaatcaaaactaattagaagattttttaagcagcacaaga

SEQ ID NO: 74926 - DNA, 522 bp, Heterodera glycines
atgtcttcctccctcataatgaactgcttaattgcccttaccattctggctgtgtttgtgtccaccatcgatgccattggcatgccaatgcaatgttgcggtcagcagcaacagtcatgctgtgggggcggcggtggcggctgtggtcgtagaaagcgcgacacggaagcggttcagccccacttcaaatcggacgaaacgccgtgcccacagacagagtggaaacaaatcattgaagaggttggcaaactatcactgatccaatcactgctgtcttatccctaattgcttattttgtagagtatccgcgtcgacgatgccattggctcggtcagtgccattcaaaccgcgctgttccgtcgccacgccgaccaaaagttcctggtcacctgctcggcagctgatgaggccaaaaccggcacggctggcaccaacaaagtgcacttcagctcttccggcgacggttactgtaacttggtcaaagaacgcatttggtgccaggcggtcgcgctgagcgcgtga

SEQ ID NO: 74927 - DNA, 795 bp, Heterodera glycines
atgtccaaatttgttccactatttttgtttctgttctcggcacttttgctcatttttctgtgcccgtcgacctcggcccagggccgtcccccgccgagtaagtcaggccggccaactcagcacggacgagtgacaacggacggggaagagaaagacggcactgccgaggggggagcagcggatgtcgagagtggggagaaggaagagccgggactggtaagtcggatatagaactaatcattgtgataagcatcatattctcagatgccatttgcagtttccagctttaaatttaaaacgccctaaaccgaccaactcggaattttcattatgccggatttaattggacatctcagaaccgaatagtcttccagcaggagtctattttgaatttagttaaattagtttttcctaaaattgatagatattccacaaaaatgtattatttaaaaaaacccttttaaagcctgtgataaatatcactttattatgaactcgttttattttattataaaaattaagaatttagagccaaaaactgctgaatgtgctgttgaatcatttgagcagccatttgccaaagattagcacggaaagtgtggtcaattgggtgcaggagacattcggattggaccgacaaacttcacggaattatgtgagaaaggcacaggaaatcaaaaggcaccgaggcgaagattgagaaagaatttggcattttccatcgaatgatcaaagcaggaagaagaggaacaatgagcaaaatgatttattatttatgcaaatttaaataataaa

SEQ ID NO: 74928 - DNA, 1048 bp, Heterodera glycines
atgccaattatgggctcgttgccatttttcatgaaaaaatcaggtactgaagtaaccactttcaataggactcagttattcatcattaaaaatgaaggaaaaatcataaaatcaagagtgtggagtcggcttcctgcacaatttaaaaaaatgtatttttaaattttttgtataatttttccatttagaaattggaaaaaatacttcttatctatttacaatacattttgacactttaagactttttcatgcgttatttaacgtcggacaattcagtcccctttgaaaatagacacttcagtacccgattatatgaaaatattagcgcgtcttaatttgtattttctcatcgtttgggccgttctaaaccgattcagaccggtttggagcggttttgagtttggggacccatttgtcagattaatattttccttaatttttttttctaagtaaaatttagaataatttgttttcattattatccaaatggaataaatttgttgagcagccaacagcaattgacgaagaagagaaggcgcattttgatgagacgaattggcaactgcactttgacgcactgattgatttgatattgaaaagcaaatcatttagagaaaaactcacagaaggtaaaaattaaattgccaaaattaaaaaatattaattttttattatcaaaaaggctttgataatgatgaaaatacaaaacagcgctttttggaatttgtcctgccaaattatcagaaagcggtgctgaaactgctcaattctggtgattttgctgaatttgagaatgaaattgcattgaaaatggagcaggaaaatggagaaataattgaaaaaatggacaaagaaaaagcaaaagccgatcagaaaatgaaagaactgatcggggaagaaaaaaggacaaaaaagaaaaacaaaagagcaatgaaaaggaaacaaaggcaaagatcagcagctgatcagaaagagggagagagtgagcagaaggaggagaaaggaaaagaaagaaatagggaagagagtgaaaggatcagtgaagaga

SEQ ID NO: 74929 - DNA, 2469 bp, Heterodera glycines
ggaagagagcgagcgaaagaggagataggaaagaaagaaatagggaagagagcgagcagaaggaggagaaaggaaaagaaagaaatagggaagagagcgagcagaaggaggagaaaggaaaagaaagaaatagggaagagagcgagcagaaggaggagaaaggaaaagaaaggacagaagaagagagtcaatggaataccaaagagagtgagcagaaggaggagaaaggaaaagaaagaaatagggaagagagcgagcagaaggaggagaaaggaaaagaaaggacagaagaagagagtcaatggaataccaaagagagtgagcagaaggaggagaaaggaaaagaaagaaagggagaggaaagtggacaggattttgctagagaggaaaacgacgtggaaatagtgaatgaccaaaatggtggtgagagaaagcaagcaaagaaaaattgtgaaaacaattcaatggagttaagagaaaaacaagagagaaaaattagaaaagaaaagaaaacgcaaaaaagagagagtgcgcaaaaagagttgaaaagaaaaaaagacaacgatggaaaaagtgagagaatcagtgaagaaaaaattgaagaaaaaggcagaaaaaacaacaatgagagaaaggagagcagagaaaaaaatgaaggagagagtacgcaaaatgagaggaaaagaaataaggaaaaaagaaaacagaaattgaaagcattggaggaaaataaggaaataaacataaatagttggaataaaacagcaacagattcagtgacaacagaagaaagtcaaaaacagggacaagaaaatggggaagagacaatggaaaagggaggaaaagcatcggcagagaaagaaagggaaaaatgccatcgaatgttgggagcggaattggcaaaagtcaatttgggaagtaagtaattacaattaaaattatgaaaatttgtttaatttatccattcttaaagcacgagatatttacattaaagccctgtaaattttcggactttaatttttatttcttagggtttgaaaagcaatgattttcagactttttgccattttgccatttctgtcctttttgtgccgtttgggtcttaaaattgcatgatataaaacaaaaattatttgttggtttgcaggtttcattttgaatagctttttgcactcaaattaccaagaatttctggcaaatccaaacgaatcgaagcgatgctttttggacattggagtttatgtgaatgaaatttggcacagaatggaaatcattggaatattgagcaattttactggggtaaaatggatggaaagtgcgggaattgtggtgaattgggaaaaaacgatgaaattgaggcataaatggcgggaaatggaaagagaatttgcaaatattagcacaaaatctgatgaaaaagcagtggatttggatgagcttgagagtaatttgcacaaaatgctgaaaagtgtcattttaacaacggagggaattttaattgacgacggacaaatggaagaaaaaagtgagcaaaatgagcgaaaaaaggtcaaaatgcaattgcacctgaacaaattcgccaaaacgatcatttggcaaaggcgatttgagaatgattttgcggaaaagaattgggaaaatttggatgaaactgagcaaaataacattttaaaaatgctaacattcaatcggaatgacaaaaagttggcacatcgtttcaacgaacacttggaaaattggaggaaactgacggagcaacggcaaattggtaaaaatggcaaaattaaaaattttaaaataaaaaatattttaaatttagataggaagttgtttgaccaattttacaaacacacaacccacagttttggcctcggttctgtccatcttggcgtaaattttgctgaaaacactcagcaaatatattttggcagtgcaaataatgacagaatgcatttatccattgtaaaattttaattattttaaaaatgtgccgaaatttgtcgtcgaattatttttataaattcaaatttaagataaatgaacttcttacggaaaacggatacactgattgtccatcggttgagttggcattagacaaagtcaaagaaattgtctcgaaatgggtcggtaattaacagaggccagatttttaggcaaacaattctttaaataggcatctcaaataacgtgaaaaaagaaatatggcaaaagggcacaaaatttaaaaaaggtgtcaaacttggcaaaaaaagcggacaagggaaataattgagtaaaaaatattttaaaaatcaaaaatcttgactgaaaaattaattttcaatatatgacttttaatttaagtttttattggaatatttttttaaaaattgggtcgattctttggtgttttaagttttttgttatatattttttaaggaaatacagaaaaagccacgaaatcaaaaaaaaaagttacagacattacaa

SEQ ID NO: 74930 - DNA, 894 bp, Heterodera glycines
atggcacagttggccaaccaaacgattccccaggaggcgatgctccaggcattgtccggtgagtcatcgtccaacagtgatcaaagggtgattgatcagtggtggaaacatttcataaaattattttttaatccctcactccctttcctatgctatttttccggccttgtcgcgactttcagttttttaaaaccgagactgaggctataacaaccgggaattcccgacatggtcccgtttccgagccaatcggtcgtttattatactgatatggagcttttgtgaatggattatttggtagaaaaaaaatttttcaatttgttttttaggttatttagcaaacgacgcaattaatcgaatgatcgaacatcggaactttgcgaaattcaaaaatttattatggatcattaaattttgggcaaaaagtaattttaattactaacaaaatacaattcaataataaatttcaggcaatttcatttacggaaataaatttggctttttcaatggaatttctctggcaattttatgcacaaaaatattcttgttttatcctaatgcttctgttatatttttatttgagaaatttcttttgattattttaacatggtaagcgataaaataaaattttgatttaaaaaaactttttttgttttttgaggaattggccaatgccaataaaaattgatgaaaataaaaagggcgaatttgaacttttcaattggaggccgtcgcgcattgaatttgaaaatggcgaaatgcaaatgccaataattactccgattggacttggtcaaaacacaagcaaaaatatgaacaactcgacaaagaaaataattgaaaaacaattgagacaaagtctgattttaataaaataaatttaaaaatttttaa

SEQ ID NO: 74931 - DNA, 1401 bp, Heterodera glycines
atgcataaaactgatcaagcactgattagtctggatagggcctattttcctggtcattattgcgataccaaaaagagtgataatggaaatgggagtatttccaaagggggcggccgtagctcagtcggttagagcatttcaggaaatggaaaggccctcgttcgagtcccaccgggcgaattagcttttatgtctgctgacctggatggattgactaacataggccatataaaaatacatatcatcgatcagtccgacaaaccgcgcattttttatggagcactagcatatacacattaaaacattaagatatgtttggtacgaatccctacccggagccgagtgactgtcacacagatgaacacaaacaatgttaaagtaagaatttgaagcagtacaccgacccaaaatcaaaaccccagactaattatgtaactttctctccaaccttgggatagaagaatttttttgctatgttttgctgtgaattttcagcataattttaaccctgattttttttttgtaaaactattgaattaagcaatgacaatttactaaattaaatttttcccaagagttatgtgaaattcatcgctggttccacgcagctaagcatgccactgcatactaatcatattcattccggtagtttatttatttattttttgaaaaaaatttttttgcattatttttcaaaagttttaaaaacaaaaactagcaatgcgatagacatcgccaagaaaatgaaaatttgcccgatttatcaaccacattttatcccgtacaagcacaatttttggaagattagttggacaaatggtccaaaaagtgacccgaatcaccaccaaaaaaaacccttcactttttctacaggccaacacgaaaaatttgggccatggcatatgccgtgccgttacgcctacattgtgttccgctcccgaagtgatcagcttgaatgggtggagttccggcttgagcccgaactgaaagtggactcggccgatgatcagcgcaatgactgcgcatcggaggaacacaattttgccgaatcgctgttgaagcattgaactgactactgattggagtgtgacatttgaatgtgtgggttgatcgacaacctcaatcattctcattcattcatataaatcacacacacacaatcagctcaaaaaagaatctcatttttttttacaaaaaataggaaaccaaattttgatcaacaatcattttttatcagcgaaattatgtatttgttttgaaaaattcgttcaaatattatattttaaatattcaattatacatattatttctttgaatatttgttagtgattttatggcatagcaaaatttaccacttttatttgaatgtgataaaagcatcacataatatcatcattataa

SEQ ID NO: 74932 - DNA, 520 bp, Heterodera glycines
atggttgggaagcgatggaaaggaataaaaatttgtttggcccaatggccatatgtttgtgtttctatgcgatgtattaaataaagccttttgtttctagcaatggccaagcagtggaaggaagaaggttcggaaggcaaggcaaagtcaatgtgcaaagagttggccaggctcagatgaagctaaatgctttggggaagggttggcccaggagacacaaataattctttcggcttagttcaccacactgcctgaaattccatcattagtcaaacaattttccccgatccatatcgatcaatcggataaattcgttgatcattccattcattgaagcctctcaccttcgcctatgcttttccttttcatacaacaatcgttgtttctctgttctcctctctctgtctggtaaggaagcacaaagaaaaagcattggttgaaatagagagaaatagtgttgatttcgtgtgaaacagagagaaagagagagagagagagagaaatcggaaaaagaattaaa

SEQ ID NO: 74933 - DNA, 79 bp, Heterodera glycines
ggattatttttcaaaacacctcgtagactgggggataattggagactgcgggattaatagagactgggctataattaga

SEQ ID NO: 74934 - DNA, 462 bp, Heterodera glycines
atggctacccgacttttggggatttgcaacttggggacccgacttttggggattccgacatttggagacccgacttttgggaatcccgacatttggggacccgacatttggggatcccgacatttggggaccgaacgacatttgagcaaaaggcacttagggaaaccaccgacatttggcgacccgacatttagggacccgacatttggggaacccgacatttggggaacccgacatttggggatcccgacatttggggatcccgacatttggggatcccgacatttagggacccgacatttggggacccgacttttggggacccgacatttggggatcccgacatttggggatcgaacgacatttgagcataaggcacttagggaaaccaccgacatttgccgacccgacatttagggacccgacatttggggatatttataaaacaaaaaaaaaattaaa

SEQ ID NO: 74935 - DNA, 774 bp, Heterodera glycines
atgtcttctattgataatttgcggatttatgcatatggagagggcggaacgggtaaaatgggttccttcaaaatgggacaaatatgctatccagaaaaaaacggaacgtaccccttcaacacgagcagggaaatgccgaggaggcgacagttcgcatggcgtggcgaaagacgtggcggcggcgaaacgtacggcggacggagggagcagcagaggaagggaagcggaagagcggtggaggaaggcaatgctaacagaaaagacgaaacagcggaaaagcggagggacagcagaaacgaggcgtcgcaaaaagagagggcggaggaagcggcggaagacggccaagcggaggaaggcacgggaggaggaggagacgaagcggcgacggcacggaaaaggacgacggcaccgaggacaaactgcgacacaaagacgacgaagagcggaccaaatgaggacggggcggagacgggcactgaccaacagcagcaacaacagtccagggactactggtaggggcacacggagaccagagacacggggtaatccttcggaattggtgtcccgacggaaaaaaagagtaaaaatttttcttgcacttttttctagggtaaaaagaactgtcacgaacccgaacccatgattttgcaaaatcattttctttagtcgttctaaaatcgtaaaaaattaaattagacttctctatacatttaatagctcattctaaaactttttatgattttacatcagtctgaaattgcttttttaccgcca

SEQ ID NO: 74936 - DNA, 1931 bp, Heterodera glycines
atggcgggagccggaaaatccgacactggaaaatccgacaccggaaaatccgacaccggaaaatccgacacaagcagaaaatccgacaccggtggaaaatccgacacaagcagtaaatccgacacattggaaaaaccgaccccaactttaaattttaaaaataatttttgattgtttgagttagtaaatatttaaaatacatataataaaagttaaatacttaagttctttaaaataaatatttttattgctataaaatagatttaaggtaggcatataataatcatattatttcaatgtcctttttgatcatctcaaaaaaattgtaaacaatccggcaaatggaatcagaggaaagggcatgaagcataagaaagtgtacgtggtgcaagacatgaatctcacagagatttatgcgactcgcaacaatcgacaacccttttattatttgccatcaatatcccatcggatggcagaaccaattaatttttttaaatccaattcgaaaacttgataaacttgccagatattaactcaaacaatcaaaaatattttttaaatttaaagttggtctcgtgtcggattttcctagaggcgttttaacagagggggccgttccgtttcaataaatggatttaacaaatcttaagattttcgaccccccgtcccaaaagaagaaaatataaataatttattctaataattttcagcccaacagaaggggaggctgacgctgaaaattgaaaagttttccgatttttctcgcggcggagaatccggcactgaacggtacagcgatgccgtgaacatccgaggcttttcattcaaaattttggccaacacttacacaatgtctgctgacaagagcaagaaatgtttgggctttttcatcgaatgcaataaaaatggtaaaatattaattaatttattaaaaattgaatttgtaatacgtacagataagcacaaaaaacgcattttccgcttggtttggggggtgtctacaatgacttttataatgccaactttgcttatttctgtgtcccccccccccgcatcgttcccccccccccgagaaataaaaaaaaaatttgctaacttagaaatttttcaagaaaaaaatcagaaagttatttcataggaaaattctaagaaaaaattttttgagaaattttcagcaattttttggaaatttttttgaaaaatcttagtaattcaccataaaaatttctcgggggggggaaatttttttcttagaattttcttgtaaaaaactttctaagatttttttcttgaaaaatttctaagttagcaatttttttaaaaaatttctccggggggaaacgatgcggggggggggaatgaagtgcacccgtcaaaattttacttttcaaaattttttaataaaaatcttgtccattccaggatctgattttgactgtgctgttgaccgttggctggatgattggcacgctgagtttttcgctttcggcacgtgccatttcagaggcgacgacggaagagaatgtgaacaaaacaatggtggcgcatggcatttgcgatggggtgaagagcggggacgaatgcaggtgggaatcgcatgcgacgcacgcgccactctctgctgttacggtgagcaaagaaaaaggaaataaatgtatgggaaagaaagtgcggacgaatgaaaggagagagagaagagagaacgagaaaagaaaacccaatgccaggggcagagagagagaaaaaaggaagagaaaaagaaagaagaggagcaaacacaaagagagagagagagagagggaagtacagaaaagagagtgaataagaaaaaggaaaatttaatttaattaactttttccctcatttttttgtagttggccggtgttggtctgttcattttgtttgcctcaaatatttggttcatctataag

SEQ ID NO: 74937 - DNA, 389 bp, Heterodera glycines
atgccaaaacaaaacgaaatcgttttaaaatattcctttctggacttgacttggtttcttgatatcgaagctgttttctacgctatttctaaaacggttataccaaaccccagatttttgaatccggttttcagaaaaaatgccttgtggtgaaaacaatatttcacatttcactccataactttgtgagttcggcacggatcgagaccgggataagaccattggaaagagcagctcgagctctacaagaaggtatggaaagaaaaaatagttatttctgggactttttcagaaatcagaattaattctccaatgtggcccaaattttaggcccccagccacagccccttgcttctctcccagttttaagtcttggatttgtcaaataa

SEQ ID NO: 74938 - DNA, 595 bp, Heterodera glycines
  unsure (1)..(595): unsure at all n locations
atgccaaaacaaaacgaaatcgttttaaaatattcctttctggacttgacttggtttcttgatatcgaagctgttttctacgctatttctaaaacggttataccaaaccccagatttttgaatccggttttcagaaaaaatgccttgtggtgaaaacaatatttcacatttcactccataactttgtgagttcggcacggatcgagaccgggataagaccattggaaagagcagctcgagctctacaagaaggtatggaaagaaaaaatagttatttctgggactttttcagaaatcagaattaattctccaatgtggcccaaattttaggcccccagccacagccccttgcttctcccagttttaagtcttggatttgtcaaataaattcaagacttcaaaataataatcaaaaattctcttaaaatttttttgaacccaattcaaaaaaggaaaaaaatttgcagtcaaaaaattattcgaatttctccaattntgtttccataattttcgaaaagtattcggtatcataatgccaaaacaaaacgaaatcgttataaaatattccttttctggacttgacttggatttctga

SEQ ID NO: 74939 - DNA, 614 bp, Heterodera glycines
atggcaaattgcggctatcaaaggaacaaaattcggtggaaactttttgaatgggcaaacagtgaaaaagtggccgaaaaattggagcattaccaccaaattccgcaattggaacggacgacgcggggcaaagatttgaaagggtaatttgaaaaaatagtaattaagtaaacgataggctaaaattaatcggttaattagggagtcaatgattttattggtccattcgaattatctgccgtaaagtgagctgctccccccaattaattttttttaatgttttaagcattttcaaaaagatatttttttaagtaaaaatgccttttgcaccgtttgggtcgccggattggtaatgaaagatgaaaacggcgatgtgcaaaattttccgccaatttactcgccaaattcaaatgggcctttcaattcgtcctatttaatgcacacactgtttttcacagatgcgcaacaaatgaatgaaaatgagaaattcaatggttttgatttgacattttaacattattattattcataattttctatgattcccacgataaacagaacaattcacagttaattcaattacaaatgaattaaaaagaaattaatttaataaa

SEQ ID NO: 74940 - DNA, 1740 bp, Heterodera glycines
ttcactgattattattctccgacggaagaaacttttggcaatttgtcttcgtctgaatgtgaagaagaaatttttaaagacacaaaagaaacaaacgaagaagaagaagaagaagaaaaagaaaaagaaaaagaggaaataaaagaagaaattaaggaaaaagaaattgaaattgaaaaagaaaaagaaaaagcggagcaaatttggaaaagtaattataattattgtgacaattggacagaaaaaaggaaatggccaaaaaagaaaaagggaaaagcgaaaaaagaaaaagaggagggaaataagagagaaaaagcatggaaaagcgaacaacaaaaaggagaaaatttaaaggcaaaaagcaaaggcaaaaagaaaaacggaaaagaaactttggaccaaaaatgggaacaaatggaagaaaaaagcgaattgaaatgtgaagaaaagccgaaaaaggcggagaaaaagcgaatggtaattaaaaaattggcaggtaattaattaccaatggactttaataattgaaatttcaaaataagatttgctaaatgattttttactggccaagttgtacgttttttacttgaaaaatgaattaaaagcagaaaaatatttggaatatttgcatatttcgatgttcgtcagaacaacgcatgcgaaaatgaaattcgttagaatgcatttgactgattttaaaacttatgaaaaattaaacgaattttggcgcatttttctaaacggagaattaaagaaaaatgagcaaaattcgcattttgtgatggagaaactgctgctgatgcaaaatgaattggacaaattcattttgacaacggaagagtaaaaaaatatataaatttgattgaataaaattaatttatttaaaaagtaaatttgaaaataaattcagaaaagggactgaaacattttataacggagaaaaaatgcaaaaaccggtcaaaattggcacttttggcaatgccaccgtcggcacaatgctaatccaattgcatatgcattccttttcatctcttaaagccaaacaattgatcaattcggaagaattcgcatcaattgtaaaaatggacgtggaaaaaatgaaaggaatttttaatggggaaaaaattggacaaagaaaaatagaaaaatatgcaaaagcaatggaaacggtgctgaaacagcacaaattaggtgagaaatgaaaatcgaagtgaatttaaaaattaattatttgggtaattaaggcaaaaagtgtttgccgaacatcgaacaaagtcagtacaatttgatcagaacggagccaaaattgcgagaaaacgatcagaaaatatccgaagaagtttaatttattaataagcaattaaaaacattttttggtttttagatttatcagtttatttcgaagcattctgtcaattcgtttaaaagaggacaaattctcgaacttatggacaaaattgaacaaaccatcggcgaatgggtgaacagaatgtcgggcaaaagaacgggtaaataaatgaattaatgaattgtcgcgacaatttaccaaaataaattggcaatgaatgctttaaactcaaaatcaaattcgctctctcagatgcccatttgctggtgaacggctcgcatttgatgggcaccgaattggacgggtccgacttggatttgatttgtgtgctttctgatgaactcaattttaacgggcaaatcaaaggcaatttgttttctttacttggaatg

SEQ ID NO: 74941 - DNA, 195 bp, Heterodera glycines
atggcatttctcctccctcggcttgccctcgcctcctcctttcttgtcctcttcgccccattgtccgattctgccaatgttttgttctcttccacatcgctttatcctgtccaccgctttatccaacgtgaattggcttctgaactactgcgtcgtaatcactcagttacttggtttgaatatggcttaagcccg

SEQ ID NO: 74942 - DNA, 1052 bp, Heterodera glycines
atggtcagacgccccagcggaagtgatcgtaagtgtgctgagaaaacaatttatgttaatgttttggttggtcaaattccaaggagaatttggttggtgccattcgcgagttgccagacattcgctttgtctggcagttcgatggaccagcgttaaggaacactccgaagaacctttttgcggctgaatggcttccccagcaggaattgctcggtcattgacaattaattattcaaaattgttcatttacgagtcaaaacgaaactttctcgggccaaatggcaaccaggtggcattagtaaatcaaaatgcctttcagctcatcctaaatgccgcgcccatttgtcccacgggggagtgaacagtgtcatcgaaagtgtttggcacggtgttcccgtcattgggtggccgttgagcgccaatgggagggacaatttgttacgagtcactgctcgtcaggccgggcttatgctggacaaaaagcgaccgtccaaacaagaatttatctcggcattccaccgaatttacatcaaacattacaaggaagagatgcttatatttcaagtgggcttcccaacaaacatcgaatgccacttaaataattgtgccaaataaggatatggtcatcgacgtgccttacaccgagttgaaccactcggccttttgggtggaattcatcgttcgtcaccaggaagttccccacgcccgctcgggtgcggacgacctgaatattttccaggtaattcgcctcttaaaaggctgctgatccgactcacttaaacattcagtacttcctcgttgatgtgatccttttcctagtcggcctctcactgctcgtcctttaccttttcattcttttgctcaaattgttcttccgtctgatcatctttttgatcaaatggcctttttccgccggttggggcgctatcaaagagaaaaaagggacaaaacacgcaatggctaagaagagagactgatcgacataagcaaattcacttaaaaccgagctgctgactgatttaactggccgtttttgctgagccaatttttaa

SEQ ID NO: 74943 - DNA, 838 bp, Heterodera glycines
atgacgtcgacaagatgggcagagattgaaggggaggaggagaagagggcgtttgtcaagcgggaggtccggcggttagagggatgggccatgagaacggcccggaaggagttggacgccgaatggccggatgttttgcgggtaagtgccaaaaaaatacaaaaaaaaattaatgctaattaatgatgctcctaattcagctctgtgacctgctgatggaaaggaagaccgccgggccgaccgacctcagaacgtttgttcatttttgttaaagaatttaaaaaaaaatagtcaacgggaatttttttgaaaattgctgctaaaaatgagcaggccgatcaaaaaaaacaggcagacgaaggggaaggggggttaatccaggaaattcaaaaacaatgcccacctgatttttgctgccactccaaccacgacgcgttcattccagtcgttcaccaaaggacaccttaaaattttttatataaatttaattaagaatatttggcgcatcgctgtgggaacagaataatccccagcacgccgattattcgtatgaggggacggatggagaggaggatgatgaggaggaggaggagggcggtggaagagaatggggatgaggaagagggggaggaagatgaggaccagcagattgaatttgtgtttaaaaaaaaacattttgatttttttttgtttgataaatttttgttgtgttgacagaaagcttttttttcccaatcggcggtgttcggttccatgccagccaacacattttttttgaaaaccatattttaaaattttgtttttcgtttttttgcacaatcaataatttaaaaacaaa

SEQ ID NO: 74944 - DNA, 2545 bp, Heterodera glycines
atgccaaaaacagtacctaatattattcaagttataccaaagcgaaacattgttattacatttaaaattcaaggatatgcatggttctgttgttgcatgctgtccctagcccttcgagaagtaggcagtaacgggtgcacagttgcggctgttagtcagtaacagctaccggaacatgcgtggcatccgtgcagtggtcggatccgtaggcttcattgattaatgaaatttatatattctatataaattgtcttttgaatttaaaaaataattatttcatatttataaaacagtacctaatattattcaagtttttataatcaatccattttaacttcattttcaatgaaaaacgtaatttgcaaaaaacatgcttgatatttgacaaataaaattcattttaaatttttgggtctaaatgagttaggtgtctctaattatttgaaacttatattcatatcatttagcgacccttctagtgcttaatttttccaattttcatatctcaagccttttttcatatggtgcagccttgaggccatatttagtttttggtgcattacttttgtgacaccaaaaagggctggtccgtttttgggtatttgttaaagcactaaatttgtaaatgagtttcttgcttccctcaccaagtaggatccaaaaacttagtaatatgaattgaatgcaattattatattatgtttttttttgaatacccattcctacaaaactgtatggcccattcaatttatacgaattgacgaaattagttggcaaaacgtccgaatttacctaagttggctatttttttcaaattaattactaagaagactgaataagagagaataaagaatattttaatttcgtctaaaataattgtatgaaaaagatttacaaaaaaaaatacattaaaattttcaatttttcgactccaacatggcgagacaacgcactcgggaaattcgaagaaattcaataacggtgaagtcttagacttagccactctaatgcttcaaatagggaatttttaaaatgggttctatggacataatagatttaatgaatttggtttttctaaaaaagttataaaagtgtcaaagtccatcacactcaaattgtgatatcatttggacttcattaattatttaatttattatgtttgttttggcgttccgtttattcaaattgaccttaaataatttgttttgttttttgattagttcttatgattgtgaagtaaaaagttaattgtatgattgatttactttcgtctgtgtctaattctcgctggttttcaagtttgtttgaaattgtgtttgttttggttatttcgttgtctttaatttcgttttgcataaagcataattttattgttttcgatttattttgagacagggcaagtacctttgactgatcaacaaatttaaattgttcgaattgcttcctttgccttcgcttgccaatttggaaaataaagtcgaagcctaattggccaaaaaattttgctttttccattttcctctcattctaaaaaacatttcttgcatttaactaaactgttttccccgcatttcagttggatttgcattcccattttttgaccatgctcaactcggcctcaaattggcatttctttcgccatgtttcgaagttttggtggacaaacatttcgacagcaaaagcgaattaacgctttggagaccaatcgaaattcgtcgcaagaattcagtgccagaccgtccgttgaccagcaaaattcgcttcaaatgccttcagattaggtcattcaacaaaatcagagttagctatcgcaataaaagccatccattttcagttacattgaccatcccgtgatcgcttttctccgtgccaatcagcaaatttgggacaaaggcaccaatttgtggttgagtattccttttgcactagatgaccagccaatttgtttttgtccgtgaaatttggccaatttttgcgcaaaacattcgctacttggacttttccggtgatgacctccttttggacaatttacgtcgtctcatttcgccaacaattctcactgatctcaacattatttccatcttttgtgttctgttgcccgattcgactgatgattttgacgggccaaatgcaattccaactgctggccaaatgttgtcaaaatggttgcacactccgcgaaaagatgtccaactgaagcaattgcgttgccttttgaagccaccaaatatcggattggccaacatcaacactttgaaaaagatgggccatattttctttaagcaactgattttaatttttgttttccattgtttagaaatttctcaatgccaccacttccgtccgctacaaaattcaatttattattgatccattgtcaacgcaaattgtgacatttgaattagcgaacgaacggaccaaggaaaagctgacactgatcaaagcaagcgaaaatcatcaggaggaccaatggataatgaaacggtgccaaaatggggagacggcgactgcggttcaatgggaatttgttaatttgacgatttga

SEQ ID NO: 74945 - DNA, 1494 bp, Heterodera glycines
atgcttgtcgctactttcttcttgtttcatctgatttattatcatatcatgaacattgacggaattttgggcattggacatgatgatgatgatgatgatgatgatgatttgtttggcgaattatggaaaaatattccaagaaaaaattcaaataaacaaaataatcatggattgaaggaagaggaggccaaaagaaaaataaaaattgagcagaagccgcaggacgaagagcaaaaaaatgtggaggaaaaaaaagaggtttcaaaaaatcattcaatgcaaataaaaataaagaaaaaagcaacatttttggatgataaaaaggaagaaaaaagtgtcggcaccaaattttcggaagaaaattgccgaaaagtgccaaaatttgattttgaagaaaatttagccaaatcactaacagaagcatcgccaagaactgctgatatgtgcgacgaatcggagaagccttcttcaattgatcacaacgacaaagtaaatttatttgcttaaaaaaataaggcaaaaaatctgtgatcatttgtggcgattgtcctgataatttgtggcgattgtcctgataatttgtggcgattgtcctgatcatttgtggcgattgtcctgatcatttgtggcgattgtcctgatcatttgtggcgattgtcctgatcatttgtggcgattgtcctgatcatttgtggcgattttcctgatcatttgtggcgattgtcctgatcatttgtggcgattgtcctgatcatttgtggcgattgtcctgatcatttgtggcgattctcctgatcatttgtggcgattctcctgatcatttgtggcgattgtcctgatcatttgtggcgattgtcctgatcatttgtggtaattgtcccacaaatattgactctaagctccgcaaaaagactgatttcgcttttgattgtattactgtagaacataaaaggtaactcgcccggtgggactcgataccaagaccccaacaatccgtgccgtgctctaaccaattgagctacgggcgctcctttcacttccttctgacatcacattaagcttactaataattttagggcaatcaaaagcggtacggtacaactaactcttttgggtgatcaaagatggacaacttggttttttgatttatcgctattatctaccagggatgtatagattccgagaccaaaaaatgtcgaaattcagatttaagattgaaattgcaagtcgaatattaaatttgttgctaatattttttacaaaatcttttaacatacgggcaaaaatctaaatttcgaaatatttggacatttattgttcaaatagttggtactttcctgttagagtcgggggcgtttgggccccagtttttgggccctcgtttttgggccccagggtcgtttgggccccaagtacagaaaaatgaaaaatcacagtaaaaacaactttttaaatttcagcataaaaatgtaaaataaacattttaaaaataaa

SEQ ID NO: 74946 - DNA, 256 bp, Heterodera glycines
ggttttcggggtcgctgaatacgaatataccctttatattaccccttgcctaaccttaggcaataactctcaaaaagtaggacgacgacgccgacgctggcgaacaggaaaaagggaaggatcgcaaggaggaaaagagcaagacggagagaagacgccgtttttggagatgccaaaaacagtaaacatgaaaaggaggaaggaaaggacaaaggaaacggaggagaaacccaacaaacgggcccctaaatcaggg

SEQ ID NO: 74947 - DNA, 656 bp, Heterodera glycines
atgttcctagtcttcaacgtaatactttgcaattatttgcttctcctgtcaattaatattttttcacatattaaattgaaattaaggcattaaaatcaattaattaagaattatataaaatagttgtggtcttttgtctgtgggtattttttgagtggtttttttgactgtggatcttctgtcattatgcctaatattttgagcccaagaattcccgagtcagtctctttatgtggtattaattgcttaacttcttccctatcgcattcctacaaaattatagagaaaatgaaacaagcaaaaacttcgccccaaaaagataacaacatttcatcgcattatctgagcaagtctatccgtttgatgcctcaaatttgcaatacttttaaatataaaatttgttcatttctcagcttggcttcggctggactaatggcgctgtgttggaccttttggtcaaatatggcgacaaaatgacgctgacacagatgccggatgttaactgcagcaaaatgacgaaggatcccgagcccgaagtattcccaccggaataaatagaatggaagtgatcagagcgaaagtgatcggaattttaaacttggctcccccgccacagaaatatgtccatttattaatccttcattttataaattaaa

SEQ ID NO: 74948 - DNA, 332 bp, Heterodera glycines
gggtcgtttcctaaaaaccgccatgtggtaggaaaacaaaaaaatgtaagacatataaattcataacttggtccattttcaaccaaattaataattcttcgtatcattcaatagctctaggtgttttctatcagaatataattttattaaattttttacttaagtatataaaaagatatggtaaaattccacaaaaccttaagtcggaattttttgtccagaacttttttgaacctcaatgaaattttttgaaattagaaagataaatagaataaatagagtacttgaaattctaaaaagaaaatttaatctatttgcttctgaaaaaaagt

SEQ ID NO: 74949 - DNA, 1361 bp, Heterodera glycines
  unsure (1)..(1361): unsure at all n locations
atgacggaggcccaagtgagcgaactgaagaaatttgtgcgcaaaaattttggaaaagccgagggagtgctgaaacagtgagttaattggctaatatcctggccaaatgcggtttccaaatttgcaatttgttnaagacatgacccggaagattggatggaaaatccgcccgcgtttgagaaaatcaaagacaaagatttgaaggaatgggccaaggatttgaacaatctgtggaagcaattgggaagaaaaatgccagatgaggtgagaagcattgaaaagagccattggcctaaaatccaattttatattcaaaattctttccatagttgaaagacagcaaaaggcattcgcttttgtacgttcccaaccccttcgtggtgccgggtggtcgtttccgcgagttttactactgggacacctattggatcattcgcggacttctcgcttccggcaagtgatcggagtggcaatttgcctccttttcatggccttactgacaaatgatcggtcaatcgctgttgatcagcgaaaatattacaatttaactgatttaatttttttaaataaaaaaacaactgtaaacacagggatgaagaaatccgtgaagaacatctgccagaatattgcttcgatgatcaaacgtttcggctttatgccaaacggaggccgaatttactacagcaagcgatcccaaccacccttcttcgcatcgtaagcatcaaataattaataataaatttttaaataattattagcatggtttacgattattacgaggcaacccaagacaaagaatttctcaaggaaatgcttccgatcattgaaacggtccgataaatttgcttttttaaattaacacttcttcaatttaaggaactcgaattttgggagacgaagcgatcagtgaccgttgttgtgaagaagaagcccattaaactttgccaatacagggccgacagcaacgttagcattaagcaatgataattaatttagaaatgcaaaatcgataaaatgggatgttaattggctaattaacttttcaggtgccgcgtcctgaggcatggtgcagagacacgcacctggtaaaaaacttaactgaaccaagagaaaaggcgaaagtttggcgtgaaattgcatctgcggctgagtccggctgggacttcagttgtgagttgggatatcagggttgttcgtaatttcggatgaccgattaggcgaatttttattttattctttctaattttaaattaattaattaattttccattgattctttatttttaaatgcaaaaaaattcggctttttggcttccaattccttttttgtaggctttggtttattacaggtatttaataaa

SEQ ID NO: 74950 - DNA, 2787 bp, Heterodera glycines
  unsure (1)..(2787): unsure at all n locations
ggcgtgccgacattgtcccgtcggcgtccttcgcccgtccgtcgaatgcccccgccgcttcgctgcctttctacgccaatccgcgcgttccttcgcttccgtcgggcggtgccttttccgacatcgaagtcggacgacaaagtgaggagagggaatcatttttggatttgtttgagtacaaaaataggacggactgtgccttcgatgtgncaacggggcggtggtgggcggcacgggacgaacggtggcggacattttctcggccaaagaatatcgaaattgggcgagcgaagttggaccaaagcacacataaggaacaaaatcatttcaaagtgggtaattaggacgaggatgacgtcagtcgcgatcatttcgcgggagggcgtcgtcggacgcggtggacgggaacggcgggccgaatgggggcacagacgaggtcaaactcactcccgccgaaagccattctcatggacaatgtgaatgtacatcaaaaaccaagaattaaccgagtctgatcatgtttaagcatttcatgggacacgcccaaaacaatttcgaacaatcggcacaaaacccattttcaagggcggaacggatgagccccgcggaaaaggcggtacggcatgggcaaggtggccaagcagtgccaaacattggccaatttgggggggggggaagatgaagcctttggggcgaaagggcagcattttattttcccattaaatccgaactcggctttatctaccttcccttaggacattttggaccgtctccacgtctctccattgaccaatcgccgcgtccctttgcgtactgctgggcccggcttcgacgtggacggattgagcgtggccaattcgttgagcggaattctcagtgttacggtcagtggccaaaatggacatttttcggcattccaaatgtcaatctgatttgatcagattcttttgacatctgcatgacaaataaattaaatattttccttcgttcgcttctttaagatcgtcgagggtcgcaatttgaaagtgccggaccgcgtccactccaagcagttgtactgcgtgttggaggtggacgagcagcacagggcgcggacgggcatttcaacgcccgaacagcacttcaggtgacagccaaccgatgctcttcccaaatttgtttaactttggttaatcgtttttatgttttttcagatgggccgaacaatttgacattgatattctgaacgcaaccaacgcgtccttcttcatttacgcttggcatcccaaacttcggtgagtttttttggagctaacaataaacaagtgcaatttgcaaataatgttcattggtttcttaactaattagctagctaattaattaattaatggcattttgtttgtttgttcccttaggcatcgtttctgccacaagggcgacattcgtctgatggacgcttttctggtggaagggttcggcaccgatcggatgttcactctccaattggagtcccggggtcagcttctgttgaaggtgcttccgttcgatcactgatcagtccccaaatgaaatgactttgcccttccgagcaaaggtcgctttttccgacttggcccactctttttgccgaattcgtcgcccttccgccgattgcagcggcgtttttggtcggtcgttgaattggttggtggagcacgaaaatgttgaaggttttggtcggtggatggatggatagttgttcactttctctgtttagtccccgtggtactgaatcgactggcgaccgaattggagaggcgcggcgtcgacaccgccggcctttactttcgtaagtgccaactaatttcgggggatgtaacagatgacaatgagggcatttcggattcagtttgtggggccactgaacggaagttgcctttgcgaatgcaattggagaagaacagcgcggagacggacattggcgaacggccggtgcccgacccgaacattttgacatgtttggtgaaggtgaggggagaggaggggggggggggggggaatgggccgaattgagagaaagtgccatggaaaatgaggcgcaaaagtgcagggaaagtgtcgaatgattgcatttcaaggactttctgcgggaactgcccgagcctttggtgccctttaacatttactcaatgcttttggacgccgcttctgtgatgccatctatcgacaaagaggcaaaaacgggaaaagcattgtgccgactcattcaatcattcgtttttcaggaaaaccaaaagttggtgatgcgaattgtggactgtttggcgacgccgaacaaagtgagaagagaagggcacttttgcaagcagttcgttggcattatcccaaatgttttgcagaattcgttggtttttctgatggcccatttccgcactttgctcgcttccgaaccgcacaacggactgacagcgcaaaagctgagcgtcgttttcggccctttggtatgccaaaattctccgtgtttaatttcncaatttatgccattccctttgaattcgtttcaattgtccccgtccttttcagcttttttgctcttcctcccctcctccaaattctccgcccgtttctttgccttttgtctccccaaaagcgtccctttccaatcctgcgaattcgctgctcaacgcccaacacgcggccaaagcattgcgacttttgttggaccattggccccgagtcagtaagtgaaaagtgaaaatggcaaaggacaaacgaacgaacacagaagccaaataattgatcatttgttttttgagatgggagtttcga

SEQ ID NO: 74951 - DNA, 517 bp, Heterodera glycines
atgtgtcaaggtgctggaccagaagaacaacgaaagccgaaaattgtggcgtcatctcaccgctgctctgtacttcaacgacacaaaaatggcgaaccaaggtgggaggggagggaggaatttggaattatgaattaattagttttccccttgtttttcagtcaagcgcttcatcgagcaacaccagcgggacgaggacaggcgacgcaaagaacaacggagaccccagtggaggccgcgccattttcaacgcgttgggactggtacgccgaccgacgcctggagataccgcgacgcgcaggaatgaggaacgaatgggatggcgattcgtgcacacctccgaagaacgaactgtgctgcctgttgtattaaaagaggatgtttgtaaatcatttggcccaagttgcctccatgtataattgtatatgcatatatcacttggccctgagttgcctctctgtgtattttgtatgttattgcgacgcactattgtacatttcctacatatatgaataaa

SEQ ID NO: 74952 - DNA, 626 bp, Heterodera glycines
atgcaagcgccagattggggcaactacgacaccaacggaaccgactacgactacatctacaacaactcggacgaacgggacaactggaacagcgagcaggccggcgtgttcagacatttagtgggccaggtagacgacgcgttgttcgatgaattgttttaatagaaattctcttttcagctcggcaccggtcagactctgcagaatttggcgctgcccaccttcgtgctggaacgacgctctctcctcgaaatgtacgccgacttcttcggtgaacacagcttttttaaatttttccaagttcaatcttacctcatttcagctcatcctgatgaactgatcgccggcgcctacgagaacacggctgagaagcggtgtttattcccgattggttgacgacaacgcttttgaatcaacaatttttcagattccttgccgtcctcaaatactacttgaactccttctaccctgcacgcaaaaccgacgacgcgaagaagccgtacaatccgatcctaggcgaagtgttccgttgccgttggaccctgcctggcgtgccgttgtccgcaagccgaaccgccggtggaccgttcccgggctcagcaaccaaccaggtccagtttaagtga

SEQ ID NO: 74953 - DNA, 1247 bp, Heterodera glycines
aatatgacaaaatcggatgtgagcactggaatggttcttttaaccggcaattcacacccagagttggcccgtcttacatcagagttggctttttgatttcttaattgaaaaccacttccctttcagccgtcttggaattgctcttggtgatacaacaatttacaacaaacctaacaaaggtattagccttacaaaaagcacaaaagaattttagcaaatagtaaaggtattcagaaaaaacttaaaaattttgactttttcgcaattttcatgttgagtcgccgaagcgatacagacccatgttgattctgccatttttttttcaattttgccaaaaaaaaacctaatcttaaatttagaaacttcggtggatatcagacagagtgtgcgtggaaagcatgtgtttatcttgcagtcctctaataagttggcactttttcatttcttttcaatttaaagttcagaaatgtcaacaactgtgtcatggaaatgcttattttgatttatgcatgcaaaacttcgatggcaaagtttccctctttttaaaacatttttttttgttaaaattcagatcaattaccgtcataatgccgtatatgccctacagcaagcagtgccgaatgtttcgtcggtcgtcagtgccaatgaaacttgtcgctgatatggtctgcaaagctggtaagaatttaccaacaatttttaaaatgttttaaatttccataaactattttatcctaaggagcgtctcgaattgtttcacttgacttataccgcaaggaaattcaaggcttttttagcattcctgtggataatcttcgcgcgtctccttttttgcttcaatacatgaaatacaatgtttgttggggcctgggccaaaattttgagtattctaaacattagctgattgagagttaaaattctgggtttttgggatagagcatggcatgacgtttcgatactaagagtccattccctactcggcttctattggaaagcattttaactttttgttttcctttttattagattcccgactacaaaaatgcggtaattgttgctaaaacgcccggagtcatgaacaaagcgacatcatacagcgagagactgagaattggcatgatatgacgtcatctgttttcatttgttttttcgtttttaaaggcattgctgtaattcacggtgaggagaaaactgacgagggagtccaggaggatggacggcaaagtccgccgccatcgccgacggac

SEQ ID NO: 74954 - DNA, 77 bp, Heterodera glycines
tagagaaaaaaagataatgtttttctctggcactctctatttattggtacacatctcgttttttcggacggtgtgtc

SEQ ID NO: 74955 - DNA, 2927 bp, Heterodera glycines
gtcacaaatgccgcaccgcaaaacgccacaccagcaaatttgagcaatgccaatttggcaagctccatcgatgctcgcctttcagcgttccattacaatccggaggtcggcacaacttttgaatgctggttcaaacggtacggaaaattgatcgaggacgacggaagcactctgcctgaggcctcaaaagtgcgactccttctcggcaaacttggagaggaggagtacaacaaataccgggacacgatcagccccacacagccggaccaagtgaattggaatgacaccatttcgcacctcaaaagcctttttgctgaaacccgctcgctgttcgtccgtcgctacgagtgtttcaaaattcgacagcaacaaggacaagatgtttcatcactaattgcgcagatcaacgcatcatgtgaaaatgccgatctgagtctgacaaaggaacaactcaagtgcattattttgatcatcgcgctcaacgatgaacatcacgatttgcgacaaaaggcactgaaaatgttggaggacgctcagaaaaatggcaccaacatttcactcaagaaaattgaggaggagttaagggcaattcaacttgtcaaagagagcgcactttcgctggtcaacccgccaattgccaccaacgccattaacacaaggccgcggcaatggaccgacccagcgcaaagacaaagtggctccaatcaacggcaacatcacaatgcaaattcaaatggaaagcaaacacgtggtcgcccaacgcttccgtgtgcatcatgtggcaaatccgaccattggcgctccgattgctcattcaaggacgccatttgcctcaagtgcaacaaaaaagggcacatttcaacaatttgccgtcaaaaaaaagcaaagtcggcaccgaacaacaatcggtcattccacacagtcaaagtggacactcattgcctgcatattagcactactcaaggccgatggtggaaattaatcattttgattaatggaaggcaaacttccatgaatggcgacacctgcgctcaagccacagtcatttctttgcaaacatggcgagagttgggagaaccgaatttgactccatccgacatcgatgccaaaaactgcaatgatcagccattcgccttgcttggcaaattccaatgcaccgtccaattttccgacaaaccaccgcaaactctgatcgtctatgtgagcggagaagtcggacacaatttattgggattgccgtggatcgaagcttttgagataattccccgccaaattttatttccgaccaacaaaacggctgatcaggcgacaaaaatgatcgacaatttttcgacagtgaaaccgccaaacaaatcgatcaatgatgtggcgtcacttacagcggcacttcaaagtgatttctcggaagtttttgatcgcgttcttcaaattggcgcaattaagccaatcgatttcagtcattgggcagcgcctatcttagccgtaaaaaagaacggcaaaacgagagtctgcattgacttctcaactggcctcaacaacgcactggaattgaaccgccatccattgccaaggccggacgacatttacgcctcactgaatggcgcaaaattgttctcaaatttgaatttgcgcgatgcatagttgcaaatggatgaagaatccaagcaattgtggccatcaacacacatcgcggacttttccaatgccaacgcctgccattcggagtcaattcagcaccagcaatatttcagcatttgatggaccaaatttgtgctggtgtccctggagttttcgcgtacctcgacgatggattaatcgcgaccaaaaccctggatcaacacatcacgacactttacacaatttttggacgcataaaagaatatggtcttctcatccaactggacaaatgcatttgcagaccgaacttttgttcctttggcatattgtgtcagcaaatggcattcgtccatgcccatcgcgttcagacgcaattcggaaaatgcccgcaccaattgacaaaaacaccctccgatcgttcttgggagctttgaattatcatggaagatttgtgaaatgcatgcgcgaattgcgtgcaccgctcgacaaactcctccaaaatgacgtaatttggaattgaacgtccggccaacaaaatgcttttgaaaaagcaaagcaaatgatgatgtctgatttttgctgactcactacgtcccggcacgcacaatcgtcgtatcagcagattcgtccaaggatggcattggcgccacattaagccacacattccccgacaaaaaggaaaaagtggtggaacacgcagcgtgcactctgacagcagcgcagtaaaattacagtcaaattgaaaaagaggcattggattttggcaaattatgactttgaaattcgctcgtcaacaccacatcatttggccaagccgacgttctgtcacggcttatcgctaattatccacgtccagaggaggacatcctgatagcaaacacttgtgccgacaaagattgctatatcaattatgtttttgaaaacagaaaatggatcaactcccagtgacaacaaccttaatcactgcagcaatggtctatgatcaaccacttcaaacggttcttcaatttctaagaaacggatggcctgccaaagtcgtggattccgaaatcagtccatattttccaaaaaagggacaaaattttggaagtcgacaattgtctactgtatgaggacagagtgatcgtcccaacatcgcttcgcagtctcatcctaaaggcattgcacatcgcacacccaggcattgtgctcatgaaggcacttgctcgtcgccacgtgtattggccgggaatggactcagcgaatgaaaaagttgtgaacacatgcgaagagtggcaatcgggccagaaaaatccaacaaaagcacctct

SEQ ID NO: 74956 - DNA, 217 bp, Heterodera glycines
gtgatgcggactatgcaaaagagtttttcccaattccgccgcctcatatcgaagcccagcaattggccgccgccgccaaagctgcgcaatgatattagaagtgatcagcggaatgagtgatcaaaatgacaaaaaacaaatagcgattttctttgcctctttttttgtgtgaaaatttttgtagaatccgtctccgtgtaaaaatgtgttgttacta

SEQ ID NO: 74957 - DNA, 1276 bp, Heterodera glycines
tatttcaagggctatatcccaggccggtccggttcttgatccattcacttggagcccttcatgggtcgggcacatatgccggaggaccctcagcctcgcccccgaccctatcggtggccaacccaagctaagcgtgccggtaccagcggcttttttgtacagctcgatgagctctacaaaatggtatcaatggcgtccggctgtgtctactacaaatggagaaaattggcgagaagtgacgtgaaaaattgaaaaattaaaaaaatttgaaaatgacttgcgtcccgccgtacattagggttaaccggacggcaccgtgattttgtgaattgaataattaatttatttatttaattttatcaatcactgagtttttttttggattgacctagcaccgcatttgtcatttaggtttaaaaacggagacgaagcaatcgcatttttcaacgtcgacgcggtgtaccttaagcatgaacaccaaagggatgcgtacgattttcgggtgattcctccattttcccctccatcccaaatattcttttcgctttccttaattaattaagcatctccaagtcggacttagccgtcgcttcagggcactaaaaatttggtttgtgtttcgtgcgattggcattcagcgaattcaacaatttttgagaatggtgcgtcaaattgggaaagtcaaatttgcaacattttgcccattaattagcaaaacgaattggccaaaatgttcgccgatcttttgctcagagacgaccgtttcgagctgttcgtcccccagcgtttgggcttagtctgctttcggatgaaggtaatctttacaaaggaatcactctaagtgatcgcaatttgctaatgccattcccaatgccattgtcgggcaaaaagtgccgtggtagtttactgtatgtctagtgataaccctgccgtggttactgtaggacccacagttttttatcgtagctttgttcattgtcccttatgttgagactagcaatgaactgaacgagtcgctttatttggccattaacgacgatcgacgcgttcatttggtcgcttcattcactcactgcacttttttcctccgtttcgtcgtttgcagttcaaagacacgcgaaacgaacatcgaaaaagcggtcgaagtgatcagagaaatggctgacaaagtgacgacggtggaaaaagcaaacgaagcgacggaaagggacaaagcggcgaaagcattggcggacgatggaacggaagaaagtggcacactccgacggacaaatgg

SEQ ID NO: 74958 - DNA, 243 bp, Heterodera glycines
atgccaaatcttgatgagatttgtttcataggttatttaaaaaaagctaaattagtacagaaaaatttttagatcacgaaggaactcggaagaggcacacgcggaccggccaaatcgaaatgtttctgtactacgctgtcaaaaaagacaactttaggatttctctttgttgaattgaaaaaaatttaaatacaatttaactttgttggatttaaaaattatctgttgttgaatttaaataaa

SEQ ID NO: 74959 - DNA, 181 bp, Heterodera glycines
gttggctaccaacctgacaaacaacgtccgaacttcttccgaatgatcatctcaaacccggcaattcgagtaaatcaatttaatactaataaatggattgaaaattataaaaaaactaatttaggagatcgatttggactttttgatcaacgaaattgtcacactgggagaagatttgtga

SEQ ID NO: 74960 - DNA, 1031 bp, Heterodera glycines
aaaaacacaatgtcaatccctttgaaataatttggaaggaatcaattgtctttcctctttttaaaaaaggggataaattcaatcctgaaaattataggcctatttctttaacctgctcactatgcagagttatggaaagaattttcagcaaaaatatttacaattttctattaaaaaataataaaatttcagagtcccaatttggttttattagaaataggtcaacaacgaatcaattaataacagttgtcgaagattggtatgaagcaattattaatggaaaaaaaagttgactgtatttatattgactttaaaaaagcatttgactcggtacctcataatttgcttttatataagttggaaaaaattggtatacggggtaaattgctaaattggataaaagcatttttaattaacaggcttttagcgttaaaataggggattctttatcctctgttaaaaaagtttgctctggtgtcccccagggctctgtcctgggtcctttattattccttatatatattaacgaccttcctgatgtcataccatcaggagtgaatattaaattatatgctgatgatgttaaaatatatttgttataaagcaaaaactgaaacggaaattatgcataaagcattgcataacttattcgaatgggcaaataaaggtttcaattcaaaaaacttttgtattatatttgggttcaaaaaacccaaaagaaacttataaatgtgatgggaatacaataaatgctgtggatacaattagggacttaggaataaatattgataataaattacaattttccgatcatgtttaaccaaataacgaggaatgcctatttatgtagcgttccttgtttagaataattaaatctaaatcttctaaaatttggattaccttatataaaacttatattaggcctttattggaatatgctccggaggtttggaaaccgtctcttcaaaaaaatattaaaaaaatagagaagatgtcaaaaatttccactaaaatagtcttttcaagtgtaa

SEQ ID NO: 74961 - DNA, 365 bp, Heterodera glycines
atggaaatggtgccatttgaattggtgaacgaatgcacaaaggaaaagctgacattggccaaagcaaatgaaaatgaattggacaaaagttggataatgaaacgctgcaaaattggagagacggcagcggtcaattggaaagacggaaattgggacaacaattgtaacaatgtgttcttttggctttttagtggcactaattgcatcgggtgagcaatttaaaaacatttgatttttatccgaatttgaattttgcgcttaatttaggcctttgtctccgccaccaccagcaagtgaagacgaagaagcgggacaaagcatcacaaagggcgaaatgagtgagggacaaacgaacaaaaacagtg

SEQ ID NO: 74962 - DNA, 117 bp, Heterodera glycines
tgcgtctaacaatttctgctggccaagcattgtccaaatggttgcactctccgagaaaagatggccaacccaagcgattgcgttgttggcaagggaactttgaatggatcaacaatt

SEQ ID NO: 74963 - DNA, 1161 bp, Heterodera glycines
atggttgcacagtccgagaaaagatggcatgccgaagcaattgcatttctttttgaaggagccaccaaatatggaatgggccaacactctcaaaaaggtgtggccatattttcgttagccaactgatttcgtttgcatttaattaatgtccgtccgttttcccattgtttagcattttctccgtgccaatgccatttcttcggtcagctaccaaattcaatttactgttcagcaaccgtcaacgcaaattgtgccatttgaattagcgaacgaacagaccaaggaaaagctgacactgatcaaagcaagcgcaaatgtttgggaagaccgctgggtaatgaaacggtgccaatattgggagacggcggcggttcaatgggcagcccaaaatttggacggatttagcactgtcgagtttcattattacgtcgaagctggcattgggtgagcaacaaaaaagcatttgattttgtttaaaaaattgtgccgaatttttaggcctttgtcgccacgtcgcaaatggtgtccaattatttgaaggtgatttaatgcatttgagaaatgttcgatcattttgaattatggtgatgaataagagtgatctgaccattttttatgctcgtttttactctctgatttgttgttgttttccgttaaaatataaattttctctctctttctcgatgcatcccatgggtatgtaccagggatggcacggaattccgacatttttggggttggaattccgattttcgaaaatttttagggcctcggaatgccatccctggtatgtatcaattaaaaagaaaaattcagggtgtgaagtttttcatacgcaatttatagttccaataacagtacagtgcttgtcattaaaatcaggacacaccccattttcagaatttaaccgcttcccgtgaactggtcgaattgattattaattcaatgagttatttgtagacacgactaaaaaggcaccaaaaaatcgcgaaaaaaggactatttacatataataggcatcaaaaattgaaaaaaggcacgaaaatggaccgatgggttagacaatgtgccaatgggagacgaaaaattattgccaaaaatggaagggatggaaacattttgacacaactttgtttttaaaataagaaaattttaaataaa

SEQ ID NO: 74964 - DNA, 1026 bp, Heterodera glycines
atggacgagacggccgtttggttcgattgcccggacagccgatgtgtggacaataaaggcgcaaaggatgtaagtttttttagataaaatgaacctattctaacaaattaggtgacagttgtgaccacaggacatgacaaaatgcgggtgacggtgtgtcttacagcacggaataacggacaaaaactcaagccgtacgtgctggtcaacagaaagcgaccggtgccgcaaattgtcaaacaatttgctggaaaattagtgatcaatttcgctgggtcgatatggatgaatgatgacacaacggaggactacctgcacaaaatcatcggggcaaagctgtttgttggcgaacgcctcttggtttgggatgcgtttgggagctacaagagcgagagaacgaagaaagtggtgaagggattgggaatggaaacggtttttatccctggcggctgcaccaaattcatccaggtaacaaatcatccttctcaatgaaattcttttttcttccctaggctcccgatgtctcgtggaataagccgttcaaggagcgaattcgacacttctacagcatttggatgtccaatgaggcggaaaaggagttcacatcagcgggcaatccgaaggcacctgctcttcatgtggtacttgattggatccaccgatcatggcaggaaatctccaaagaagtgatcatcaaatcatttaagggtcagttaaaaaattaattcaggaaaaatgtctaaacttttaagtctgtgggctgactacgccattggacggaactgaagacgaaaaaattgcttgcttcaagccggaaggagcaattggaccgatagggataaaatttttgcgcaagtttaggataaatgaaacggcgaaagatggacgaaaacgatcacgaagaagacggcttatctgatgacgatgatgcagggctggatggagtcggagatgacgacgaattgttcattttttgagccccttttactgttgaatttattttaatttttttggaaaatgtgccaa

SEQ ID NO: 74965 - DNA, 564 bp, Heterodera glycines
atggtcgaaacggtggccaacgaattggcactgtccgccagccaaacgcacgcgctgttgaacaaggcgatcagacggtgggtgagacggcggaggatcagggccaccaagatggatgaactgtgttcctgtccctacccccaaccgcatttcaattggttcctccaattcttggcaaaaaaaaatttaaaaatccaaaattctttagaaaattattcgagaattttttgccgaaattcctaattataagaaatttttaaatttaaaaaatttgcaatcctacaaaaaaaatttaaaaaaaaaatattctaaattcttaggaacaaattttatattgataaaatttccaatttaccaaatttcaagggctattattgcttttttggattctaattttgggtttttttcagtttgtccgaatatttcgactcaatttgccgtgaggcacttgaacacaacacaatgccaatgatcgccaacaacaaacagaagcagcaacagaatcagaaggaaaattggtggcaaaaacgaaaagcgacgaatgcccggcgatcaaaaaattga

SEQ ID NO: 74966 - DNA, 770 bp, Heterodera glycines
atggctaaatgcacaaaaacccaaaataagcgcagcagatccgaaccgggtcaactccgtcccgccaactccgtcccgccaactccgtcccgccaactccgtcccgaccaactccgtcccagccaactccgtcccgccaactccgtcccaggccaactccgtcccgagccaactccgtcccgagccaactccgtcccgccaactccgtcccaatacaaaaaaggcccaggccaactccgtcccgagccaactccgtcccgccaactccgaaccgggccaactccgtcccgccaactccgtcccaggccaactccgtcccaggccaactccgtcccgccaactccgtcccgccaactccgtcccaagcaaaaattcaagaattttttaaaaataaatttgagtttatgaacaattcataagtagagaccggatttttatgtttttacatatttttttgcggcttagttatggcgagagaagcccaaaaatagcattatctccgaacaatttttgattttagcacataaaaatccggtctctattcataagtcttgatttcaatgaccgatttagtttttatttatgcaagttcctaatttgtgaaagaaaaacttttaaacaatgacaacttttattttcagggctcccaagtgtgcttatttctaagatttgtgcttattttgaggggccggatcttagaaacctaaaatatgcttatttctaagatttgtgcttatttcagcattacgtgcttattttgggatttgaaa

SEQ ID NO: 74967 - DNA, 1905 bp, Heterodera glycines
atgcttttgacagagtacggccgaatgcctttgtcagcggcatcgccaattggagaaggaaatcggagcgtaccgagcggaaattgcccggttggaacaattggccaatggcatgtccgagatggaattcgcattgggtgcggagggcggcgagggaaaggcggaggagcggacggacgacggacaggcggaagcggagcaactcgaggagcaaattgttgtgccaaaggcactggtaacggatggaccatgcgctggcttttgcaaaatgcatccaaggtgctgtacccgtacaacggcaaaggcattgaagtgctcggtggggaggagttggcactgatcgacggcaccaaccgcgactggtggcgggtgctgacacggcatggcgtggaggggtacgtgccggccaattactgcgaattggccccggatgaagagaaggtgcgcccccaccctcttaattagttctactatctgcccaaagatcaccgtcagccaactttcgtcccaccgcccttcccccaaatcgcgtgccgaatttctcgatggcgcctccgtcgtgaaaaaccgccgaaaggcactgagtgccgactatcgtcgactgtgcgcaactgccgaacgacgcagaaaactattggaagaggcgctgaaattattcaaattcttcgccgaatgtcaagactttgagcaatgggcgcgaggagtgtgccaagcgattgaaagagccaattgccatcgaacacatcgcgagctgtggaagacaaattcaatgtgatcgactgactgagactgtacataaaaagtttatttgtattgtaattttgcagaaagtacgcgacgaaatccgtggccaaggctccgtccaattgcgacaattggacgcgacagcagacgaactgctcgagcaggaacactcgcgcagtgaggacattgacgcggcacagaaagcgatgcgtcacctgtggaaccaattacaaaaagcgatgaatggcaaacagaacgaattggagaggacggcacggctggcgcagtttcaggacgaatgcgcggacatgcgaaattggctgacggagaagagcgcactgttggagcagaagccgggcggagaagcggacatgcgaacactgcaaatcgtacagagacgctttcagaacttagaaagagtgggcgagggaatgcaaaaaaaagggagggacaaaccgaaacattaaaaggatttgagaccactcggggaaagaatgaccgcactcaggcgaaaagcggaagaaataatggaggagcagaagcaaagcgagcagcaggcgatcagagagagaacggacgaattggacagaatgtacggacaactgctgaccaaggcacggcggtgcatcgaagaggcggaacaaagccaaggcagggaactattcgagcggacggtgaggtgagacggactgaactgaacggatgggtgaggggaggggcgacttaaatagtgggacaaatggcaatggcaacaaacgcagtcacaggggggggaagtgactggccagcagggatagcaaatgactataactcattaagctgaaagcttacttacagccaaccactcactcactgattaagggagctgttggaatggacggcaaagaccagcgattgcattcggttggagcctctctcggcccattctcaagcggaggatgtcctccaccggcacgccaaaatcagagaccaaatgcaggcgaaggaatacgaattttcttatgccgaagaactcggagggcgtctaatgaaaaaaggggcagcgaacggagtggaaaagcgattggccgaattggcggaagcgaaagggacgttggaaagcgaatgggtgaagcgcgaaacggaatgcaagcagttgctggagttacaggtcgaaaatga

SEQ ID NO: 74968 - DNA, 227 bp, Heterodera glycines
aattaaagtacagactatagggaagctattcccgaaggattcggtctccccataaatctgggcgcatcggttcggggggactgccccgaaaacaaaaaaatcgattttttcaagtgtccgtttggggtactcaaacaattatggggagcagaaatccaacgcataattaaagtacaggctatagggaagctattcccgaaagattcggtctccccataaatctgggc

SEQ ID NO: 74969 - DNA, 1989 bp, Heterodera glycines
atgactgtctgtctatgcgggcagcggcagatgggaggggcagacagtgaacagacgcgtgctgctgtggctgctgtgcagcagcagtctgttggacgcgtgcgtggtgtgtgggagggagggagtggggaaaaagagagattaagtggaaaagtaaaagaaataagagaaaagaaatgaaagggagagaacaattgaaaatttgtctcgcatctcttgcttatttacatcccattttttattttaataaaagaaagggaaatgagagtttttttatttctgttttcgcttcagtgagaattttcctatctttcttatataataaagttgagtgtgtgtatgtgtgtgtccattgtttgaatttgtgtggcgttttgtattggttttgcgttaaaaatgattttgaaaaaaaagaaatgttggttttgtttttttcattttcgttttgtcagttttgcaaaaagcagtctttaaaaatgttttctcttcttttttaataaaaaataattttatatgtttattaataataattaaatcgcattgaatgctttcaattgcatttgttaagagaaaaaaataattagtttttgttattaataaaaagcatttggaaatgaatgctcttagtacttttgtaaacaaaaagaaaatgtttttgtaaatgaattcctttgttattggattaaaattgatttgattagttatgaattaatttatgttgtgagtattgtttttgattatggcaaactcgatggaaatgttattgtttttgatattgcattgaaaaagttttgattcaagaatttgttttgaactttgaaatgaaaataatttgcattctttttatttttgttttgtaaaaaatatttgtgtattcgttcattctcattttctttaaatgtttttacttttttggtattttgttgttaaaagaatacgtttatgtttttgatgcgatgtttggttatgattttttcattttgatttttctttttacgctgaaaaagaatttcgtgatattttcgtctttgtctttgctgtggttttttgttgtttttgttgggttacgtttagataagtcgattgtttttcacacaatgttaagctgttttgaggacataatcgcgatcccatgtgggactttgttagcgtaagttattttgtttttaaaatttaattggttgttatgtaatttgaatttttaagatctgccactggtgttattactaaagtgatggaatcggagaaaaaagtcagcgttgtcttggtgtgcggatctggagaaaattttgttgttactgaatttaaacaaaattctgcgaacgctcttcaaaagtacctttcagttggaaatgtaaattgttgtcataattttaaattattttgtatgtttaaggtgctgaagcttcaatctgtcaaagcccaacgcttcaatgagaaatttgatggtcaaaaattttttcaaactccttttccgtttgagtttgttgtgacaaagcactcgaaaatttgtttggtcaagactgaagttttggtggccgagaaatttacgcagcttgtggcgggccgtttttatagtaatgcattaaataaaaatcttttaaattttctttttagaaattaagtgtgttttaacgactccgttttcattaattggagaaatgttcgctgctgttgttggcgatttctgtgggaagcgcgcggatttatttatttcgggcgaaaaactcccagaaatgtttgggcaattggacagcaaggaccagcttgaactaaaacgttgttttgtcaaaattgaaggtttttgcctaattgattttttgtttatctatgatttaattattttgtagatgagtgtatgcagcttaatgttttggcttctgatgttaatgtgtgtggatgtaaagtgacgattgatgataagttggtcactccggtcaagagaaagagtgatgaagcaattttgagtccgcaatcggctaagaaata

SEQ ID NO: 74970 - DNA, 893 bp, Heterodera glycines
tcaacccaccagcatttcaatcactgggactcaattctgcatttcaatcactggcactcaacccaccagcatttcaatcactggcactcaacccaccagcatttcaatcactggcactcaacccaccagcatttcaatcactgggactcaacccaccagcatttcaatcactgggactcaacccaacagcattccaatcactgggactcaacccaccagcatttcaatcactgggactcaacccaacagcatttcaatcactgggactcaacccaccagcatttcaatcactgggactcaacccaacagcattccaatcaccaggactcaacccaccagaatcaatcaccgagactcaattctctggcatttcaagcaacgcgactcaaattaagcaattctccgatattcttccggtctctcaatcaccagacaaaaaattgtgccaaattcatcactgcaatataatatcgtgtaattttaggtctatataaaaaacaaatgcttattaacaacacaattaataaatataaaggtaaaattgcaaattcaacaaaatagaaaaaaatgttaagatttatcaatgaaaaaaaaaattgatcaataatcaaattatataactaaccaagaacttaaacagacctgttcaacgttaatttttaaattttcttattaaaacttcattaaattacgaaacacaattaattgtggaaatccttaagccacattataaataaaaacaaaacaatacaccacataaatgaacggacacaaacacatacataacgttttaatatccaaaacatcacacaaatacaaacatagaactgacaacacttttaaattcatacaaaaatctagctaaacaccatccaaaataaattcacaataaa

SEQ ID NO: 74971 - DNA, 870 bp, Heterodera glycines
ggtgggttgagtcctggtgattggaatgttggtgggttgagtcccagtgattgaaatgctgttggtttgagtcccagtgattgaaatgctggtgggttgagtcccagtgattgaaatgttggtgggttgagtcccagtgattgaaatgctgttgggttgagtcccgttgaagttggtgggttgagtcccagtgtttagaatgccggagatttgagtccattgtttggaatgccggagatttgagtcccagtgattgaaatgcaggagaattgagtgccagtgattggaatgttggtggattgagtgccagtgattggaatgctggtgggttgagtcccagtgattggaatgctggtgggttgagtcccagtgattgaaatgcaggagaattgagtgccagtgattggaatgctggtgggttgagtcccagtgattgaaatgcaggagaattgagtgccagtgattgaaatgcaggagcattgagtgccagtgattgaaatgcaggagaattgagtgccagtgattgaaatgttggtgggttgagtcccagtgattgaaatattggtgggttgagtcccagtgattgaaatgtaggagaattgagtcccagtgattagaatgctgttgggttgagtcccagtgattagaatgctgttgggttgagtcccagtgattgaaatgttggtgggttgagtcccagtgattgaaatgttggtgggttgagtcccagtgattgaaatgttggtgggttgagtcccagtgattgaaatgttggtgggttgagtcccagtgattgaaatgctgttgggttgagtcctggtgattggaatgttggtgggttgagtccccagtgattgaaatgcaggagaa

SEQ ID NO: 74972 - DNA, 989 bp, Heterodera glycines
atacgtcgatttggatgtcattgcctttctgaaccgaatccaaaggttgctccaagatggtgagatgactttgcgcgttcggatcttccaccatcagcgacgcagcttgcaaattttctgcgcccaaatttggccactcatcaacaaaaacatcgtcaccgccgttgtctacccatcgatttggctcccaccgctccagcaggacaacgcgcaacaacaaaccacgctcaacgacctgcccaatctgaaattgctggagtactgtgacgtatcgcccagccaggaggtgatcgattggctgcacaattcgagcgcggacggacggccgaaggcggtgcgctgcgggttacctcgtcaaatggtcgacgaactccgagcggtacagttttgttgaacatagccaattctgttgattttctatgcttgttgttcatttttggcaatgctgcactccttttgcaatttttttttgtcacagacccccccccccccctctaatttgattacaaatgttttttaatgtttatgttgatcggaatacagtgggcccttttttggaaaaaaatatacccaatatagacgctaactcaaattccaagtttaaaattcaaatagattttcttgaaatttaaatggaacagtcaagaaatatgacttcaaacatgtaaaaaaatcactaggtccttttttagcgatttgttgctgcatcatcgccgacaattttcattgttttggtccattgtttgcaccccattgaacgcttccaaatcgacaacgatgtgaccaatgagcgaatggaattgcaactgttggagaatgcccgccccaacaccactgaactccatcatcggcgattgttggtgcgatgtccgatcggccgaaacgaggaacagtgggcgcaattcgaggaaaatgctcaaaattggaagttggccgagcagccgttcctgttcattgagctcgacgacaggcatcttggcgaagagtag

SEQ ID NO: 74973 - DNA, 2337 bp, Heterodera glycines
atgagggaggcgaaggcacgagtaaccaatgagagcgatgtaagagaatggcggggggacgacgacttttttttttaccttttgatcaaatctctttttttcattctcgagaattcatttctatttcaaacatagcataaaaatatcttattttttgaagtaataacgttaaatacatgaaaaatatttaaatgtatgtataatgccattattttcttgtaaaacaaaaaacaagttctaagtccagcccccaaaacccgcatattaatcctgcttgatcccttacagtaaaaattttgagttccaatccgcagtggctgggactcgcgaatttgaaatttcaggactcatatatatatactagagtccggcggaggcgggagtcccgcgggggtttacgggagtcccgctcccgactcccgtacttttttgcccaactggatttttacgggagcgggagttttacgggattcccgctcccataaattttgacccaaacacgggagtaaaaatacactggtaagaattgagttttttggtaaaactattaatttttgatgaaaatctgttaatatatagccaaaatttcaagaaattttcccgccggacccttaaaagccttaattttcttaaaaaagctagctcaaatttgcaaaaattggtcatttttggacaaaatctgaacaatggtattgtcttcaaatattcaattttttttttcccggcggcgcctatcggcaccgccagccaccctcctcctccctggtccccaaaaagttttttttcaaaagataagctgcaaaaagttgtttaaattaataaaggaagtcgaaaatataaaattaataaaaaataatttgttattattttttacctgtctctaatatgtacatactaaataaagtacacttttgaccattgaaagtagtgctttatattgccattcttcaaattaaacttttgctaaaattccatggacgaatcggcgaaaaagacgctaaaacaatattccacttcttaagacaaatgcaggaccaaggtaaataaacaaaaagtttacgtatattaaagtccaaaaatgagttaggaaagtgaccgacaaatttcgtctcgagactgccaaaaaaaatttttctggttttggataggaaactcacgataatttattttattaacccaaatatctctgcaaatttttttgatattgctagagacggacccctttggcttgaacggttgaaggaggagtacaacagtttgatcgcgttcattgagcacaacaagcagggcgatgccgactggtttcgacttgagtcgagcgcggatggcactcgatggtcagtgaatttggcatgtaaattggtgatgattgttaactttgtcttcccccccctttcttacaaaaatgtttcattttttcatgaaatccttgggtttccgggatcgctgagctcgaaaacgacattgattttgtcggacggatttttcgaatttaattttggtgtgaaagcggtttatataatgctgaaagcatttttcgaccttcgtccgtttgtccgttggcactctttcccttgactaaacatttgtgtctatgcccaaaaatggtgtcaaatttagggccgcttttcaaatccgggaacaaatttttagctacctatgcgcctgtttatccttttttaaagattgaaaaaacacaaattttgaatccaattttaaacatagaaagcaaatgtcgggtggtaaatgtccatgagcggcatttttttggcattaaaatttaatttccgtatgttaattctacctattgctgagagatttttgtacggatttggagtgccccaataccatttaattttgcgggcgcgaatttgagggactttggacaaactatcgccaaatagtcacattttcggttccatgtatttttggcccacccaaaaaatctatataagattagaagtctaaaattcaagcgaatgtttataaagttagatgtaacagtcctaaaaaatgtggattagaaaagcacttttttagcgatttgttgctgcatcatcgccgacaattttcatcattgtgttccaatgtttgcaccccattgaacgcttccaaatctacaacgatgtgaccaatgagcgaatggaattgcaacagttgccggatgccgacccccgcaccactgaactccatcatcggcgattgttgatgcgatgtccggtcgaccgaaacgaggaacagtgggcgcaattcgaggaaaatgctcaaaattggaagttggccgagcacccgtgcctgttcattgagctcaacgacaggcatcttggcgatgagtag

SEQ ID NO: 74974 - DNA, 179 bp, Heterodera glycines
atggaagaccaaatgggcacggaacttgcggtacgtactacattcatgagtgcaacccctacggcttaaatcaagaatgaaaaataatgaaattaatgcattatccgcattacttgcaggaatgcttctcttctgatgttgattggttgcatttaaaagtagttttatgattgaataaa

SEQ ID NO: 74975 - DNA, 829 bp, Heterodera glycines
aaagaaatgaacaaattttcatggacattgaacgatttcgaaattgggaagccacttggaaagggcaaattcggcactgtttatttggcgcgggagcgagaaacgaaatatttaacggcactgaaagtgctgttcaagaaggacatggacaagcacggagtgtcgcatcagatgaagcgcgagatcgaaatccaataccatttgaggttggtggctgagttttgctggctctttccgtcttcgattccctttgctctcccccagttaataattgcttttatcctctcttagacaccctaacattcttcgtctttacggctatttctacgatgaagaccgcgtttacctttcgctcgaattcgcctcgcgtggctccgtctttcaacttcttcgcaagagcaaatgcttttcggtgccttactccgcccgtttgatttatcagcttgcggacgcattaatttactgccattcgaggtaaaatttagtgaaatttggtttaaatgaaaaagtttaggaatgttattcatcgggacattaaggtttgtgtgccgggcaaatggggttaaactcacaaacaaattcaatttaagtttatcagatcaggtttttgacaataggcttttttagtaataatagttttaagagttcaaaaatttccatcgacaccgtcggtcaataatttcatttgttttccaactcttaaaatgatcaccaaaattcttaagccggaaaatctgctgattaatactaacggagacctgaaaatcgcagactttggctggtcagtgcacgcgccttcctcaaagtgtgtatttgtgatttttgctct

SEQ ID NO: 74976 - DNA, 2205 bp, Heterodera glycines
atgccatgccaaccgaaacttcctttcccctctttagctgcttgtcctcgaccagtccactcgcatgccattggaggagctgcagaagcacccgtggattgtggagaatatgcacaagagtcagtccaatgcgccatcggccgattccgcgaatccttcggaccacaaatcgtccacttcgtcataaaattaatgttcatttgtttggtgtgttggatttgttggtgcatttatctatttatgttgtcctcattttttatttttgctttttaaatatatcattaaaatttaaccgtcccaagagggcaaaatatgcattttgtaaataaaagttgagtttttataatgaaataagggctataaagcagggttcggaccggacaaaccctttccagggacgggtataccggtttccaaggacaaggggaaaattccataaaaatcaaggacatataaaaatttaatcgtatgtaaggaaaaatgattaaattttatatatttgcgccggaatgaatttttataaatattttttgattctggtcatttcctcacttcaccgcatattcatttttttagcggtgcgctttttccaaaaaatatctaggaacaggtgggtcaggctcaaggacgaaccgaaccctgatataaaatgatacttggacgaacagccaagtacagcatttttctcttccgccgagctcttctcttccttctcccttcccaacggcgctgctggtcacatcggaatgtcttagctgctcctgctgacactgttcttttcaatcacgatgccgttcgaatgtgtccccttgccccctcctccccttttctaaggcatttgaatttaattgaaggttggaattttcttagagaatgtaaacgatcctgtctcagtatttcaggtgatccccaaaatgttcaattaacagagttaaaattgacaaaaaaaaatttctgaacaaattaatagaagaaattttgattcatggtttacggaaaataaaaaaaacgataaaaatgaaataaaccaaacaaaacttaaaactaataaaataggaaaaaggaacagaaagagaaagaaccaggaagagaaccagaaaagaaaaaaaggtggaagagaaagaggaacataaagtggaagaggaagtgaaggagaaagaggacaggaaagatgaccagaaagtggaagagaaagataaagaggacaggaaagtgaaagaggaaaagaaacaggaagaggaacagaaagaggaagagaaagtggaagaggaagtggaagagaaagaggaacagaaacaggaagaaagaaagagcaggagaaaatggaagcgagagaggaagaggaatggaaagaggaagagcaaaagtaagagattttaagtggtcttattaaaagttagagtttaaaataaataattgaattcccgtccattaaaaaacccatttgccctcttataaagttttttggcgcggagcgccctatagagactgttaaatagcgaagctatttcaatttaaaaaaataaattaattcgtctttttcagtgcccgtagggcactggttttactatatttttgaaaaatggggaccaaatggcaatagatgtaattttttggcgaaaaacggcgcaatatttagtaaaatacaccccataattcgggatttcaaaaaacgaaatacactcccctaaaaaccgaatttttgaattcagcccccccccccccccgaagccaagggtctggctacgccctttgtcaacagtgagcttcactgccgaaaccttcagaaatttttgatttgcaattacaaaaacaaccgataaaatttatgaggaataaattttttaaattaatttgcacccctaattttcaagttttttgtgcatatttggtgcatattttgcgatttttgtgcatatttggtgcatatttcacgaatttatttgcatatttatgcgcatattttggtcacttttcgtgcatattttttgcagccctgattatgacaaatcacagtaatggttttcaattgttttcagggagatacctattgttaccagtatgtcatggtaacttacgatttggaatgcgacctgacgtgctctaaaattgtcgtcgacgcccaaaatagaaactcccaaaaatatttcttcaaaaactggcgctcctatatatttttaaaatttaacacttactattctacaa

SEQ ID NO: 74977 - DNA, 3105 bp, Heterodera glycines
atgcgcaaatacgtgttgatgtgtgccgactgggtgaacgcgttgttcatgctggccggcctcgacagcccgcaggaaaaggtgtgggcaaaaggccaaacattcaaatttaaaaatggggccacataaaaaagtgccaacaatgaaatcactatgcctttattgatcggctaatatattttatatcgggattgacattaacccgaaatggattaatcatggtcagaaactcaagattaaaaactcagttttttctttgtttccgctaaattttggcatttaatccgatttaagcgccattcacttcttttaagacaatttgtaaattgtctttgatgagctgaaaagatttgatcaaaaactgttcattttggtgacaaatgatcaaaatgtattcgcgtaataaaacaatcacttaactgagtttttgcagaatttattaatgtaaaatgactaattaactcagcaaatttactcattaattaattagacgtttttaaacatttaatcaaagcgtgatttatttttcttttgatctggtgataaaaaacaagtgaatcctcaaggtcgtgcatcatcattaactttgtcagatcactttccagcctacagtatcacatcgttatactgtattttaaatttaaattttaaataatttttcatttttcagttgacactgatcaagaacgcgttcgtcgccttctacacgtttgagcaggccacgtgcacagccaaagtgtgccgaaacgcggcggcaacatcaaacgctgcgagcgcggccggcggcggtgcgttgctcggtggcattccgccccaggcaatttgcttgtgcaacggcactctggtggcacgggacgtgccgcaagactgcaccaccaactgcttgctggccaacaacattgtgggcaaagtgctggacgagctggtgacgcctttgcgccggctcaacctgtccgagcaggaacgggtggcactgaccgcgctgatcctgctggacggaggtgaatgattgatggggctaatgtgttcaggggattcggaaatggcaccctgatcaacattgtgatcagggaattcgggaaacaaatcagccctcattaggggccagattaactattgacagcacaaataatcaataggtgcatttttgaaatctccgcttacattctacccatttcaaacaaaaagggacttttctagctaattactaattcatgatcaatcaggtccagtgttgtctggtcgccattttcttgacccagtgaatttgtggcatttttatgtcgtcctaattgcccgctttcccctgcctgatcagacagtcgcagttcgctgggcggtctcagcagcgactccagcgacgacggcacttccgctggcggcgattatggcgccggcgccggcctgtacctggtcaaggacaagctgcaaaacgcactgttccaacatgtgcgcgagcggtgcgaccagtcgttgaaccgggcggcgtcccgtttcgccaacattttgttgctgctcacctcggtggccaaggtggcatccgtgtactacgagaatgtgcagatggtcaaaatgtttgtgcgccaatccatggacccgttgttggccgaaatcttcgactcggaggtgtgaagccccgtccggtggtggtgatggtgggatatggaaaaagccgtgagcatttgttcaacatcaaaggatagactgactaattgggtgaaaatgccgaattttgggcgggataaattccgaaattgtcaaacccgagactattttgaccaatatccgcccattcttatgtcaatactatttcggaacagaaataattctgttcgtttgattaccatccccggattgttgatctgatttcttatattatttagtttccagaactttgatcgattttttctgatcaattttgaagtcggcacaaaaaaagcgaaaatttgcaatagcaaatctctatgatcaacatgatagaatgttttaaagtgatctgatcacttacgatttggaatcttcccttgtgggtattccgtttcgtaatttagataaattatccattttgggctaatcggtatcccgtttaatcggcttttcgttctttgggattatcagatttaatttgggtcccttgttcttttccgattgagctgactgatcaaatgattttaacaggtgtcacagccccagggcctgttgacaaacagttgcacaaactcagccggctctcccgccccgatctcggccacctccgctgccagcctacagcaattcggatctcaggtaatcaagagtgaaaactgtcttaatcctcgagaatccaaggcaagaaaatttggtcgagagtctcgaatttaaagattttttccttagggattttgcccttgtcggcacaaattatttattgctctttcctaagattgagatcataataaacatggtatctggtgtggtcaaagacgggatcattctcagcatcgagagtcttgggcaattaaaattaattagtgccggaaaattggaacgccttttaaggagtttgagccgctgttgctcggctttgacgaagtgcgacggcgtcagcagcaacaccatcaactccatcagcagcagcaacaacaacagcttgacgacatcggcgtagagcagcgcccgcggcgaatgtctgccacggaaatggaccaactgttgttggcaccgcttttcgtcaacggcggcggcggcaacttccaccaccttcaccatcagcagcatcatgagcaacaacaacaccaacaacaacaacagaaaagcaacaacaacggcacgggcagcaacgagttactgctttcgtcatcatcgccggagggcaccggtggtgccgcaacagtgacgacaactgcggcaacacaaccatcgtccgcggcggctgtcacaacgggaggcggtggcgattctgctgccggggcggcaaacatgtactttggatgccattccacaacaaatgttgacaggagtggtggtgccaacggcactgacgacggtcagtctcatagtcgagaatgggtgtcaagaatttcgcaagatccgggccagcattctctgccagggttcaattcgtga

SEQ ID NO: 74978 - DNA, 360 bp, Heterodera glycines
atggccgacattgtgcaaatattagagaaaacgatttcaccaagttggttgtgcacatttatttattggtttgattcttttgaggttatgccgaccagcaattggcacttaccgccttaaatgaagccgcacgaattaattttgtaagttttcttttggtgaaaatttattttaaaataattctgaccggtctcaaaaaaaatttttgtttttttctagcctgaattcattcaacaactcgccgtcgttttgtcgaatacgtcaaatagtccaattgttcgaaaagctgctggacttcagatcaaaaatgcactcgtttcgcgtgagcaagcagtgtctgatcagaagagaactcggtaa

SEQ ID NO: 74979 - DNA, 99 bp, Heterodera glycines
gtttgtatattatacattgaaattgcgatggacactttgtttgacgtgcgaaacaacttttatttgggcgcttttcaacagtgcatcaacgaggcacag

SEQ ID NO: 74980 - DNA, 1394 bp, Heterodera glycines
gttcggcagagactacgaaacggacccaaaccatttttattttggcgattttgaacgacacaatgccgagatcgcaaccttccacttggacaagtcactcactcattgtgccctttccatttgccattgcttcttcagaatcctcggctatcgccgtgccgtgccaacggtcggccgagtgatgaatatgaccagtgagctgttggaaaaggcggagaggcgtcttcgcaagactttcttcgtttccccaggcatttcgtctccctttggctttaccccccccccatttttttttttgcttatagcaaagaatcgctgtttcgtcagcaaatgcgactattattgtgacacgacacatgcaatttgcgggtcgcccgagttgaaggagggatcagtccaagtctttctgcccgacgacacgagtgtgccacggaaacacaacaaatcaccgtacagacggtacagtatgccaaccaaagtgaccgtaaccgttagattgttcaggacatattcaaagaagacacaactcgctgcctggcagcaggacatgaactattgtcagtcgaaggtgaaggggatgaagcagtacgcgcacggaaggcgactgcttgacctgatcgacttgcatttgatggattatctgatcggaaaccaggaccgccatcactacgagacgttcagcgttttcggcactgacattccatcatacgcaattcatttggacaacggacgatcgtaaaaatgggggggcgcgatgccatggactgtttcttcacagatttggccgtactgactttgacgatgacgacatccttatgcccttccgacagtgctgtctgatcagaccgaaaacattgggcacttttttcggcttttacagcggtgtcaaagggctctcagaaacactgcacgagtgagtcacctttagggcgtccgtccgtcggtcattcgtccgttcactacgtttgttcgttcagttccctctccaaagaccccgttttccccgtgatcgccttcaaacattacgccgccttggaacggcgcctctacaaaatcatggagtaccttctcgaatgtatggacaaacagaatggagacctaacccaaatggttgtcaacgaatttcacaatccgacggtggcggagcctttgccgggcgaagagtcggagacggaggaggacgaaacgaacgacgccccggcagggccaccagcggaccaacagcagaagcaacgggaagtgggagcagcaccagcggaagcgcagcaccagccggcggatgaaaatgaaaatgcgaaaaatgtgttgaaagcgccagcagtggaaccaattttaaaggaggagcaacggcaaagtgccgaagggcatgggaaattcccgaagccaccggcgat

SEQ ID NO: 74981 - DNA, 878 bp, Heterodera glycines
atgattgatattgattgtttttttgaacaggagacaaactcgttggacccgggctgcttggtccgactggacgagtacggcttctacttggtgtgggagccgaagggcaaagatgccggcattttggacatgaaccaagtgaggtttttgactgttgatcactcttaaacaccatggtgtcgagagtcttgattcgagaaaatgtctaggaattttggggtttcgctctcgaatctgcaattttcgaccctcttgaatttcaatgtttgtcatgacatagtttcaagaggggcctttttttagtaaatctttatataaaaatttcagaaaaattttcagcgattttttggtaattttttaaaaacttaattttgccataaaattttgaaaagatagttagaattttttaaatttttccttgaaatttactgaaacatattatttccctaacaaataagcgtattcctgtcaagctccaaaaatcttaaatgctagggccgggtgtgtcagttttataaggaacatgaaaatcttcagcgcttcttgcataggtttcagggcaatttttgaaaattttttttacaatcccgatcactgatcagttttgattgatcacttttctcgcttcaaaggtgtgggaggcacggccttccggcactgtcaaagacgggcgcgtgctgtacgagttggagcagcgcggcaggtgcggcctggcgggcgagacacttgaggagcggacagtttggctgacctatggtcttgacctggtcagttttcgagagtctcgatttgagactcgggattctctggttttaatgtgtgcctctgtatttactgttaatgggttttttttttaaatcggcggttcttccaataaa

SEQ ID NO: 74982 - DNA, 657 bp, Heterodera glycines
  unsure (1)..(657): unsure at all n locations
atgtattttcctggtcacttgtcaattaatatcagcgccctgatcaatcaatatttcactgatcagcccttttcttcttacatcgtcataacggtcaaacacatcgccacgcagcagtgtctccggtatgttcactttgttgcgcaaagtccataactctttgttgttcatttgtctgctaatttgttcagcagctgctgattgcggcaccaatttttgatttatgttaattcaaaattttataggcaattgtatgtacagcaggaaattgttggccaaaaaatggtttgggaagaagccaattcgcacgctaattatacgccaccaattaggcacggccgatcagttaattagtctgtgcgcgaaggatcagtcgtcaagactctcgagaggagagtggtgttgttgtcgttgtcgtcgtcctctcgatgattgatttagtgccgccaattttatttgattgtctgctgacaagaaaaggggggaatgaatgatggatgggatatcagaaaaacttcaaaaattaaaaaacgggtttttattttttaaaaattgtaaaatttttatcgatgattccgatcttttaacattgtaattttattttagtgattgngtacacacacattttaagtgctgtgattgagtcggngcgngcca

SEQ ID NO: 74983 - DNA, 268 bp, Heterodera glycines
atggccaagcaaaagccggttctttttctgcagatggagtgtgtgctttgtctgttaggggttggttggttcatttgtcgctgcttctttgcttaatacccaatttttcgggctcccatttgggcggattaatttttaaaagaaaatatataaattaaaaaaagaaattatctttagtatttttaaggatgaaaaactaaaaagaagacaataagtgaacactgataaaataaaaatttaattgtcagaaattaattaaatatgtaaa

SEQ ID NO: 74984 - DNA, 503 bp, Heterodera glycines
cgcatcacacgaacatttttgacatggggccgttacttcggaaatctcgccgaatcaacgactcatttctttcggctccgccagtttcattcgcctttcgagctctaccaggaacagcgaggatactttggttggagggctcgcacgcttcgccacttttaacggccattaattacccccttaattagatgaagtcccacccccaactcaatgggcactctctcacgcctcgtcattccgcaccgggcccacccgtggcccatttctccgtcttccgtaccctccgtccccgcatttccaccggccaatggatcgtcccgctgcgttggcatttcttccgacgattggttccctttacgggtcaatttcgggtacaaaaaatcgcagccaaaaaccaaaatgtcctcgtcaatttcaaggagtactcatcgttttgatgatacttttggttgcgctttttggttctgctctttggtcatgccgaaattacaaaaagaaatgtg

SEQ ID NO: 74985 - DNA, 3622 bp, Heterodera glycines
atgtctgacgtaccagagaatgccaatgagaattgtccaggcactgccagtgccaatgctggtaaaacgtccgcctgtgccggctgtcccaaccaaagtgcctgctcaaccggggaaagggcggtggacccggacattgcgctaatcacagaacgattggcgggcgtcaaacacaaagtgaattgatcattgtggatttggcaaatccgtcgtttccaattttcagttgcttattctcagcggaaagggaggcgttgggaagagcacagtgacggcgagtttggcctacgcaattgccaatttgcaggaaggagcgaagccgttcaaagtttggcgtcgtttcacgcgttttttaattttcttttttcttttatgtggccgtgttggacgtcgacatttgcgggccttcccaagctcggatgttcggctgtgaggagaacagcgtacaaaacagtgatcagggtaacagcaattgatgtgataccattacaaactaattgcaaaattatattttgtcgaaaaaagaagtcaaaaaaattgttaccactgcagctttaaaaaaatataaaatttgtgaggtgttcgggttttcagttgtcaacaaaaaataaattgtttcaaataactttattaatgcgatttgccattgactcccttaattaaaaatttcaatttcttctaagttatttcttaatcgttgacttttcatttccaggatggacacccatttttgtgcagaacaatctgttcgtgatgagtattgcctttttattggacactcgcgacgaagcggtgggtgtcacatcgtttccccacccgatttctttaaaaaaaaatcataaaaaactggaaacttttcagaaaaaatttttcaacatttaccggggggaggcgaactaattccctgagcgatgacccaaaaaactggcattgaataaccattcattcatccctcacaaattgtcagataatttggcgggggccccgaaagaatgcgctcataaaacagtttttgcgggacgtcgactggggcgagttggactttctgatcattgacaccccgccgggtaacaaaaaaaaagggacaaattttccattcattgctttgccattgctgcaggcacttcggacgaacacatttccatcgtccaaatgctgctccaagcttcttgcctggacggcgctgtcattgtgaccactccgcaggaaatttcgctgttggatgtgcgcaaagaggtgccaaacaattactgcactaattcgcctgtctatttttaaataccaaaagaggggaaacggaacgcacttcaccccccccccccccctaaaatgaaaaaacggaaaatttttcttttcttttgacactgtaaatgccggcactacagaatccaagtctgggttgatcagaagcgaataaacttttgattaataccacatttgtcttgatccgtccacaaattaaaaaaatccctatactttacatagccaagttttctgaatacggtcttggttctgcttacatttagtcaatcccttccctgttcaggtcaatttctgcgtgaagaccaaagtgcccgttttgggtgtcgttgagaatatgtgccaatttgtgtgtccgtgctgttccaccgcctcccaactgttccccaacaccaccggcggggccaagaaaatgtgtgccgatttgagccttgaactgttggctcaattgccgctggacccacggctggctaaaagtcttgacgagggtcaatcttatttcgaacactttgccgactcgccggttgccaaacagttcagcgatttggcccaattggtggtgaacaaatgcaaaacgaacagagagagaacggaaattaatggcgaaacgaattgaaatgaacacagaacaattccaattgtgacatttgtttgaagaatttaaacacataaatacggtggatttaacggaagatttttggcggatttgaattttaagttggttaatgctttacaatgtgaatgggtggccaatgatattttgtcaattgtaggcgcatttaaacggtgagaaacttttagttttgttatggatgattatctcacaattttcgacaatcggtcgaacggcgtgaccaaatttgaaaggtgggttttggttttgtctcttttttccattatgggccgttttatctgtttctttcctattcatgtctcctccattatcattgctttagtccttttcctttgtccatggttctaaatctgtgattcctttttgtcctctctctctgtccctcattagtccttaattgccgtttcacttttcgtttggtcatccatttcccctcttttcagtgtccaatctcgcttcgaccgtttgcacattccccgtaaggatgtccaatggattctctgcgaatcttgcggcagtttggtgaacagagtgctctatgataatcacgtgggcatcgactattttctctttccgtcccatttcagcctcctttttctgtttagatcgtccaacatgagttcatcaacctcgcttactcaatgtgtcatttcgaattggcggaggagaaaaaaatgctgaagatcagccaacggattcaggcaaaaatggggccgtgggggggaggcattttggcatgggacgacgaaaacacccgcagtttttggagatcgatttacttttaaaaaaatttgagacggacaagtgacagaatgatccctttttttagagaaaggaaaagcggcgtcagcgaaagaatcattcgttggttggcttagacgcggaggaggacaccgacgcgtccgacttctcctcttcctccgcttcgtcctcctccgatggatcgtcggaggattcttccgactcggcgagtggggacgacaacgacgacgccgaacagttcactgctgactcattgccgggctgttccagttcagtggctgttcagcagccgcaaaagcggaagaaaactgccacggaaagtgacggcagtgaaaagcgaggcgaagacgggcgagggaaaggggcagaagaagagagcagcggggaaaaagaggacgacgaacggaaaaggtgagggagaggaagaaagagagggaaggtagggacaattgcaaaaggcttgcggactcgacagaattcccgtctcgcaattttagtctcgaaaattgcacatttgtcctaaatagatgcgttagtcgacttttaagtgatatttaattgacttttgcctccctcttttttcagcaacggctccttccgtgcttgacggagttgtgaagcgagagaatggggagccgaaacgacgaggatggagcacaacggacgcggcatgggacgaggacgaagcgttggacattggcaaaacggcggaggagtgcgacggcactgtgccgtctgttgccggggggacggcacgcggaaaacggacggcacagcagcaaaagacggaaatggccgaacaaacggcggaggagcagcacaaaagggaggcggaagaggagcagaagcgggctgaggccaaggagcgcaatcagcggaacagagcggcgaatcggaagagacggctcagggcggtggtggaggagcaaatgatgcggcgccatctcggccccaaccatcacagag

SEQ ID NO: 74986 - DNA, 2247 bp, Heterodera glycines
atgtccgggtccaccgccctttccccggttgagcaggcactttggttgggacagccggcacaggcggacgttttaccagcattggcactggcagtgcctggacaattctcattggcattctctggtacgtcagacattttaaaacaaaaatttgtaaaattaaaaacatataaaaatggcataatttaaaaaatggcaatggaattgaataaacaatccaaagaaattttgctgttttttcaatttttattcatttgttgttgctgtctttgcaatttgttctgttggattctggccaattcgctttcggcacttcgattctcagtgaatttgaacgtttcgatgaattcggccgcctcctccacggaatagcaaaggaccaaagaaacgtccattcggtagcagaacatgttcaggtcacgaagcaaaaaggaagggtcttcgacattgacgtaagccaacagaacctgaaaatgaaaatcgatgagaaatcatggggaaaaattgtcaatttaattaaatttgaaattgtgcagtcgtaaatcctcccacctttacggggtacgccctcagatcggtgaaacgagtctcaatgtacccgcagtggagtttgtggtatttcagggccaggtaaagaagcccacaattaccagaacattcaaaatcgcatcttaacggcggaaagttgctcaaaatgggacaaaaagtatgttccaattcactttacgtcggatgaccattcgtacggcacattccgaatgtatttgagcaccgggttgccctcttgtcggcgccggtttatttttaatgtggacaaaccgaacggatttccccttgggagtgccggggccaatagcgccgatgtttggggctggtcattttcagaggaagttgttgccattgaacgtaaaaaattaattaaactgagtgggaaatttgtctcgtctctctcctcgctaatttgaagaagggattcattttgggcgctctttcattggttttttgaattctccctactttttggcattttgctcattcttttattttccccgacttttctcggttgttttcgatttgtctcttctcttctttgcttttgctgtttgttattatttgtttggtgccttttccctctctcttataaattcgcttccccttctacccattccaaaactcatcaaaacaaaacagcgatttgtgctgttgtgccttttcttacacattttcttttcgtttaaaatttttttgttttttcagctttttcccatttttctcaaaatgttccgtttgcaatcttttcaaactgttggcaaacagtttcgacaggcaatgtcaatgcaacaaattgcgaaacggtaaaagcattgaccgccccttcctaccagtaatagtttctgggaatggactttttatttaccccctttgggtgtgtaccactcccgccgcctgggaccgtctccccccccccccctgtacattcttcgctcttttagctcaatttccgcttccgccgtgcgtcagtccgctttgcgtgaccctttcttccgcgaccccatcgacctttggctgtacgaccccttgcgtccaatgcgtcggatgctccgccgtgcgtccgatcccttcgcgatgctcgaccatttcttcaacgaccggtgggtccctcaggtgaataggaaaagagggagctgtgagaaaactgttgtaattcttgaaacaatttaattgaaggtccgcgacaacgcggccaaattgggcatcgatgagaagggcaatttcacgtactctgtggacacttccggatatcgcccggaagagctgaacgtcagcatcgaaggggacgaagttgtgatccaaggggagcacaaggagacggtggagggtgagttcaaacgaaaaacaattaacccctatttaagtttcactgcatttccttccgtcttaattagccactaattgttttcagatgagactgtccaccgccaattcgtccgtcgcgtccgtatccccgacggtttccaaaaggaggggctgaagtgcgcgatggacgacgcgtgccgcatgtgcgtcacggcgccgaaggcgggcgcggagccggcggccgaacgccgaagcattccgatcgaagtgaaggcgaaggcaatcgacgaaaagaaatgaaaaacgacggacaaatcgagaggaattgtttttttttccattttcacacctgggggagaaaagactcatcctttaagcttatgaaatgca

SEQ ID NO: 74987 - DNA, 904 bp, Heterodera glycines
atgaaatttaaattattattattattatccctattaatgatcctactatatacaattaagcagaccgtgcaagtgaaattaaaacaaggaaaaagctttgatgaaatatttggacaaagatgtgacgatggagcagaagaaattgtctgccgaattgatcacaaaattcacggagaaattgatgatcagaataatcaaattcaacaaaatagtcgacaatttgatcaattttttgatgaaattttggaagtaaaaaaagaagatagtgaagaaatgtccaataattgtgatgaattggaacaattaaatgaaaacaatggacaaagttatgatcataataaacgaattgttgaaaaatttcataaaataaaagacaaaatcaagcaaatgggaaacaaatattcagcaaaagaatggaagaaaattgaaagaaaatttgcaaaaaaattgggatcaactcaaaagaaaatttatgaatggaaaaaagaatttggattgaatattagaaacagatattcggatgaggaaaaacttgaaatattaagacattttgatcaaatatatggccaaataaaatcgaaattaaaaggaaaattggatggaaaaagagaaaaatgtcaaaaaatattagcaaaacatttgggcacaaatatcaaaactatttataaatggaagaaacaattaaaagatgggaattcgatgaaaaagcaaaaaattaatgatgaaaaaacggaaactgttgaaaaatattttaaaataaaaaatgaatttatgcaaaatggaaaacattcacgaaaagaatgggaagaatttagagcagaaattaaacaaatgtttggtgtaaattatacgacaattgaaagatgggccaataaattagaaattgaacaaaatgtttcaaaaa

SEQ ID NO: 74988 - DNA, 137 bp, Heterodera glycines
ttttgaagatatttgtaagctattaataataaatacacagagctatcgaacaacaccaacaatgcttaatttgattgacaatgaacaaagttatggttcaaaaagtcttccgacgatgtttcggccgacgacgtttt

SEQ ID NO: 74989 - DNA, 429 bp, Heterodera glycines
atgctcttcaagaacaagcattcgctggcccttgaatgcttctacatctgccggatgtacaaacagctgcaggaacagcagaagaagaacaagtgcggaagtgccatcgtgtggacgactgaagcagagacggatggcaacgatgctggtgccaacaaattcaacatatatatatctagaataaatcaggataatctattccttccataaaatgctgtgaattcttttcattttaggccattgtcgccaccagcgtataaagaagaagaagcggatcaaagcaatgaaaaggtgtgctcgacgattcacgggcccagtgatcagcggaatgaagaagaggataatgaagaagcggatcaaagcaatgagaaagtatgcagaacgattcacgggcccagcgatcatcagcggaatgcaaaaggattatga

SEQ ID NO: 74990 - DNA, 816 bp, Heterodera glycines
atgccttcttcagcacttcggtacgtttattatttcttttttctgtcgtttcgcattttcttttgctcatttttgttgccaaaattgcaagatgaaaatttaaaaaagttccaaaaccaattttgaaggttttagcttcattggcctcaaaaaatatgaaaaattcacttattgattccctcactttgatctttgaccctttcattgattcatttgcccaattcatttttcagtttgtttgccgtgactttactgttggccagctctggaagcattctttggtccttttttgatcatgtcaaaagccttcgaactcgcaaaaaaatgtaaaaattaaacaaaaaatttaaaaattttgaaaaattcttcaatttttcagctttatctctgccgattgttggcttctggtgttcgactttctttcgccttctcaacttggctttggaattgcattgatcagccgtcgatttgacctccgagtggacgaacatttcaaaacacgcaaatggaaattgaacaaacaattgctaatccaatgggacattgaagaaaatggcacaaagaaaatgcaaattgtcgaacccaatggaaatccattgccaattccgcaagaaccgttgccgagcaaagtgatcggattcaacggacgcattaatatcatgtaaaaaatgtttagatcagcgcataggcaaacccttggcttcgggggggggctgaatttttaaaaaatcgctttttagggtgtttttttttcaattttagaatcctgtctgaattagggggggggggggggtaagagattgtttgaaattttca

SEQ ID NO: 74991 - DNA, 1769 bp, Heterodera glycines
atgttccgcgcttcaattcgtggtatcaatttgaacgccatcacttttcgtcgcatgtgccaattggccccatcaatgctcaccgattgtccagcacttcgttatgtcgattccgaggatgccatttttcccgaatttcttctgcccgatgatgacaatgcccatgcggcggatggccaagcggtggcaaaatggctgtttacgcctcttccggatggtgcgtccaagcggatgaaatgtcttgtgaatttatcggtggatcaatggacggcttctatggaacagctcagaacggtgagcatcggaacgggcaaactcagtctggccaactcagtctgagccaactttaagcgtcaatataactttttaagttgttgactgaaagaatatccaacaatcttgatatccattcgaaagctcttcacaggctcaattagtctactaaataattacagagaatgtcaaactgtaaaaaggatagaaatagatggagacaaaaaaaaacttcgaaaattctgctttttttttttgcggttttcaagcgacaatttttttttgttgtgagctgcttaatcacttcgaaatagctcagaaacatcatcttctaaacattaaaaagcttctcgattgatacccaatgtttgttaagtttggtgaacaaataaaaagaattaggtataactttttgaactttgctgattgtgtgagacgggtttggccagactgagtgccccttatattcttcctctatttaaatggtttttcaaatgatttttgtcccattttcaggcattttcaaatgcttcttcaccagtgactttccacattaacttgacgctttcgtccactttggttggctccgttgtgccattcttcatgatgaacgaagcgactggggaacaattggcactggaacaatatgacctggatgactttgagctcttccgttgcccaattgaatgggattgggaaaattggaaaaatgagtggaaagaatcgtgtgctgctcgaccgagacggattagcttttggatcagagacggcggatttgaagaggggtgaacaaccatttaattaaaatgatcaatgctttttttcctgttgttttatggggtgcactatctcaattccccctcattgtttccccccgagaaattaaaaaagaaatttcgttgctaacttagaaattgttcaagaaaaaatcttagaaagttttgattttgagccgaagttatgaataattttttgtcaaaaatttttcatttaatggttttttgactaatgtctcccagcacctttgaaacggacaggggatatgtggcacaaaaaatcaaggattgttaattggttggactcataaaatgccatttggacccataaaaattgaatgagcttaaaatacaatttaaatctttatttttcagtcttctcgaggccgcttctcctggaccgagtgatcagcagcagtagaaatgaatgaattaattgatggttaattgatgcgattatatgaccgaaatgatatgttggcactgtgccatttcaatattatattgtataatttgcttgtatgtacctatttgtcctttgcttgttttccgtaaaattcgttcatttccattttattttatgtgcatgtgtaaaatcattgtgatatgtaatcattgttaaaaaatgatttgtgataaaatggatttgatttctgaattttacaaaaccaggcgggatattcatacaaagcatcttttttctagcattatctcttccaa

SEQ ID NO: 74992 - DNA, 356 bp, Heterodera glycines
atgaacaaacggtaaggaattttttaaaattccaaatttttgatttaccctaattttttccatgtttcagttggatttgtggcgacgtttggatggacattctcccatcttttaatcgtccccaacttggtctcaaaatggcattgctttccgaccgtttcgatgttttggtggacgcacattttgatggaaaaagcgaattgacaatttggaggatgatcagaattggcaaggacgaaggaccaaaagcgaaactattagtggaaattaatggctattttgtgcaatttccgatgccgaatcgtccgttgcctaacaaaattcgttttcatttccttcttattcgagtaatttga

SEQ ID NO: 74993 - DNA, 1218 bp, Heterodera glycines
ttggatttgtagcgacgtgtggatggacattcttccatcttttgaccatgctcaacttggcctcaaaatggcactgctttcttatcgtttcgatgcgctggtggacacgcatttcgatggcaaaacggaattgacaatttggaaatggatcacaattttcaaggacaaaggaccaaagccgagactttctgtatggattgctggcaaatttttggattttccgttgccggatcgtccgctgcccaacaatgttcgatttcagtgccttcagattgagtaatttttttcaaaattgttgtttatgttaaagcattttttattttttcagatacattgaccactctgtgctcacatttctccatgccaacaagcacatttgggacagaagtggcaccaaattgacattgtggccatacagaaccgaggatgaacagcggatttgggatgtttttatccgtgaaatttggccactttttgcgacaaacattcgccatttgagctttgctagtagcgttgatttggacaatttgcgtcttcgcacttcaccaacaattctcactgatcttgatcaattgcactcaatcgattctggtcatctgtgccccgatggaattgctgattttgatgtgctgaatccaactgctggccaagtgttgtccaaatggttgcacacgccgagcaaaaatggtcaaccgaagcgattgcgttacagtaattttccactgaatctcggatgggtcaacagcttcaaagaggtcgtctcgccagaattttcgtcaatttgtttttgttttaccaatttttgtgtgtaggcatttcgccgtgccatcacttcggtcagttaccatattcaactttatttgtttacgacaacaatgacaactgaaccatttgaattggtgaatggacggaccaatgagaagctgacactgaaaccgagcaaagaatacaatttggttatttggctgttgcaacggtgcccaattggggagacgtcgacggcgccagttaaatgggcagaccagcatgaaaattcgggtgccaatgccaatttgaacaatatcaattttagtctgtggattttcaataaaacaattgggtgagcagccaaaacagcatttgattttgtcgaaaataaaattaattaattttaggccattgtcgccaccagcggaagaagaaaacgaagaagaagcggatgaaagcaacgaaaattaa

SEQ ID NO: 74994 - DNA, 1722 bp, Heterodera glycines
atggatcaaagttcaatgatcaatcaaaactcactttttgtatgtgaaaatgccatttttttgcatggcatttgtgtgccgtaggtgcaaaaaatgcttgtcatatgtacaatgtacaatatccgattttgctgattgaaaatgccaacttttgtttgtcataaataactgtgtgccataggaagtgaaaatgctctattttattcaatttttttttaaatttaatttttaaaatttcttcaatgcttccatcggcagcaattctcttaagcgcaccttatcaaaatgttaatttgacttattttttaataatgcctttttaatgttaaaaataaaatttacaatttttaaattattgaagcgcttaatccctttacgaaaaaatgaccaacggcgctgtggaatggccttcgcatgcgattgccgagccaattttgtttgtttaaaaattaaattaattttaatttttttatattttaagaaatgatttttattattttgtaatatgtttttaagtatttaccatgaatattttaaaaaaacttaggagcatcattgttcaaatcaattttcgcccattttttgcacaggcattggattggcatttcacgtccggccaacaaccaagcgcaagcgcgtgtgctgcacaacgcactgcacaacacggtaaaaatccaacatttaaatttgtttttttttctctaattttttcagctaaatatttcgttaataagattttcactgaaatttttgggagaaagtatcaaaaaatgataattgtcaattatttctttaattaattaattaatttttagagcactaatttgcccgcgctttcttcggttgccttcctcttggacgtgtacatgcccggccaatctgatctgctttttgcgcttttgtacgttggcgccaaattgtccctcttctgatcatttaaaaacgccaaatcgcatttcataaattgaaaatcccaaaattacggaccaaaaatatgataaatgaccaaatgtggacagaaaattgattattttgaaatcattaacatttttggcactaatgccataccaaatttgtcaaatttgcaattaattaatggggagacaaaatgctaaccccgaaaaaggttcccaagcattaattatgcttttagtctcattggcgtgacaactgcagtttgcttgctgctgttactaattgtaaggagcaacgaataaagaaataattttaaattaattaattctttaaatattttggaggttttcatttaaaataattaataatttatttatttttatttttcgggtgtttttatgtatttaaaataatttttttttattattttgtgtgtttttatttaaaaataatttaaaattaattttattttcattccaggtatttttcattttgtgcacatctcgtcggaatggcatcatcagttgtggcacttcttcttcaaatgaattcggtgtgcgtgcttcttcaattgccccgtccagcgcctcgggggtggacgcattctcaactgatgaggtaacgcaaatattttttttcaacttttatagttttttatttttatttttttcaaagtttaatatatttttcaatgtttcccgaaaattttatatttttttaatattttggttgtttaattttttcgacatattttttgttgcctaaaaatgggactgaattggtcggtttcaattttttctctagaaa

SEQ ID NO: 74995 - DNA, 547 bp, Heterodera glycines
  unsure (1)..(547): unsure at all n locations
agcaagaatattgctatcttgcctaggcgggattctgacttagaggcgttcagtcataatccctcagatggtagcttcgcaccattggtctatcgaccaagcacatgaaccaaatgtctgaacctgcggttcctctcgtactaagcaggattactatcatagcaacaggtctttagtagggtaaaactaacctgtctcacgacggtctaaacccagctcacgttccctattggtgggtgaacaatccaacgcttggcgaattctgcttcgcaatgataggaagagccgacatcgaaggatcaaaaagcgacgtcgctatggacgcttggccgccacaagccagttatccctgtggtaacttttctgacacctcttgctggaaactttacacattcaaaaggatcgataagccacgctttcgcggtccgtattcgtactgaaaatcaggatcaagtaagcatttgcctttttgctctacgagaggtttccgtcctctctgagctcgccttangacaccctgcgtacgctttgacagatgtaccgcccc

SEQ ID NO: 74996 - DNA, 616 bp, Heterodera glycines
gtgctttgcgttggttggttggcgtgggtgagtgtggtggttgggccgtttttgcgatattgtggctggaaaaaaaaatgcgatttcactgtggggagcgcggccgtctgggttcaagtgcttgcttgcgcttgtgctcggcattgaacggtgatggctgctgctggggtgccacctttgtcgtggcctcagtttctccagcgtttggcagctgtcgaaatgaataaaacatgcagctcgtctgtgtgttaaagaaatttggcgagttaattgacttgtgtaaatgtggcctaaggcacaaatgctgtggggaactcagcactggggatgctgaacctaaagttggtggtggtgttggtatacgagtgagtggcgtattgccatggttgacaagccctatgagttcgtggatcggaactccttgcctggggaccagtgtgcttgcattcgaaaaaacacgaggcataagcgcccgaaggcctttggcctgaggaagtgtcctaaccggaaaatccggagtgctcgtgtgagtgcctgtgcactgccctcggagctgtgtccagcggcgagatgttcttcacaagtccgggaagctcggatgcctggccagcgctgt

SEQ ID NO: 74997 - DNA, 1461 bp, Heterodera glycines
atgcttgccgaccacttggaaggtgaccacttgaagcattcccttaacgccgtcggagagatcctcgacatgggcaaattgaagtctcttgccaaccaacggggcggcctcaatttcgaaatgggtcatatttgttcatttattgtttttcacaattttgttgtagtaattaaagatgttctcgatgtagtgggaagactgtgtgctccaattcgcgatgaaatggttgcaaatttaaagaaggaaacagacattgtcaaactgttcgagtaagcgattgtttggcaatttttgtcttaaaatttgtttcatttgcagcggcgtattttctctggtggaaatgatggaaatcgacatgaccaactttaaaatctcacaaaacagacaacttatcggctcttattctgcacaaatcgaattcgaagaatttgaaaagctaatgcaaatcgatgagagttggtcatactttgcttatttaacaactaacaatttctcaaggttcgtcgcaaaacactaaacggtggctgggcaagattctcgacgactttctttcttcacctgacattaagtcatgtgctgatggtcagaaggacggtctgacgcgagcccaagtgaatgaattaattgccaacttttacttggctttgttgacgacgaatccaaccgacagcgaccgaattccgttccccgaaacactcaaattggatgaaaaacttttggacgctttgaacgagaaatttttacaattggagttgacaatatcagcgatttttatctctgctaatttagtggggagaagcgtatgcgaaggaaatgatttcaaatcgcaattaaagcgtgatttaattgtgatcctaaacgacgtaaattggaggtgggtttgtgttcgttaaaaggatcaaaggcagattgaaaactgggatttatggtttaagcaacagtacacagaaattaaacaatgtgtacgttcactgtgagcacaaatgcagagaagcggctgctgaaaaaggatggaacgaagaacgagggaatactctccggcgacaattggacggcctttgcagaacggacgacccaatcagagtgatttcgagtgagggggacgtaacttataaaaaatattggccagaggaaaccaaaatgaccactgtaattctgccttgatttaaaaacacatttcaggaaaacgtttgtgcgattttgttggccaggccctcttacgcaggagcagccccatgcgaataccgtcaggccttagcacaattcagacggagttggcatcactcacttcgcagttttatgctattactgtgcacaattggaatggatttggtcgattttatggacaattgttggatcagttttatgaatccaaatggaaaataacctcgcctcattaaaattaaccattccttcgttttgtgcccaattgtcttcttaatattatagatgaggtcataa

SEQ ID NO: 74998 - DNA, 895 bp, Heterodera glycines
atgcaaaaatctcaaataactttcgcgcccgtttcctcttacactcttcggaaacaaaaaagacccatcagtcgttcaactgaagagccgccacccgttcttacaaagggttcagaaaccgaatttgacaactgtgaggagccaccgccgccgttgttggaggcagaaacagcaacagacggagatggtagtttttgttttcattttttaatattaattatagtaaaacattaggatcggagcatgactttgtccagaatggttcgattaaatcagtaagagatctctccgtgattatgacatcagctgcagaaattggtagggcagcggaagacagtgccgccggctgtgaccctccagcggaaccctttattttggagagcaggttttcacattagggacattatttacttcagcctccttgattgacaggcatttgccttcatggttccgaaattgccctggatgtcatcccgatcaaaattccgaacttctgtttcgtggacgaatcgctggtgggcctcagtctggccctattgtctcaatcgaatgcgcattttgtggttcgccgatttataacagcgattgtcactgggaacggcgaccgacgagggctgaaagtgtagaaaagaagagcacaaaaggctcacaatcagcctgtgatttgactgacaacgaactcgaaccgtcgacttccgcggcggaaatcggaggaaaaacagctgataaaactcaagcgaaattgacgaccaggaaaaagaaggagattggcttcgatcaaaattattctcaccaatttgggctgagttttccggtgatgttcgaaaccgaagatggccaacggaagagccattgcgagaggatcacatttcgtggattcgtctactgtcatgtt

SEQ ID NO: 74999 - DNA, 1155 bp, Heterodera glycines
atggccgcctcggatgtgttcgagacaatgtttcgttttgatgcccaaaatgcagcaacaaaacacaacgccaacggaaagggtcgaaaaaagattcgatttaattggagtttcaatcgggatgctcggaaaaagcgccagtcgaaaattgttgttggtcagtccgtatcagtggtactgtctgtactcggtgctgagtcgttagtgaaaaaaaatcatcaaatgaaaattttcaacaaaaaactgcccataaattttgtcaaaaatcaagcaaattaaatattcttggtatcaatcggtagccttaagtgttttctagtagcctgcaaaatttcaaaaaatttggctaagtttaaaaaaagttatgacaaaaatgtctgagcacctggttccttgggtatttttggccatcattttgttcaaacatgacgaaattttttgaatttcgagtgagctaatagagtaactcttaagactatcgaatgcaatcaagaatgtttagtttggttgacagacaaaagttatgggcaattttttttgaaaattttcatattttttttttcatttcatggttttttatataacgcaattattgatgttttttatataacgacattgcacctaaccttcaagtactgcatataattaatttttcttagtcttcggctttttttttgataaatagtttttggctttttttgaactgttattaggtatattttaaaatattaataattattttatttataatatacatatatatatatatatatttagaacatcaaaatgatcacatataaattagtaattataattttggaaaattttaaattttactttacctaaataaaaaaagggaataggcggcaccaatttcaatggcgtgaaacgaacacaatttaaattaaaataactgaaactcgtgtaaaattttctgaaaataaaaacttgggattcttcaaaatttctcttgtttttctttcagaagaagggccaagtccgattttgatcactgacattgatgttgatgcgttcaagaccatgttgcgcttcatttatgcggacgatttgagcggattggacggggaaaatgtcatctccgttctttacgcgggtccaaaaaatacatatatactgtatatgtttcttctgtag

SEQ ID NO: 75000 - DNA, 1596 bp, Heterodera glycines
atgccattctcagacttcggtggccgtgccatgcaaaatgatttccttcgtttaaatggtccgtcgtttttgtcggattatgccgacctttggcttcttggacttgacatgctgccgatggcacaccaaacagaagagcaaaaagaacagctgaagatgaagctgttcagcagccgcagctccaaatgcttcattgaagcatgggtaacgatcaaaagggaaacattttttgggtatttgccaatttttctgttttctggcctccccctttgatctcagatttatgataaacttacaactcaattttgtaacaaaagtatccatttgatcaaatttaattctttaagtttgtccaaccatcgcattaccttgagccatccgatccaaaaatgcaattcgccttatagcagcatttttgttaaaaatttggacaaaactaaaatatttgaaaataattttttcaaatattttgtctttttaggcactaaaaataaaaaaactcgaaaagcatttttgttaataattttggaaaaatgccaaaataggcaaaaataagttctttcaaaatttttttaggcttttaggctccaaaaataaaagcctagaaaataggcactaataactcgaaaagtagcttaacaacaaccaaaaaacatgggtttcattcgtttcagcccactgggagctaaggaaaaaattagtaaaaaaagcactgtttaacaccaaagtggctcaaaatagcatttctgctttaaatttttttgttttagtgaaggtttttcgtggtttctggtagtttttaaggcatattttagtgcatatttgagcatttttcgggtttttaaggcatatttaggagggttttaagcaaattttatgcacatatttggaattttttttagtgcatacaacatatcacccaaataaatccattttatttaaataaatataaataaatttccaatcttttcagaatgatcagtcacacaaattttgtgtgcacacccgcaggggagattttgttaaaagaggttgggactcgaagaaggaacctacggagaaaggaattgatttgggatttgaatatttaaaggtgattcaaatggcgaattgtcagtcatttcttcaaaatttaggaaaaatttgacaacatttccatttctgttgttttgcttggagaagacaaacaatttttggcgaatttatcattcaatcggcatgtaaataattgacatattttattactaaaattaattaaaataaattccctttctttttttgtcttttgccaatgtttacgtgccgaaaccaatgccaagggctaatgatttggcttttgccgttttgtcatgcgattctttgtttatctcggcacaaacgtcaacttttgcttggtggattggctatttgatgccggacgatgcgaccattctgtataattccgatttccttccgggtcaatttttaatttcgttgaattttaaaataatgagtaattctgttttaggccttcatacacgtgaccattttttgcctgaatggattccgatcaaactgatcaatggcacaatggctctcgattatcaagcggagtga

SEQ ID NO: 75001 - DNA, 278 bp, Heterodera glycines
atgaaagccgcccaggcttttgaagtgccaaaattaggcttgctgaattatgccttgatttggcttggaggttgtgcagaatatgccttgatttggcttgaagattttgcagaattagccttgatttggcttgatgatgtgcagaatttatctgatcctgctgactgcgccaaaattgttgtgtatcaacaatttattaataaacaaataaaaataaatgcacaaaatggtgaggtcggaggagtgcagcggcggaggagaacaaaataataaataaa

SEQ ID NO: 75002 - DNA, 2357 bp, Heterodera glycines
atgactgcgtttcatcagaccacgaatcgtcaggggaatttgaccacatcggaacggaatcatcgacgaatgactgcgtttcaccagaccacgaatcgtcaggggaatttgaccatatcggcacgtgagcaaacgactgggaatcgcaaaattgtcaatgtacgtaattgaaagaaatacattatacgaaagcggttcatgctcagaagtacaatgtaaaagcttcagaagctcttccagtttctcgcaaaattttgtcccgggattgaaaagtaatggagaaggacataagcgcagagttgactttccgccctatgtcaaaaatttgatttgggttctagtcggttttacgcgtcccatgacatttaacgcgtcccaacagcagtttacgcgtcccatgacttttgtatcatggcggggatcaggggtggagcgcgcacagaaaagaaccgcggccgcgcatcgcacattcaaattgccgcggccgcgcaccgcggattgcccaaaaaaaaaaccgcggccgcacactgcgcatccaaattgccgcggccgcggatcgcgcattttttaaaatttttccattttttaaaccattttaaaaattttttaaattttcttatgtaaaaatttgttaaaatctcggtgtacactgtagactggaaatgtgaaaatgacaggaccggcccgggctcgggcttagacaattggccgggcgcccgccgggccagggcttttttcaaaaatttttgaattttgattaataaaatttaaaaaaatttacttttttattttagctttgaattatatcaagccatgtaaatcaaccttttttgctttttaaaaaacttttttaatggcgcattttttcaaaaaattttggggtacaaggggggggggggtccgatcgcacatcgcgcatcgcggcgcggccccagccctggcggggatggcattccgagcctcataaaattttcagaaatcgggattccgtgccatccctgtttccatggtattttagccatcctaataacaatgaggaaacctttttttgtccagtattcagtaatcttttttaaataaaaatttcgttgttaaaccttgataactcatacacaggcaactcgaacaatggcttagactaggcctaagctttaggtgtgcttagggttgcctttgcacatttcgataatcaaagtatacaatcaagaacaattagacgatttaaagtataaaattcgattgacggtttgaaaaaactgattttgtgacgagtaaatgatgggacgcgtaaaatgttatgggacgcgtaaaaccgactagaacctttgattttattataaagtacgaatttgagttacaattagcagatataaaaaatttaaaactaactacacagtgaagcacttttccttcacagggtcctaagtggtgaaggccatcctcaaggttaaagcaagcaccatctgtgagagaaaatgaaaattcatatttaatttaatcattttaccaaagtcttccaaagagtcagtcacttgtacaatggacaaattgattagaaagaaaaaagagtaaaaaagccaaaacattgtgtaagaaaagctaaactagttacctactttaggtacagtcatggtcaaatgtttatctacacagaaaaccgtgtccgaatcggttcagtaggagccgagatataaatttttgaaaatcaaaaaaacggttcaaaaccgtataggtaatagtgcaaaggggtcgactttttcgatattcaaaaatttatatatctcggcacctactgaaccgattcattcggacgcggtttttgacccatagtgtaaagggaaagagggcggaggttcgagtccgttgtgcaacattaatatttttatttattttgtccaaaatattaaaatatgacaatttttagcgccgataaatgtaatggacgaaaggaatagaagagataaagtgaagggaatgtcggaagaaattgcgaggggaaaagggacgaggcgaaggggcggaagatttctttatctcgccgaccgtcacatcccttcaatcattcattctctgttctcgaaaatatagacgcattgcgtcactttccgtcctttaacatggccttttatttatgtgtttctttatcatgtttttgcttttccccctccccctcccttcttcccctcttcatccttctctttccccactctctcttcatctctcctctgtctccctccttgtctcttctctccttttcctctctatttcaatttattttccttattccagcaagaaaagaaatggaccatcatcatcagcagcaaaaaagcgaggaagattcatgttcggcacccgga

SEQ ID NO: 75003 - DNA, 750 bp, Heterodera glycines
atgcgtttgattgctagaaagaagtgtgcgctaatgacgcctttttcaatcaaagaaagttccatgtgtcgatattccctaaaatggcactgagagaaggcgggtcttgttcttcagcggcggcaatgggtttcttagcgcttgggagggatcggctcgtgcaagacttttcataataattttgtcccattttattaaggcactcgcgcacttttcctttccatcgcttttctcactttgtgtgttttggccgtttattacgcggttaatttgaaactgaaaaacgaatccgtcaaatattcgggctttgacgcgttcgacgaagacaccgccggcggcgaaactttgggttaccgaaaaataaaagcacgccaaataaactcgtgaattttacagcccctcaaggccttccgatgcattgctttggcggcaataaggtgctaatgattacaggctaattataattaattatatatatttttaattgtcattagcttcactttggactaacttttgggatttttaaatttcatttttcgcctcgcaatttggccaatcattcttaagattgcggaggcattcaatcaaacggcagtgacaaatcagaattatggtgccattgaagagaacagcgaggaaaaacaaagggacgacgcttatgaccgatatgtgacgggacaatgaaaaagaaaaagcaatagccaaagaaggatttaagaggagaaatgatcaattaaaaaagactgacaa

SEQ ID NO: 75004 - DNA, 259 bp, Heterodera glycines
ttagaaacgggcgcgaagcgcccgtctgaggccgcgaagcggccttaatagcccaacaaatttagaaacgggcgcgaagcgcccgtctgatgcctcgaagctgccttaatagcccaacaaatttagaaacgggcgcgaagcgcccgtataagcccaacaaaatttaaaaaacgggcgcgaagcgcccgtataagcccaacaaaatttaaaaaacgggcgcaaagcgcccgtccaaggccgcgaagcggcctaacaagct

SEQ ID NO: 75005 - DNA, 1457 bp, Heterodera glycines
atgactaggcgcattaggagcttcttcacacctagtgctacaggtaaatgcatggcctcaacaacacgacaaatgcagtacaatactgagatggatgaaaaagcactttggagggctgttcgcggcaggagtttgagtctaaaatccaatgggtcacatcattcgggattggaattaccatttccaagtggtttctgtactcaattttttcaaaagcaaattggagtcttatcgaggaggatttaattgaatttgcgcatcaaaaaagtaaaacatgaagtttaaaaaaaatattttctaattattttacagtcaacagagaatgtagcacaagggtggaagaagcaatggctgcgcctttggaagacttcgattctttgattgacgacacggaatcagcaagcgacgacagcattaaatgtatttgaataattattttatttttaatttatcatgctttaagtcgatatttggaagcccaagtctccagggagtgtttcgatgccctcaattgtttctggcacttcacagtcgtctcatcaatcacaaattcatcttcaattagcaattcctgatttgtttatactggcccggattgttcattcaattcccgccacatctgtgtcatcggaaaggctgttctcgtaacgttccctaattttctaaggtttcgcgccccttccattttttcaaaagattgggattatttttgtccttttattgtaaagaaactttggaaatgttggaaaataattgcgaaattgccaaatgtttttaggggccaactcattgactgttagcccccgacgccgcaagcgcaactcggagatggtaaagcatatggtcgtgttgggcttgtcgctgggtgtttcgtattttgggctgacatcactgaaaaggacgcttgagaagtacctccaatactttgaccaacccgtgacaatattcggaacggctgtcttactgtatctcagcacactctacgcggtacggtagaggccatttcagagaagaaaaagccacagcggaagaagaaactgtgggcagatatgattgattgtccgtctgtctgaggcccttccccagcattttaaaaatatttagcatttaaattatgaattttggaagaattgtacggtaaagaattggacatcgaagacgtacaggaactttacattgactaccgtaagcaaattgcccaaacaaaaggtagagaagataggcgaacgaggatggaatacggtagttcgtcgaggaacgcaaggcacagtatgagaagggaggcagcagaacggagacggtagtaatttggaggaaatactgcgggaaaatgacaatgttggggacgaaatacaaacagattatgaggaggagtatttgagatatgtggaaaaagaaagaaagaaggcggaaagaagagggaaaagcataaaaaaggcaattaatctaattaaaaa

SEQ ID NO: 75006 - DNA, 875 bp, Heterodera glycines
atgggtcttttcttcgtttggctttctttgttcgtcctttccccaccgtttggcggtctttgcagcgcaaatgcaaatgttacctcctttccgacaattgctaatggtgccgttcccacaacactttcgccgggccgatcccccgttgtaattagtccatgtgccccaattgaaattgcctttgcaaatgttgtgaagcctggcgaggcgtcggtaaataccgaaaagcgtcagaaatatttattccccccccctcctttaattttaggtttgccaatgcattttgaatgttccgccaccaattgggggcaaaacggtgccaacgccacaccaaaagggcaacggcgaccaattttggatcggttgcactcggcacaaaatgaccgccgtcttccgagcgttgcaaacactgaacggcactcgcgtgccgcacttgcacatttgggactcactgatcaacattttgcctaacgacccgaagccaatgttcacgcaggttaattatttatgagcagcggatttattgcgttgcaacaaattggggggggggagggtaataaattaataaatacctagtgaatccctgcaaccaaacgcatttaaatcggatttcgaaaaatgacatttcaactataaagccatttgtggcgtacatttcgttgctttgtgttttattttgtataaattaaatattgtaaagcttgtccacttcccattcattttcacaaatcctcttttttcagctgctcgccgatcggctgaccatcgaacgttcccgagttggactgattcgggagggcgccttcgccaccatcggacggactcttcgcgggctgagtttacgccacaacattctcaaggcattttttaattag

SEQ ID NO: 75007 - DNA, 1052 bp, Heterodera glycines
atgagcaaaccaattataaaagtgcgaattgttcagattattggtttgttgtttgtttttgggttcttcaatttaaacttttgttacagaagcagacgaagctgctggccaacctaagcaagtggtggctgagtatgtggacggtacgggcagacgagttaccatgaaagcaagcggagaggtccgaattggccaacttgttggtttctttgtgagttctctgcttaaaattttatcataacctggggcgggtggactcagttaaaactgaagaatgcttgtaacttactaaattcggcttatgatataatactcgacgactcggtctgtaattcccgaaccgaagaattttggcggttgggccgtgttatggacacgggactgaaatggccaaatgccttcgggccgaaccttccaaccggtaaaacgatttaatgctcaacaaaatatttagcaaatgattcctctcgctctgcaaaagactaactcgaagagtttagacaaaattctttgttaagatgagtaaacattttgttgaacaccaatgcgtttttacccgttggacgtttcaagcccgaaggttttttgaagtcagaattccgacttccgaaaaatttttgggcctcggaaattccgattttctgtttccgaaaaaatttcgaccctcgggtttcctattccgaaaatttttgggggctcggaataccatcactggtccatagtgctttccgacaaaattctttcggttcgtgcattgcagactgaggcgtccaatgttaagtcatttgtctcaagtatgtacaagtattcttcggttttccggggtttatattggtagtcacgtaataactaattttttccctgtaaatttgaaagacccagtggccaaaatgtctttttattgcgtggctttcctaccccctccccccgtcgaagcctttgcttctttgaatttagcaaacaaaaaaacaattgttgtataattacgcatttaggatggtccggacaaaagacacattcagacgtgcttcacgaacaacaacaacaactga

SEQ ID NO: 75008 - DNA, 927 bp, Heterodera glycines
atgggcagccgaccaatgctcaatcgaccggaaacaattggggacagacaaattgtaaaaaaaaaaagttaaatttaaataattatttttaataattattggggagggtaagtgcactttccgtttcaatttaatgatacggcaaacaatagcatattttaacattagtcgaggaaaattcaattaaaaattaaaagggctaaaattttgggtgacaaaaatttcgccgaaataaaaaaatcaaatctttaaatgaacaattttcagcagtgggaaatggtcagcagaatcagctgaaagggttcggcccggaattgaaagacgtcgctttggtggcgggcgacaatttgaagcgaacggcgtccaaaacgggcacattggtgaaaagggcattttcaaaccaacaaaatgggggaaaagcaggtgaaaacaaattgaagaattaatttaaaataggcaaaatgattggccaaaggcataaaaagggaaatattttgtaaatggttttggaaagtcaaaactcgaaattagacaaatttagaagggttttattataatgctttctaattaattttaatagaaataaaaacatccaaaaatgcagaattggttaaagaagcatctgaaaatgttttgaataaaagtgaagagaaatcaaaatcgaaaacggaaggatcaaagaatagcgaaaaatgggagacaaatagtgaaaacggaagaacaaatggacaaatggcaattaatgatacaaaaaaagataatgaaaatgatgaaacggaaaatgatcaaaatggtaagcaaacggaacaaagtgatcagaaaaaagaaaaatatgaacacaaagcagcagaagatgatggttcaatgattgagaaaaatgagaaatcaaagacaattggagaaggatcatcaatattttcaaattaa

SEQ ID NO: 75009 - DNA, 814 bp, Heterodera glycines
  unsure (1)..(814): unsure at all n locations
cagcgactcnggagcanggaggaccttcctacaaaaaacggtttattggggttgagaaaaaacagggcataatcgaccgaaaggtcggtaatcgaacctttatgagacttttccacatttgcatttcgactttgaccggataggggtgggggcaggagacctgtctttgtatttccaagaaaatgaacaaaatccaggctccccctgcgaaaaaaaaaattttaaattgttttatcgaaaagagagggggggggggccattttttgtcaaattgctttgaaacgattgaacataatttgcattatttatcgttttgtaaatttaagcccaacgaaaagaagacgccatcggtgccgggaaatatcgcttctgcttcattgggtttgtcaatttttaaagtttaaaaacatttgcatgaaaaatgcgctttctcggcgttccataaaaaaaatttttcgtgtgcacctacaaaatttattatcatttataattttagtcttataatatgtaggctggcgcttgcatcactcaaaatataaaaattttgtccaatttttgaaaaaaaaaaaaaattcagaagagccctccgaggggaagatttacatggtggagaagggtagcacagtggacactgtgctcggtgtaaggcgcgatcgtccagccgttgttgcattggtccgctacatggacgagcagtacgaattggtgccaacgtgagaaacgggggggggggggaaccgaataatatatatttttttaaattcattttctaccattttttaggcctctgttggtgaagcataacccggcaaag

SEQ ID NO: 75010 - DNA, 136 bp, Heterodera glycines
atgctggcgccgaacgccagcgccgaaacgccggcgccgaaacgccagcgccgaaacgcggtggaccccccggtcccgggttttttcgcggtcccggtcgaaaaacttggtcccggtcccgacttttctggtcccg

SEQ ID NO: 75011 - DNA, 58 bp, Heterodera glycines
aaagtcgggaccgggaccaagtttttcgaccgggaccgcgaaaaaacccgggaccggg

SEQ ID NO: 75012 - DNA, 753 bp, Heterodera glycines
atgccatcaattgcaatgatttatcaatttcgttggcaaatgccaattaatttggccaatttttgtctaattctggtaaaaccggcaccaattgcttgttcaaagtccaaattcctcaatctgccaatttcagtgccaaaatgttcacggattcgttgtgccaacacccagtgaatttttggcaccaaaaatatttctgttgaccctccaatttcttggccaaacaaaaacatttgctcaaatttggcccagttcgtcacgcttttcatacaatttacgattgcttcaattgattgttgatgtatagctgagttatcgtcactttttgcggaagatgacagccaaaatcgaggaaaattgaattaaattatgcataaatattaaatatattaattaagcaaattgtttttatttattttttgaaatttatacttataaattaactgatttaaaaaaattttgtctcgaggtgatcagaagcatattttcaatgtaatgacattttttttattaaataatttttgaaaatttatttttaaccgttccaattgacaaattgagaagccgaagtatgggcgactgttccgccattaaattgttgatacatttttttgtgccattctcgcccatttgggcaacgatttgttcggaaaacttttgacatgtccaaccaacatttgaaagttcctttcttataatgtcgttaagcatttccaaagtttccacagacgcaccgaatacagaaaaaataaa

SEQ ID NO: 75013 - DNA, 984 bp, Heterodera glycines
atgaaactccacctattattagttttaattatatttttaatcatcgaaattgatcaaattaaaacggaaaagaaaaaattgcaacaaaaatcatttgatgaaatatttggagaaaaatgggaagaaaaagaagaagaaaggcgaaatgaactcaaaaaaagagaaataattgcaaaattttataaaataaaagaaaaaattaagcaaaaaggaagaaaatactcaacaaaagaatgggaaaaaattgaattaaaaatagcgaaaaaattggagacaaatcgcaaaaatatttataaatggatcaaggaatttggtcttcaaaaacaaatacataaaagctataaatcaaaaacggatgaagaaaaattagaaattgttaaaaaattcattggaatgaaaaatgaatataagcaaaaaagaaagttttcagaaaaagaatggaaagaaaattatgacgaaatttgtaagaaaattggagttagccattacgtaattatgaaatggaagaaacattttggaatgagtaaatttataacggagaaagaaaaaatggaaaaaataataatttattgggaaataaaaaaagaaaatccaaaaatgagtgacaaggaaattgctaaaacattgcaaattaatagaaagagcatttcaagatggaagaaactgtttggataaaagaatcattgaagattgaaaggatgattataagaaaaattggataaatttgccgaaaaaattatcagaaaaactatgacaatttctagttttttttcaaattttttgtatttgtattaaaaaaaattattttaaataccctaagttttgaaatttttcttagtgtaaataagtgaaaacagtcaattcaaggattgggagggtatcattaaaaactgaaaaatgttggaactgggctcccagtatgcctaaattttcgattttagaggccctgtaaaactccttgggcttttgctagggtgaaaaaca

SEQ ID NO: 75014 - DNA, 1461 bp, Heterodera glycines
cgcttgaacagagagaagaagaggacgagagggaacggaggcgggagaacgcgtacaaagcggtgctcgtgctaagcctctgtttcagccgtaataacaaacgaattgaagaccattaattcccctctcccccctttggtcagtgtgcgcgtggacatgcattttgacagtttgtccgctgctttaccaattgctcagcttcaccaccagccaatttgacggttggttccgccgttttaaaaagggtcaaatttattgggttcacaggcattctccaattctgtgaagacactgctcagactgttgccacggaatcggcagagcttatcgaagtattttcacgggagcagcaacgcgaagagcagttacgactcggaggagtcaataggacgaaaagcgtaagaagccaagggggcgggggaggggaaggcgtttaaggaacgcgaaattgcagaggaactttcgccatgttcttccgctacatttccaacatcagcaacagttgcaagatggttgccggtaatccaacaaagcaataattgatttttaacttgtaaatttcggtgccttttcagttgttcacccgaccaaggcgcacagggaacgccggggaggaagggaatgaaggggacaccgggagcaaaggcgagtgttttagtcagctgtcgtggaattaatttacttttctaaagggcgctcccggcattcctgcacggttgccgtgcgagccattgcaagacttgaaaaagtactgcccagagaaatgtccactgggactacagggaccgccgggacttcgcgtgagttaaaaacgcactttaatgtctataaaatctcacaactcagggacatatgggtgagaagggccgacgcggaccaatcggaccctctggaaagaatggcgacgatgggaagacgggcccccgggggatgcccggaccgccgggagtgccgggactgtaagaaagtgaggaaaacggagtgacgaatttattaaacagagacggcgaagacggggaatcgggcacggatgcgcagccgatgcaggtgagttggacctttgtcccccttgaaactgactcttcgcttaagtttgtgcccggcccaccgggagcgggaggagaaagcggtatttgaacataaattggaagatcaatccctatgctaattgtattccttccaaggagaccctggcccacccggaccaaggggactgcccggcatcgacggaccgcaagggccccagggcagaaaaggagcacagggaaatgcagggaaaatgggcgcaccagggacatcaggtaaaggggaacgtagcgcaaaagggacgtccattccaaaaaaggacccccgggaccgattggagaacccggcgaagacggtcataagggtgtgtgtccgacgtattgcgccatggacggcggtgtgtttttcgtggaaccgcccgaatggttcttcaaa

SEQ ID NO: 75015 - DNA, 1254 bp, Heterodera glycines
atgctcaaggctgaggtgaagaagaagcgagaggaggtggagcgagcaaaggaggagcgactgaagaaattggaaagtgaggccgaagggctacgagccatggtggcagaggcgtgcttcccgcataagccggcggagaagagcggggaggaagagaagagcggggaggaagagaaggaagcgagggcaccggcaagccccccgaggacgattcgtcacgtggtcatcgacgaggactgcttgtcgatcgacagcgaggatggcccggaggaggaacggcagcgggccgcgggggggagtgtcgccaatttttccattggcaacgagagagcggaggagggaagcgggaggcgacccactcccgggcgcggtgtgggcgacctcgggttcctggtgttcaatcgggacgacggcacgccggtggagttggacgaagaagaagagaacgaatggggaggtggcgtccttgatcaccccgcagcgccgccgcggcgcgcaccggaggacgcaaaacgaaagaaatggcgccgatgagccggacggatcccacacttcaccgggagagccactcccgacagccaatttcgatccttccgccatttccttcgcaatttccccacatttattttgccatttcttaattttattcacatttattattctctctctctctctcttctcttcgcctatcgtatccaatcgtctcacttctccgatttgcaaattgtttatgcatttcttcaccattttcccaacctgccaatctcccattttgcgctggcctttggccgtcatttatccgaaaacatttcttttgtccccaattttgcacatttttcattccattcattcattcatcccccctcttctgcattaccatttgtttatctgatcggcctttggccgattcattttgccgtctttgtatttgtaattcgccaacatttgttcgggggcgtctcccccggtctcctccccctccctttgtcattgcgtaatttggccattttcattttcaaattcattcgccaattcgtaagggggctcctccccctactctcatccgtcctcattttttcatttatgcttaatcctatcgcatttttaacattcgttttccactaatcaccacgggggagttgtctccccaaatttcaatttcccccaccacaaatcgcggcattttttacccccctgccgtttgtcactgtcaccccccatgttcggtttaattacccaagtttgagctgctta

SEQ ID NO: 75016 - DNA, 852 bp, Heterodera glycines
atgaaaccactgggagagagctacaaaaagcgacaactagcttgcggaaattattgtgaactggaccatgttaaaaatacaagaaaaagatcatgaagtaaaattagaaaataataataaaatttctcactgaattttttttttgtatttcacatttaattaaaaatcttataaaataaataatagtgaacccaaaaatattatctaattgaaaaaattaattttaaaaaaactaaaaagctcaaagagaaaaatattttgttttcgagcgaagttgagtgatttacttaagaaacatgatgagaaaaaagaataaaaaatgtaaagaatcttggaaaattaattttgaatccatgtaattcaaacacaacttataacataattgcactttgcaaattaattagccgaaaaattaatagttaactaaattacaatttttttaaataagttaattgtaaaaaactgagtactttaaaaagcttttctttaacaagttatgaaaatataatccgttttcacaaaacctaatccaacaatttttcaattttaagataggttaactacaaataagcaaattatactcaaatgaaatttttataggttatatggcaaatatttgatttaaacaaagcagtcctttatatcaccagcaagagtgaattcaagctggcctttagagttcgacctggacctggatccaggcctggatttttcctggattcaggtccaggtcattttttgacaacctggatttttcctggacctgattttcctggatttttgtccaggaaatccaggtccaggtccaggcaaaacaggaaaaaacctggattttcctggacaaaattttag

SEQ ID NO: 75017 - DNA, 2609 bp, Heterodera glycines
atgagcattgtcaatctgcttttctttgcagtcttattcaaattgccaccgtttcttcacagcttagacaaagcatacgtcaccgaaccgtaaaatttaaaaaatttaatttatttaaaatattttaaggtttagctttctcttaacgggtggaaaaattggaaaagtttccgtgccgtactttgcgcttgaccaatgtaagccgtacaaaagcatcactcatgatccgaaggctgagtctcagaactttggtctgtattttttgatgaagcaccgaggtggacactgtgatgaggggtaaatttttgaaaaatattatttaggcctaattaaattttaattaccatttagcatattgatctgttacccgggcacactgatgcgcaatcatatgacaagcgagttcaaaaagatgtccgatttcagattgaaacggacattccaagtcggcaacaaagaagtaatggaaaatttaattaaaaaatttatttaaaatttttcaattttcgaacgatttgctttcattggagtgcgcccaaaaagccgaacaatttgttggcatttcaaacccaaaacaatggcgtggcatcaaagtgtacacgaaactgacaaactcatcaaatccgctttcggcacgagaactaattctggagacttcattgacaaatagaaggtaattaattttggtgtaattagtgttaattaacaaaaatttaagttacacctttgagccaatgactcgtcagctttcacttaattttggaaccagagtttcaatgttcacttgggtcacaactcattttggtaattaaattttaaaaaatattatttaaatatttaaatttaggacaaccgtttcatgacgaagaatttgacttggctgaacagtacgcccaacaaatgggctatggaccattcttggaacagcatgtcggactttggctgctcggcatggacatgttgccatggatggccgaagagtatgtgagcctgtacgtctaccgtggatgctcctgtaccatggacgcttgggtactgtactattatttgaaattttactgtaatttattgggatataatttaatgaagttcactcggccaaccgatgaaaatgacccaattgagccgattgtgccatcggccggctcatcacaatgcccgacgaagcaaatggacgaaacttttgaacttggccaattggacgcgcaacatttgcaggctgatcttgtgttcactgtgctgacggatgaagaatggcaaaacttcacagtggaattattacaacaagaggaagaaggtaagaggatgattaaaattggcaatattaaattttttgattaaatcaatcatatttgtatttattgaccgttgaataggagggaaataaataaacaataacgaggattgatgatccctatgggcctaattattgggatgtaaattttatgtattaaaaatattttttcaaaaaatgctgattttctaacctggtttaaacatgacgtacagatttgagatttttgcacaaaaataccttggcacgaagcctacccttctgcaacattaaaaaaatttattgtagaaatttttataaaaatcagcttgttacaatgaacattggacggacatttaaataaaaatttttgcaggtaaaaagctctctgtggtaatgaatttcacaattcgaacaatcgacgacatgaaagtgcctttttccggggtaataaattaaaaatcaaatcaaacaagtattatgtaattaatttttattaattaattaatgtagattaatacatcggtggtcaatggaactcaaatgcctaacggaattcaacaattgcgttttgacattttcctgctagagcattggcatgtcatcatggtgaacggcgagcagcttggcgaagtgttttggccaaaggaatggtggcaaggggcggcatggaaaaacatcacggcaattagggtgagtgaaaaagaaacgccataaatttattgatttgagccgattccgaaaatttgattttgaattgaacttaattgtcaaattttctgcatagattagcgaaaaagccaaaaatttacaattgggaataagaaaattaacttaaaaatgaatatttttatttaaaatattattttgataattaaaaagttttattttgtagcttaacggccaagtattattgctttatgggcctgaattggatgaatacggtattgaaaatgaaaatgtaagaaacgattaaaaagtaattaaaattaattaacattattattttagttcaacgtatctgtgccacttccattttcacagagaattgatggttttcgcgtgaattcaacattttttttccgtgttcaactgcttaatgaaacgcataatacagtgaacataacatttacaaatgggaacagcagtaagaaaagcataaataaatttaaatgattttttaaaattaaatttataataaaaataaaagtaacaaatacaaattgtcgatttaaaaaataataatttagctgatgcaactgatcagacggaaatgaacatcaaaattgaaaattttgagacaattgaaatcactgcttattatgtaatattttaa

SEQ ID NO: 75018 - DNA, 1061 bp, Heterodera glycines
  unsure (1)..(1061): unsure at all n locations
atggagttcaacgttgatgctggtgggcttggcaaagagtttttctgtgaacacatatacgtggagaacgcatccatagtacgataaaattttccgcactctaaaaaataatgaaaagcaaagggtccaattttagataaataaagaactgataaacgaaaataagattttcttgctcaaaaaaaggacattttgtaagaaactgttcaaattaaattaaaaatggtgatttggggttgggctgagccgattggttaatgctattaatgttcttctaggccataacttttttgaaacaataaaaaaaaaaatttttttttttgaaatttagccgttaaatattttgtaaaatgatgtagaaattaaaacaatattaaataagctaaaataatgggggaaaaaaatttatgaaaaaaagaggattacgattcgatatcccccaaataaggacaaaatctttaaaaaaaggtcaatataattaaaagcaaagggcagaatcaaagataaaataaggaattcatgggacgaaacataaggacattttgtaagaaacggttcataattaaatttatatgaaaaaagagggttacgattcgatatcctgaaaaaaagaggattacgattcgatatcccccaaataaggacaaaatctntaaaaaaaaaggtcaatataattaaaagcaaagggcagaatcgaagataaaataaggaattcatgggacgaaacataaggacattttgtaagaaacggttcataattaaatttatatgaaaaaagagggttacgattcgacacctccaaataaggacaacaacacaacccgtctttggattaacaaaaataatttacatttgaggtgacccgtcaaggacctgtccaagaaaactcattgaacatattatcaagaagagcgttatcactgaaaattctgatggcccaggacggtttctatggtcgatcatatggtgattacataaaactgtgcccatatttttggacatattggcaatactgggggatgtggccatggactattgaccatgttcaagtggtaaattaa

SEQ ID NO: 75019 - DNA, 156 bp, Heterodera glycines
atggcacttgtggatttcactaagaaattttgtgattttttttttcttgatgtttggcatagacgttgtttatggtacttatgtggtttaccgcccataaactttttgtttgtcaagtcaaacaaaaaaactttcaggggttttgatgggcgctga

SEQ ID NO: 75020 - DNA, 130 bp, Heterodera glycines
aaattgtgcaaaacttactagttttttgaaaaaaaaaaattaaaaaaatttccgacttttcatcaaaaatttcggaagtcggaattccgaccccaaaaatgtcggaaatcggaagtcttttcgtgccata

SEQ ID NO: 75021 - DNA, 2023 bp, Heterodera glycines
atgggttcgtcatttatggaatcagttggaaatcggcgaagttctcggctgaagatgaagaaaaagaaccggaaaataagctggtaatacaatactaattttcgatttttttgaattttgttatactcttggttctgggtccgaattaattaaaatggatgcctgaattggtttctccgaccccgaaaacccctaacaaatttatcccaaaaatttttttgcttgatatctccgcacagataacccacaagtaccttttttttctggaaattcagttaaattttgttttcagtagagatcgacctggatccaggcctggatttttcctggatccaggtccaggtcatttttcggcaacctggatttttcctggacattttcctggatttttgtccaggaaatccaggtccaggcttttttcaaaataccgatctctagttttcagtaacacctaggtttaaaaaaagctttaaaaacaatttttgataagttttttgcgacgacgttttggggtggcaaaaatataaatttttaaacaaattttagtgaaattctgagcagtttctttccccacttcagttggatttgcaacgacgttttgatggacattctgccgttttttggtcttcgtcaactcggcctcaaattggcactgatttccgatcgtttcgatgttttggtggacgcgcatttcgatggcaaatcagaattgacgatttggaaagctatcaggattcacaaagacgctttcacagaagtgccgaaattaagtgtgctaatcgataatgccaatcgtgtggaatttccatggcctgaccgtccgttgcacaacaaaattcgcttcaatttccttctgattgagtaattattccaaaaaaatttctgtgtaaattaatgcattttatgttgctccctttttcagttacattgatcattccgtcgtcgaatttctccgctccaatcaaccaatttgggacagaggcaccaatttgtatttgcatttttgttcatccaacaccgaaagcaatttccgcccgatttgggatgtttttgtccgtcaaatttggcccatttttacgacaataaatgtccatcatttgggccttcactttgctgatcatttggacactttgcttcgtctcacatcgccgacaattctctccgatatgaacattaattcaatccaatctgttcgtctgttcccagaagcaattgatgacgatgatgggccaacaaatacaaattctcacggacaaatgttgtcaaaatggttgcacactccgagaacagatggccgtccgaagaaattgcgttgcgataaacattttgaatcaccaaatctcgaatggatcaacagtttcaaagaggtgtgaccaaaatttccgtttttaacgactgactaattgattgcctttaattttcgtttcccattgtttagaaatttctccgtgccaccgcttcaatcagttacgaactgtattttgaattgaaaagttcaacaccaattgagccatttgaattggagaatgaacggaccaaagaaaatctgtcattggagaaaataccaccttatcctggcagttggctgttgaagcgatgtccaattaatggagaaacggcaccgattaaatgggaaaacgaaattcggctgacaaattttaacggtgtccgttttgtgcttaacattaacaaacagtgcattgggtgagtgtaacagataattgacaattcaattcaaatttcacttaattttaggccattggcgccaccagcggaagaagaaaaagcggatcaaagcatagaaaatgtcgtctaattgcgcggaagtggattaattatatttgagaaatggtcgatctcaccaattggaaacggatttgatgctcattttatgtcaaaatgctttgttgattttatttcgttcgaattcataaaaatcagggcttccaagtgtcctttttttctaatatttgtccttttttggcaagacctccttgttttgtgcttattcttggatttgaaa

SEQ ID NO: 75022 - DNA, 428 bp, Heterodera glycines
atgccatccctgatagggaccgccggaccctctgttcctagttttttgaaaaattgcaccgcaaaaaagtgggtttgaaaagaaaaaaatagtcaatttatgaaccgttaataatttgatttccgatcaactttttaccgtcggatccaatcgaaaatcttagtcgacccatcagccccttttaatacatcccgccagcccctaaaaatttatttttcagcattttttgatttttggaaattttttgaatttaattgaaattttttcgaattttccaaaatcccgcaatcccgcaaattttaaatgcgggatttgcgggattaatcccgcgggatcccgtcccgcaaaaaattttgagttccagtcccgcagcgggatccgcaaatttgaaatttccggtctctagtaacaacactaattcaaataaa

SEQ ID NO: 75023 - DNA, 128 bp, Heterodera glycines
tatggcacggaaagacttccgatttccaatatttttggggtcggaattccgacttccgaaatttttgatgaaatgtcggaaatttttttaattttttttcaaaaaactagtaagttttgtacaatttc

SEQ ID NO: 75024 - DNA, 414 bp, Heterodera glycines
atgaaaaatttgatacaaaaaataaaaacttgtagggaaagaaaaggggtctggcgcccatttggctggcgcccatttggttggcgcccatttggttggcgcccatttggctggcgcccatttggttggcgcccatttggttggcgcccatttggctggcgcccatttggttggcgcccatttggctggcgcccatttgattggcgcccattcggcttcgacccggtccgaaaggaccattgttttttctattgatatttttaggccattattttttgccatttatttattgcctcaagcgcggaagataaattctctctatttttatcattttaatgctcaatataaattttaatttcatcggcaaacatcttaataccaacattcttaggcaaattattcggaagatcatta

SEQ ID NO: 75025 - DNA, 2302 bp, Heterodera glycines
attatatatttacgactgaattaaaaaaacttttttataaatatgtacccatgaaattgcttaaaacaactattaagcaaaaacatgatgaaaaatgaaaaccttagtccgggaaaaagccgaacacatagcatgctaaaaggaaaagctgagtgtcgtgagcttaaaattaaatacaaaatattatgcagggaatataaaaaacatactcataaattatattgtgaaaatgaggctaaatgtatttcaaatggaagaaattctctctataaatttgttagaaacaggcttaaaaataacaccggaataccaatacttattgatgaacaagggcaaattatttttcagaatgaacaaaaatgtattatattggctgatgtctttcaaaaatcatttttgtacaaggaaaataacatgactttcgcagccatgtaaatcctaatcatatcacagacatgaattttattgagaaaactccctcgaagaaattctacatcgcctgatggcatcccttacatattattaaaagaatgcgcatttcctttggcacccatactaactgaactctttcgaataattttagattcatttaaaatccctgaaatatggaaaacatccacaattatccctgtcttcaaaaaaggagagacagataatcccataaattatcgccacatttcactgacttgtactttatgcagggcaatggaaaaagtaataaggctggaaatacttaaatttttgaataaaaatcaattttttagtccttttcagtttggattccttagacaaagatccaccacaacacaactcttatcaactttaatgatttttataaatcgattgaaaataaaagttgtgttgatgtaatatatattgaaatttcaaaagcttttgttagtgttccaattgaattacttctacaaaagcttaaaaatgtcggtattaatggcaagattcataaatttattaaaaatttcttaaatgaccgttcattcagagttaaaatctctgagcagtattctaactcaaaaaacatttatagtgggatgccacaaggtagtgtcttaggcaccaggactggagcgcgaccgcgatgcgcgatccgcggcgttttttttttgcgcggtccgcggccgcggcaatttgaatgcgcgatgcgcggccgcggtttttttttttgcgcgatgcgcggccgcggtttttttttttgcgcgatgcgcggtccgcggcaatttgaatgcgcggtgcgcggccgcggtttttttctgtgcgcgctccagccctgttaggcactttgctttttcttatttttattaatgatcttccgaataatttgcctaagaatgttggtattaagatgtttgccgatgaaattaaaatttatattgagcattaaaatgataaaaatagagagaatttatcttccgcgcttgaggcaataaataaatggcaaaaaataatggcctaaaaatatcaatagaaaaaacaatggtcctttcggaccgggtcgaagccgaatgggcgccaatcaaatgggcgccagccaaatgggcgccaaccaaatgggcgccagccaaatgggcgccaaccaaatgggcgccaaccaaatgggcgccagccaaatgggcgccaaccaaatgggcgccaaccaaatgggcgccagccaaatgggcgccagaccccttttctttccctacaagtttttattttttgtatcaaatttttcatttcgtatggtcaaacattttttataattgttttttcgtcaaatttagtttatttttaaactatttattttttatgttttgtttttacgccactgttagagtgcatatgtagcaccttgtggtttgttcgataaataataatagacattaaaaaaagtcacgtaggcctaaatgaatgcttaatgcattaatgcattaatgatttaattattttattggcaacatttaagattttgttaattactagagaccggtaaaatgcggaccgggagtcgggaacgggagtgcgaaatgatccggaaaaaggacaggaattccggtaaatacctcgtcgaatccagccggactaactcaaaaatgtaattaaacaaaaacaaaaatatatatttaatgctaaattttgaaaggcaatcttttcatttaagaaaaaataatcaaaaaaataaatcagtaagcataaatttgaaactttaatgatatttctttcccaaattggacggttttcgaattttaatccgccaccaaaaaatgatgggaaaaacgaaaatgtattaacccatcgaaaaggaatt

SEQ ID NO: 75026 - DNA, 1670 bp, Heterodera glycines
atgctgcccaccatcaccagtctcgtcatcatgctcgtcgagattttgtcattcagaaatgttgaagcaaatgatacagtcacaatacaagcttactgtatagtagaagagccttatccacctgaaccggtctttaaacatgtcaaggaatatattgagaattgtgaaaaactcggatatgttcagcagccaggtgataagtgcatttattattgttacatataaattaattttgaaaaattcacatttctttttaatcaaactatctcgacatttttgcgcctgcaatcagaaaacacaaaaataaaccaaccctaaaaataatttgggcctttttagaagtgaaagccataaaagatggcatttattatgcatttactttggaacgacctcaagatttttcggcggttgacattccaaaagagaataaatgcatggattatgaagatgagaaagacaataagttggaaaacctgttgaataattatcagaatgcgaaaaaagagatggaaagtgaaagggaatatcaacagaagctggatgattcggaatcagttcaatcgcaattgacgttggcgttggaggctatgttgagtgcgtataatgaagggaagaaactgtcagggtccaaggaggagggaagaaagctgttaaggagtaccaacgtaatcacaaaagcttatatgatccgctttttgaaaagcaaaagccttttaaagagaagaaaaggtggtgtgaaattgaaaagtttaagttggatgcatacattaaaacgatggaggaggagaaggatttggtggaatacaggaaatattatgatgctaatggaatggatgaacagtttgagaaactattgaagacttataaggagaccagggaaaagaaagagaagtgcctaaaggattacattcagataatacaagaaccagaacaggcggatatgatgtattttgcaaagcaggctttgacgaatgaagaagaatcgtgtgaaattgaaaagtttaagttggatgcatacattaaaacgatggaggaggagaaggatttggtggaatacaggaaatattatgatgctaatggaatggatgaacagtttgagaaactattgaagacttataaggagatcagggaaaagaaagagaagtgcctaaaggattacattcagatgagctcaataccagaactggcggatatgatgtattttgcaaaaaaggctttgacgaataaagaagaatcgtgtgaaattgaaaagtttaagttggatgcatacattaaaacgatggaggaggagaaggatttggtggaatacatgaaatattatgatgctaatggaatggatgaacagtttgagaaactattgaagacttataaggagaccagggaaaagaaagagaagtgcctaaaggattacattcagataatacaagaaccagaacaggcggatatgatgtattttgcaaagcaggctttgacgaatgaagaagaatcgtgtgaaattgaaaagtttaagttggatgcatacattaaaacgatggaggaggagaaggagaagcataagtcagatagtcccaaaagaggaaaattttttttaaatttttttaaactgccaaaaatagcaaaggaagggaaggaaaagaggagaaaatttgagaaatggaggcggaagatag

SEQ ID NO: 75027 - DNA, 264 bp, Heterodera glycines
atgaatatttatgaatatagcaatatatacggatttgttgaatctgctttttacgatttagcatatacatgtagaaggctgacttcgtttaattgtacggttattttaattaatcgcatttttttttattttccataaaaaatttcagtggcattttcgctcgccctgcgctgtccgttgtcgcaacttttcgtcaatcgatgcgagttccttttccgactgcgcaaggccaactacgtgccgaagacgacggctgatcagtga

SEQ ID NO: 75028 - DNA, 1288 bp, Heterodera glycines
atggcgccgttttccctttcgcttttcccttcggtttgccttttcttttcgctgctctttcccatagaatttgccgcttcctccgctgatcaacagaagagtaatttggacaagtttttcacaaaatttgcggacgaattgccaccaaatgagcgatcggcggacactttggcactgtttgccgaaatggacgaggcagacgcactgctcactgaccaaatgtcaaaagttattccgccaccgcccagcccggcacatccgacatttcaggtaagattattttgctaattttaaatgcaaattgtagcaaaagtttatcgtcaattgtccagtaaatccctttttaggtaaatattaatcataaatctaaacaaactcaaaattgctcaaaatatataaaaatacgaattaaggattcgctttcgtaatatttcccccctttagactctgtatttggacaaaaacaaaggtccaaattcagcagaaaaaaacagtgcttttcaaagtgatcccaaaagtgccgtcgttcggcgactcaaagggagcaaattgtcaaaattgcgatcgcttttcccgaggacaaaattcatgaagcaaacggaaagaattgtgaaagtgtatttgaaactgaaggacaatcccggcggggggtggggcccactcatccaaaaaatgtttggcgaaatgattttggccaagaaattgggaaagggcgacggcgcgtcattgcgcgccaattgccaattggcactcgaactgatcggagaaggggacggtgccaccgaagcaatggtcgatcagttggccaaggcgaagccgtacagcaacttttggactctgacgaaacgaacgacaaaagcgattttgtgccttttaaaaggcaatggcacggaaagtgagcgacaacggagcaccgaagacattctgagaatgctgaagacatttgcggaggacggtgaatcattgaaaatggtgcaaaaaggtggcaaaagagaggctgataaagcgggagttatacgggattcccgctaccggaagatctcaaactcccggctcccgcccccgtaaattttgacccaaatacgggagtaaaaatacactgctaagaactgagtttttttggtaaaattcatcatttttgattgaaaatctgttaaatataaagccaaaatttcaaaaacaaattttcccggcggcgcctatcggcaccgccggcttccctcctcctcctccctggtacgcaaaaagttcttttcaaaaaatacggcgcaaaaagttgtttaaatta

SEQ ID NO: 75029 - DNA, 685 bp, Heterodera glycines
atgccaactacaattttggaaagaccaaacactttgccacatgatggtggcaatacggaaccggggtcggggtcgttttcgtacgggccgttttcgtacgagcacaagtttttggctataacttttttctttgccaaccaaatccaacattgttggtgtcattcgatagccctatgtatcctctattagcctgcaaaatttcgaaaaatttcgtaaaggttcaaaaaagttatgaccagaagaattcaaaaaaccaaattttccaacttttttggctcgaactttttttgaacttgacaaaattttttggaattttgcaggctaatagagcatctgaagagctctcgtatgataccaagattttagctataacttttttctttgtcaaccgaatccaatattgttgatatcattggaaagctctaagtgtcctctattagtatgcaaaattaaaattttgaaaaatttagtttatgttcaaaaaagttatggccagatgaattcaaaaaaccaaattttacaacttttttggccataaattggttcaaaattaacaaaatttttggaattttgcaggctaatagagcatctgaagagctctcgtatgataccaagattgttggatttggatgtcaaagaaaaaagttatagtccaaaaacatgtgctggcgcccaactgaggtag

SEQ ID NO: 75030 - DNA, 1822 bp, Heterodera glycines
gggaacagcaaaagaagcggtgacacaaaattatgaacagcgcctttggaagggatgggacattggggaggtgaataaaaccaaataaaacaattagcaattaattgtggcatgataattaaaatgcataataattaattaactgacaaaaatttgttaatttcaaggaaatcttgaacgaagcattcagcaaattggcaacaaattcggaaaacgccaattcaaatgaatcggatgcgctaacacttaaattttgcagacgaatcaacgacagttattgcgcggagagcgtgtaaaaaaagcgaaaataaattaacgaaaaatttccaatttttttttcaggaacaacaaaaagtttgtgatcgtcgtgttcaatgggaacagcaaaacatacacagggccaattcgagtgccaataaacgcaccaaatgcaagggttttggacagaaacaatcagcacatcatagcacaggcaaaaacaaaattgaaattattttgaaacttaaaaatttaaaatcttgaattttggttaattaaattagtaaatccctaatattatggacaaatttatctaactatattcgcatttttcaggtcattccgacatttgttcgtccttatcaaataccaatgaggaaattttggccctcaaaatgggaattggtgttttatgccgaaatcaaagggcttggctacgaggcgttttacgtggacacgacattacgccaaaaaaggcttgtattttaaaaatatatttaaaatttaaatcaatcaattaaaaggtaattaattaatttaagttaaaaataatttcaatttttttcaaaattgcattttacaattaaagaagcaataaaagagcgaattcaaaggagaaaaacgcacaaaaaacgacgccgcttaaggatggggcgcaatccaaccaaatttcgaatcaggtcaaaagcgagttttgaaatgaacatgatgccaaaattaattttcagtacattagcctcacttttggcggcaacggactgttggcatcgtttgaggatttaattggccaagtcaaaatggatttctcgcaaaaatttgcattttacacgggggcaaatgggcggaggagcgcagaaggagaggaaaagcagcagcagacatccggggcatatgtgttcaggtggaaactaagttcaaatattagccggtgctggggaatatttggcgaaatgcgcaaatttaaaattgtaaaaaaaaatttaggccaaacgaaaaaatggcaaatgaattgaaaacggctgaggtgcaatttgttaaggtatttaacacaaattaatgaaaatttgaatggtggattattattaaatttcaaattaaattacatagaaaattcaataaaattgaatgtcatatcaaaaacacttaaaaccatttttaaattgattttataaagttttgaaaaagaaaaaaacgaaaaaaatgtctaagcaaaatgttaaaactatttttgaaccatttacaaatttgaagaaatttgcccaaaaggatattttttaatgtattttttggtcaattgtatttaatgtcgtcctcttaatgtgctgatccccctttttctcgcatcggctgaatccaatcaactgaacttaattagcaacacaaaaaagggcataataaaagaatccaattaatttttctgtacatttaatcacagaatgacctcgttcacgaggcacgtcaaattgtgcagccgtggctctcccaaattgtccgactttacatggacaaacccttcgtggagttcgaatatttaattggtccattgcacaaggaccaagagtaa

SEQ ID NO: 75031 - DNA, 1492 bp, Heterodera glycines
  unsure (1)..(1492): unsure at all n locations
agaaaagttttaaaaaaaggcaaataaggaagtacggcatttacaaatggctaaaataaaattttaaattaaaaatgatttgcatttattcaggtcaactcgaatttgttggaggtttggaaaattaaaaagaaataattgtttaatttaattttgcgattgttaggcggttggacacagcccgacgaggcggcaacgcattactacgaattggtggatcaatacgcactcggactgggcaaactgtcggagaaatacggtaaagaacatttggattgtatttataatttattaaaaataatttaaatttgaaaaaaaagattcatttccaatttgaaaaggcgtttgcgggcgcccgaaagtggcatggcaaattgacccattcggacacagccgagaacacgctaatttggtctcaatggtacgtcaataatttatttttaagaaaataaattttaataattttagatgggttacgaggctctgctttttgcccgaatgcattacttggaaagaaaatttcgaattgaaaacaaaagtttggaaatgatgtggagcacagatgatacaggtcatgaaaaacagaagagctaatagggaaaaaatggcacattaattaaatggtaaaatctgtggaagcaaaaacttaaaaattctcaagtttaatttcagtaaattaattaccttagtagccaaatttaaaaaaggtttttttgtgtttgtttatttcaaaatattaaaatgaccttttttaaaatttcgttaaatttgctttttatgaatcgatttcgcaattattccctctaaatacatatatgcttattttattttatttatttatttattgtaattttaggcaataattcgctttttaccggtgcttttgcgagtggaacatattcggcgccgaaaggcttctgttttgatgtgttatgtgatgacgatccaatgattgacgacccaaaattggagggatttaatgttgagcagaaagtgaacgcatttttagaagcggcggtggaagaggcaaaaataaaaacaaaaattaaattgaaatgaaattaaaattattaattaaatcctaattgattttgaaaggcgaagacaaaacggcacaaccacgtgatgttcacgatgggcggcgacttcagctatgggagtgccaacagatggttcaccaatttggacattttgattaatgcggcaaacgaaagggtgaaaaggcatttaaaaaatggataataattattaaatttttcaaaattttattaaaaggaagaaaattaaattttgaatgtgcgaaagaatttcttttgattaaagcaaaaatcgtccattaaattttttaggggtgacaaattaattaggcatttaaattcatttttaaagttngaatttttctattggttagaccaattccacgggcatccgcctgttttactcgacgccctcgtgctatgcgaaaagcgtgcgcgagtcgatcaaaatactg

SEQ ID NO: 75032 - DNA, 1762 bp, Heterodera glycines
atgcaactcgtgcacatagacggcgatgctgatttggtgggtggaaattattatgaattaagcaattaacgaatgaaaagcaaattaaaaacagaaaatggcaaacaatgataatcagtgaaatgacaaaaaaatattaagacaattcacaacatttccattctgccagccgaccaatgcaccactgaagaacaaagggtacaaaaagagcataatttgacaaatcaaatttaaattttgcattgcttaagacagcaaagtgttgttgcggaacgggtaaaacaaaggcacaaaaattcaattaaattgaaatggcacttttagggtttttctacgatttcaatcaacagaagtgtctcgtttcggttgttattaaaacgaatatttaattataaaaattaatttttgctaggcgaatgttgcttttatgttcggcagaatcaacgacgcttggccccacgtcgccgtttatgggtcgccttctaaatgttttgcaacaaaatttgatgccaatttcagcttcgtttatccgatgctcgtcctgctaatgatcgctccattaagcgccgtgtaataattatttttgttaattaatcattatttttcacataagtaattactttttcagaatgttgggaatgagcagacgcgaaaagcgcgagggcgaccgacgctttgtaatttgtgctaattagggcattaattgcatgctcgttttgtttgttctgccagccgaacccgttataccagctgatctcgcttttgtgcttctgcgcttgggtctctttgttgtcgccgctcccttttaccgtttgggttaagcattcaattttaaattaaatcctaaaaataatttattccaattagtattatgtgcttggcgatggccttcgtcaaatgaaccaatcggtggccatgtgccatttgtaccgcacctcaatggaagtgcttaattaacgttaattgatgttatgaaaagcacaccctgattgttcaggttatccctcatacaatggacactctcgtcacacttttctcggttttaatttattattttaattttaaaatatttatttagcaattcataattaatttatcgctacaaattaaaaataaaaatataatttttaaatttgaaaagtttatttcttaggttttgctcgctgttgcaaggttttccttaaattcaagaaaccaattttcactaaaaattctaagatttctcacgcaataccaccgaagcacattaaaacttcggacggtaacactctttcattttttcgttttcactttttttcaagattgagcgtttctcccgtgccattttgttcatcatcgtaattagcgttctcctcggcattttgcgcttctttgagcacgacgccgcactatacaggtggttttctttcaaaaatttaactcaaaatagtttttatttttgaaaaattaaagtttctgcatggacacggagccgggccctttctgggcccaacgctgtatgctaacggacgggtgggtgcgctgggtcagaaaatgtgttaaaagcatcccctgctggcctcagcccactgatcagctttctccggctcggccgtcccttttggaaagtgttccttcccctggccgatctgttcgcgcagttccttttgcctggctcctgtctgatccttctccacatcggcttcaaccgagagcccgtgctcgaaatcggcaacgaaaatagtcacaaccgatttggacgatcattgcgtgaccaaaccaa

SEQ ID NO: 75033 - DNA, 1071 bp, Heterodera glycines
aatgaacttcttgttatccgagaacggcagaccaaagactctcaacatgaaaattggttgttaagagggcgattgccccgcggcgcttattccgggtacaaagcccagccaatctcggcacttttccgttactcatgtaaattcactgaaaacaataccaaataaaatttccctttatgctgtacctgcaagcaaggcccacccggcctctcgggaaaaaggggccaaccgggcaaaaatgggagagcgggcgagtcgggaatgccaggacgagatggaaaggcaggagcatacataaatgcgcagcaattggcggaggaatcttgccaaatttgtccaccgcatgtgcgcgggccccccgggactccggggattaaaggagcacgcggcacatcggggtaaaagggaggggagggggataagcatagaaaacgggcaaaaagggataaaattgggaggaaatggctataaaaaaataaatcaattcaatccatgttaattgtttccattattcgactttttagttcgcctggtctgcctggtattcctggaagctctggcgaaaagggtcttagaggtccggtcgggccaaatggaaagcctggcaaatttggccaccaaggaccgatcggagacccaggcaaaaataatggatgatattagcaaaatcaaaatcgtgagtaatattaaggacggaccatctttagtgcatcgccaggaaggattgggccgatcggtaaattatctttaattgtgcaataaaacctttttcttttttaaaggactgacaggtccaaggggcggcccgggcaatgccggatttgatggacagcccggggaacgcgggccaaatgggcccaggggataccaaggaggtcgactaattccagatgactttgcaaaatggaatgaagttcagaacgtgggccaccaggctcgcccggccttcatggcccgcggggccctaacggtgcacttggtcaacccggcgaaacaaaattcttcaccaacaaagtgccatcacaaaacccaaaagaaacgttggaagaaggctccaatggcacggatgcg

SEQ ID NO: 75034 - DNA, 606 bp, Heterodera glycines
atgatcaattcgaacaaaagcaaagaaaaaccaacggaagaagaaaaagcatggaccaatgcttgccaaatcattcaaaatttggacagtaaaaaaatcatagaaggacaaaatgaaattgcggaaattgtgaaaaatattggcgaaatgtgccaaagggaacggatcgccacggacagtgatgaaacgaaacgccaaattcaaaagtttacaacgaatggcccatttattctttcccacatgaaggcaacagagaaggaacttcaaaagttgaacgaaaaaaatgccaatgagaaatttcgtcataaatttgctcatttggcatcaaaattatgttcaaaagtattgccagaaggacattataaaaatgccgtaatcgaatttctgcaaataaaaaaggaccaaatgctctggccaagtgatttggcacagtttctccttgccaaattggatgattgccttgccactgacacatttcgccttcgtcggatgcgccgtgccttagaattggaaagctcacgagaagcggaacgctcagaacgctcaatttggtttcatatctattgtgtttttattatggttgccattgcaattgttttcatttat

SEQ ID NO: 75035 - DNA, 322 bp, Heterodera glycines
atgaccccgagaaacgatacgagaaccgagacccacaaaacccgagaaatttctcgactcgggaatcgagaaccgaaaaatttaaatgaaattgattcaaatgcatttcttaatcaaaaacacattaaaagggggtaggtcaaccagaatttttgcgtatgagtctcaacattaaagtaacagcatttttttgcttttaaaatcgtgacctaggcattataattgactcgaaactgcatttttcagaacatattaacaaaattgtacgaaacgcttatcttagagttttccctggtttttaagagtcttaaaaaccagggaa

SEQ ID NO: 75036 - DNA, 697 bp, Heterodera glycines
atggcccttaagaaatgggccgcaaatttgcgtgacaagatccgaggatccgatcctgatctttatgcatacgggtacaggaaaaattggatggattgttgttactttcgaagaacagtgttgtcgtgactgttgtttgcagggtttttcgaagcatatctgaactaaaaaattattgcctttttatatccaaattattctgctggtcgcagttttatttatcccatattttttaatggctttgagcatttttcaattatttttttattgttttttatcttttagaaaggaaaattgtttggtaaacaattttttggggcgtttttttggataaatttatttgtttttctcgtcaaagcttattgcattttttttattacgaaaagcatttgcttcatttttcttttgaattaatgcacatgcaaatattgttttacctttttaaatattattttataatttagattccatcattgatttaattgtttttattttattattttttatgattatttattatttcaatattatgaatattctagcaacatacgtcaattggcatgtgatttattgaattatccgttgtcattaaccatacaattaattcctcgcctctcttttgcttttgtgctgtgccatttatttctcctacttttttacgcgcgcaaaatgtgataaaacgacgtcataaaataaa

SEQ ID NO: 75037 - DNA, 1167 bp, Heterodera glycines
atgactgcgcagttcagcgccattgcggaacgcctgggtgaaattgagcgcaaaattaacaacaatggcattggcagcgcggaggagaaagaacgaaaaaggagccttgtgctcatcggtcttccggaatcggaggaggaagtgtcatcactgcgtgcgaaggatgacgcgaaaacggtggaggaagtgttggaccggctggacgtggaagtgtgcccgcaaatggtctacaggatgggcaggaggattgacgagaagaggaaaggaccgcgcttggtgaaggtggtcctgccagcttcaaccttccaacgttttgcgctgatgcagtgggggcgtcgtcggacggagctgaagaagagacctggatgggagcgtcttctggtcaggccatccctgacgaaggaggagttggaaattgagcgggaacagcgccaaaagaagtggatggaatttggaaagaagaaaacgggggaaaacatcacgacgcgacgcggaggcaatgaaaaaaacttttgaggtcacctccttttttaaattgtttatatttcaatgcacgaagtttggcgaacaaattagacaagttaaggtttttgtttttagaaaataggtttaaaatcattgctgtatctgagagttggttgagtaacaaaatagaaaacccccaaattttggaaaatctcccctattctataataagatcagatagacttaacaaaaaaggtggcggggttgctttcataatatcgaatttaattccttttgaaattatcaaaactacaaaaaacaaaaattccgatattctttgtgttgacctattttcaccctttaaccacacaaaaatacgttttattttggtctatagacccacctcccatgaaaaacaagaagatttcgaaaaattggtcgaacaactctctgttttagtctcggcttctgaaaaatgcattagagggatataaattaagactaatggtcaactcccctacacggggaaacaatttattagatttattatttacaaacaacgaaaatctattgaataatgttatagttgaacccccatttggtaatagtgaccataatgcaattcaattcagcataaatttacaggttaatagtaatgcttcaaaaaaattttataatttcaaaaaagcaaattatttgaaa

SEQ ID NO: 75038 - DNA, 226 bp, Heterodera glycines
ttttaaaatttcgaaaattttgaaaatttttcgagctaggcctaaaaaaaggttttcgggtttttgaattttaggattttttaacgatttttcccagagaaacggagaccacttccacaaacatagtttttcgagctctatcgactggtatttttttcggaaaaatttcgattttttcccggaaatagaaaaaatttctggcctgagcgggacatttgagtcccgg

SEQ ID NO: 75039 - DNA, 1563 bp, Heterodera glycines
atgactgccaaaattccagaaatatggaaaaagtcaattatttgccctgtcccaaaaattcaaaatccggtaaacccagtcgactttcgtccgatttccctgctatgttctgtttccaaaattttggaagaaaatatagcaggaaaaataaaaaattttgttgaaaaaaataatttgttaccaaattgtcaacatggttttcgtaaagcacattctgttactactcaacttcttgaagtggtggatgatttcagttttgctttagaaaatagaaaatcaattgatgtaatttattttgatttagctaaagcattcaacacggttccacataaccggctaatatctaagctccaaaacattggtataaataattccttattaaaatggattcagaattacttagaaaaccgaaagtttttcgtcaaaatcgggtctgatttctctgacgaatatccctgtctcagtggtgtgccgcaaggctcaatattgggaccactgttatttcttatttacatttacgatttaccaaaattctgcgaaactgaaaatgttaaaattaaactatttgccgatgatcttaaggcctatcatgttctttcaaatatttccttttctccactccaaaattttattaacaaatttaatcgatactgtaaattaaacggccttaaaatcgcttcaaataaatgtttaactttacatttaggacacaaaaaccaaaaaataaattattttattgatgactttccaattcctaaaaatcccggaaacgaaccagtcagagaccttggcatttattttactaatgatttgaaatgggcacaacatattgaaattatctcgaaaaaagcattacgatctgcttttgctatattaaagtcaatcaaaactggtgatacgaaaatacttgtaaatttgtttaatatttattgcagaccaattttagaatttggatctccaattttcaatccttatttaaaaaaggatattgaaaaactggagaatgtccaaaaaacttttttgagagtaatatttagacgtaacaattatgctgctgatttacctaattatgctgaattgttaaacatttatgatcaaaagtcgcttgagagtcgtaggttaaaaatagacttaaaactttttcatgaaataattttaggtaaaataaatttacaaaataatgaatccttttctttttccaaaaacattgtaaaaaatgaatacactataagaacagcttattgctcaaccaatgctagatacaattcgttctttattcgaacctctcgtctctatagacttttgcctaaagagacgagattactaaattctaatgagtttgccaaacttcttgaaagatctgatctgaatttgttgatttctttgccaccccagctccaaaagtgaccaattgtttgttttatttgatattgtttcattatttcttatttttcggcgtcacgcttatgcgtataaatgaatgaatgatgcccattttggttggagatatgagagattcatttgctcacccaactttttttgaggtcatgggaatagcctata

SEQ ID NO: 75040 - DNA, 3898 bp, Heterodera glycines
atgtataaaaaacaggcaccattcaccggaaaattcgacaaacatttcgtagccgggggtaaatacacttgcgtgtgctgtggtgccgctctgttcgtgtcggagcagaagttcaactcggggtgcgggtaagaggtcaaaaattgaattgaatttccaaaatttgtgctttcgcagatggcccgccttctccaaatccattggggacgatcaaaacattgtccgactgcccgacaattcgtacggccgtcaacgaatcgaagttcgatggtaaatgtctaaaaattactaaatttccttttcatttaaatttcccataatttagtgccaaatgcgacgcacatttgggccatgtattcggtgagttttattactacgaaattgtaaactatccgttaaacatttgcaaattcatcaaaacctaacaataagatgacggaccgccggccgacggtgggcagagatactgtatcaacagtgtggccattgactttgtgtccgggcaacagaaatgaggaaattgagaattgccctttccgctgtgatccgtcattggccggtccatcatttgttacgagttcaaggggttttttctgtgcgcgggctagaatccctgagatttatttacaaattaatgaaaatgccggacagaccaattaatatttttttttatttgcttgtttggctatttatccaatccctttttcatttatttgtttgtgattttttggcttttgtatttatttttttcggttttcataataaatttctttggcattttgccgaaatgcttttggccgccttccgtcgcataatgttcagccaggacttggtcgcggaactgttgtccaaatacagcattacgaagcagcggattgtcatcgacttttcctctccgaacattgccaagacatttcacatgggccatttgaggtgagtaaggaggggggggggggagtcgaattgtttagggctttatgaatttgactgattgagaagtggaacattggcactgcttttgcttttccaggtcaacctgctacggtgattttatgcagcgcattttccgccatgccgggcacgaggtcagtgctttttgaaccaatgatagctgatctcaaacttgaacaagttggggaatgggattatgatgcccccgaatttgccatagattgtttcaattcattttctcaaaaaaatgattgtaaaagtcagtcacttacaattgacagacccagcaggatacaattttgattacactgttaaaaattattcattaatccgatataaaattacatttttgccccgtcctaaaggtggtctctctcaattatttgggcgattggggccatcagtttggactgctgacagtttattggatggaagtgatggacggcatggatgggcgaatggcacaaccaatggcggacgaatgggcggcgatgagcgcgcggaaaagggtacgaaattgggggaccaaaacggcatttgcttccagggattccctttcttttcgaattcagatttcaataaaaaaattaaggaaatttcaaaatgttaaaattaaaattttcggggaaaacatatggctgcatttgtaatggggggtgatggcacttttttacgccgaatttcaattttcaggtccaactgctcaccgacgcttatgtggcagcgaatcggctgaaactgaccaactcggcatttgaccagaaggcccgacaattacaggtcaaaaagctatatggcagcgattaagaccattttcaatctgaacgtaatattgacatttttaatagggcggacgtgtaatttaggatgagacaaaccaaaaattattttcagctgaacatggagcgccatatgatcagcaccggtgcggcgacagtagacgacgtcgatttggtcagtttatgttaaagcaaaggcaaaaatgttcattggaattattcttcgattttcaaactttttttgctatttcgaatttcattttccaaatctctctttctcttccccccccccccaattcctccgcctttaggcacaaattcaaaccgatgacaaattgcgcgaagcgtttggcctttggcgtgacttccgcgactcatcagtggcctatttggaggtggaattgccaaattcggatctctgtgtttgctcatttgtttcaggatttctatgctcgtttcggtactaaatttgaccgatgggatgctgagtcgtaccacgtggtggagggcgcccgtctgaccgacgaaatgattcagtccggtctctgccgactcacccgggacggttggcattcgaatttttctcgattaaaataatcaccggaatttctctcttagaattgtgggccgtctgtcagccggaggttggcttaggcagggaaaagatcactctgcgcaaaggcgacggactcaacctgtacatgaacaggtgggacaccgccctctgatggggtggacggagggcttcactacgaacgaagtccgacgggggacttaaccgagggggggggggggagttggacctaaaactacaaccttcaaatcccccgaaattctgcaatttttccttagatttcccgcgaatcaatggtatcttaagggccatcggaaaaaaattcacaaaattttcgatggttgcaccaccggctttttttctttgtgttttcacaatccaagttattaattgttttatcggcgtttgtttccccttttcagagatttggcttccatttatgcgcgacatcgtctttacaacgcggacaaatatttctatttggtggactatggccaggtcattcattcattggcttctaataaatgtgttttattattccttttcgtagaccaatcactttaaccaattgcgacttttgctgcgcatccgtggcgacgacgacttggcggaccgaatggaacacgtctctttcggtttttatttaaaaaaacaataaatcttttttgttttccgtcaactttacaaaattcaatattcgtctaattgtaacatttaaacggcaccttttattggtcaatatttaaatttgtatttctttccggtcgcatcatcggcctgtccacgcgcaatggcaaaaacgactcggtggactttctgattgaccagggcgcgcgcgaggcggatgcgtatgtgcacgcgtcgccgacgatgcgcgcggagccggccgaattgggcacaatttgccgacggttggccgagtcgacgctgctctttgaggtgttagcaccgttggaatatgtgggagacttttattgatatgttaacgggtggcccttcgatcgatgctaaaagttgtgtgaatggtccccaaatgttagtgaatttgcttgattgggttaattggcccaatccgtccgtgacttttggctggacaatgcgtttgagtccctccgttcgttcagattgtcttccgtcatcgaaacagtcacttcactttctcttttcgcaactcttttcgtccgggtggcaccaacgctttgctgctccatgtacgtccccccagggtctcctcgagagtctctactcgaatcatttcggggctatctccgaaagtgctatgcacactctcatggtgccgtttcaggagaagttcagtcggctctgttcgctggagcacgcccaccacgagcacatggaacgcatccgcgcattgaacgcggacggagaatggaaactgaacatggaaatgcgggagccgggacagaagttggctcggcgcatccaggagttcgacacggtggtgctgaccgcgatgaagaagatggacccgaatccggtggccatttacttggtcggtgatgacggactcgagtccaacctctgccaatgcttttccaataaaaacacgcgtcgtgccacactttcagcttaa

SEQ ID NO: 75041 - DNA, 57 bp, Heterodera glycines
atgaacggcttcttttcggtgtggcgacgaagatgggttgtcaaattgccagcacgt

SEQ ID NO: 75042 - DNA, 709 bp, Heterodera glycines
  unsure (1)..(709): unsure at all n locations
agatttgcacgggccacnacattgacattcaccagcgcattcacaccggagaaaagccataccaagtggcaatatataaacaattaatcaattaattactcactaattaaaattaattaattgctctcccgagtcagtgtcacttatgtgacgctcgttttacgcaggatggccaactgaaaacgcacattttgattcacacgggtgaaaagccgtacaaagtgagattaaaagaatgtaactaaatcatgattagccgatttccaaaaataattcaattaattgccctagaaactgcaatgatcatccaacttcaaaactaattaattaaatgagtacctattaactgtataattaacatacctaattctcttcttttacattaatttagtgcacttattgtccccaaaaatttacacgtgctggcaatttgacaacccatcttcgtcgccacaccgaaaagaagccgttcatggtgtgtagatctggaaatacaaaaaagttaaaattgtttaaaatagatgaatttccatttttttaaatcgatgaatttccattttaattttcattttttaagtgttcccattgtggcaaacaatttgcagagtcaagcaatctgcaaattcatctgcttacacactacagaaaacgtaaagcaaacggacaattgagcaacagaatgaatgaattagtgccacaaaaaattgtc

SEQ ID NO: 75043 - DNA, 787 bp, Heterodera glycines
atggaggacaacaaccatcacttgctttttgcgcaaaagatcaatgaggtgggaaatgaaagaaaaggtcgaaaatattctcttctgtaaaatatttcagtaaatttttcatttttttataaatttgcaaatttttctaatttttttttaaaaacgaaaacaaggaaattcaattgcttaaaccccaaattctcgaaatttgcgaaatgaattttcatttcgcccgcccttttccatccgacatgctttaattgaaagcaatcatttaaaatattgggacattaataaataggatattaatttaatacattttacactttcagtgtgtcactgttgagcaagaggaagtgagaaaattgggaggggaagaagaaaatgagagaataaaggaagaattggaacaagaggaaaaggaagtgaatgaagaggaggaggaagaatgggaagaaaataatggaagaggggaggaggaagagcaagaggaggaaaacaatggaagagaggaggaggaggaagaaggggaacgggtgaaagatgaaggaataatggcggaagggcacgacaattacgggatggaaaatggcactgaatcgacacttggcactcaatttcaggcacatacaaaattttggcacaatgagaatttggaaattaaaaaaacaaatttcctcagaataagaatttttgaagacctattttttagaattttttattaagttatgagttttagtccaagttaattgctcaaacgatcggtttgtcagttttatggcaattttgaaataaa

SEQ ID NO: 75044 - DNA, 1352 bp, Heterodera glycines
atgtttgcaactgttgtcaccgcattggagcaccaaaagttgaaaagtgcgcacaacgcactgcagcaaaaagttgaacaaatggaagaaaagttttcgcagaaaatccaagaaaaggaaaatgaggtggaatctttcatttttacttttttaaactcaatatttaatttattattttatttttatgggaacatttaagtgacctctctaatcacattaaaataaaatttaaaatttcgtcaatttttcatttttaataccctttaaatttctgctgaagttttttacaatctttggaaactaaaagagaaaaaaaaacaaataattatattcatatttgaaataaagagaggaaaggttcataaaggactgatcagtataaaataacagtcagcaaaaatcagagcttttttaaaaatttaattaagcaattttttggaatgaaatttgccaaaattgaccaaaaactaaatacaaagtttttactctatttttttatttgtatgcctaattttcacagattgctcaagtgaaaagggcaaatgagagaatgcaaaagaaaatggacgaggcattggaaagaattggacgattaaacgaattggtgaggaaaaggggaaaaattaaaattttataataatttaaaaaagctaattttcatggcaatttttcgatcagatggaaagtcaaatgatacatttttatgagcaacaacagcaaaggttggacaatgatggcacatttattgccggcattgatgaggtgtgaagcaggggtggggcgcgcacagaaaaatcccgcggtcgcggatcgcgcatcgcggattcaatttgccgcggtcgcggatcgcgcaaaaaaaatcccgcggtcgcggatcgcgcatcgcggattcaatttgccgcggtcgcggatcgcgcaaaaaacgccgcggatcgcgcaaaaaatgccgcggatcgcacatttgtaaaagcataattagaaaattcccatattatcaataatcaaaattgtaaaggataatattatgatgaagaaaaataagccgttcgagattttcatgcgagagactttttcggaggtcattcaaaataaatcctgcatacaaaaaagtagagtgccacgggaccgggaatttttgccaaaaccgggaccgggacttgccgggacctgagaagccgggaccgggacctcgattttttttcgggaccgggaccgcaagaaaaaccgggaaccgggaccaaccgggaaattttaaaaattcaaaaaaattttaaaaattaaaaaaaaaattcaaattttaatttatatcaagtgaaaataatacaaaattatttggttttttatttaataaa

SEQ ID NO: 75045 - DNA, 400 bp, Heterodera glycines
atgaaaatgacaaacttaaagagaaagtgcataaaaagcgtcagcagaaagtgccaacacaaacaaaaatgccaaatgaaaaatggacaaatgtgtaggctgggcactgccgcatttgtcgattattatcaatttttgtgtgcatcgcttgcaaggaatggaagagaaatgaaaacagagaaagagtgagtgaaaaaaaagaatgataaaataatgaataaaatatagaaaaatagaagaaataggcagagaaaatagagaaagtaagaaagctaaggaaattaaggaaaagaaaaaaaggaaaagatcagacacagagcgcaaagacagagaagatgtatgtggtgttcaatgtgagaagaggtgagcatatgccgagctgctctagatgggtgagaaa

SEQ ID NO: 75046 - DNA, 145 bp, Heterodera glycines
atgaagctgatttcattggctccattggtcatttgttcattattttttgtggggacccctgtcgtgctaagtgacgggaaaggtgcgccaccgcctccgccgcctccaccaccgcctccgtcaagttacggtggacccccaccaa

SEQ ID NO: 75047 - DNA, 1968 bp, Heterodera glycines
atgaattttcattttcattttctattttcatttttttttgctgccactgtggtgatcggcaacacaattgattgctttaaattgaatttgagaatcaatttttcgaaagaagcagacctttatgtccgtttggttcccacttcaaaatttatttgcatacagtaattgttcgtgaaataaaaggagccgaaaaaattgtcaattcaaattgtacaaaatgccaaattgaaattgaagaagaaattcaaattctgggcaattattggccagaaaaaattcagtttgaagccgaaattcacacaaaaacaacaaatgaaagtgagggtaattgctttcgatttttatatatatttaaacaaattaattaattattatttgttccagtgattgtgcgacaatttgagctctttgtttataatccaaatttaaaaaaagttttggaattaaatcttggcaatttgacaactagtggtaaagttgaaaaaaatgtcatttttggcgaaatggttcctgaaaatgttcttttgtttggtgctttttttgtcgatttgggcaaaacaaatctgtccccgaatagacgagcaaaagaagttgttcatttgggaactgaacaaattgaaattaaacgcggaaattcaaatgtaattataatttctatttattaaaaaaaaattaaaaacaattgttaaaataattaaaaatatagttaaaaaaaatataccttttaacgaagttgtacatattttatttttctgcaagaaatttaattagcataattagtgagatccaattgatgaatctttgactttttaggctccgttctatggcactttcaatttaaatgttaatttgtcgaaagttaatggagcaataaacaaaatgaatttaaagatattcaaatttattgaattcaaaaatgaaaaaaatgaatttaacacctgccaaatttgtttacaggatttccaagaaaatgcacaaatagtacaaatgcattccaacagcaataataatgataatagcagtgaaaaggtaattaattaattattttagaattcttttaaagaaattctgaaaaattccggcctaattaacaatctactggtacattttgtattcattctgttttaaagaattttttctttatcacaaaattcgcaaatattaaatatcgaaaataattaatttaatcaattttatttacaaaatttttaaattatttctacatgaaaacatttttgataaatataatctttatgcataattgttgaaacaaaaaaactagggttataaaagtgtaaaaacatttaatactgcaaattttcagcatttgtcacaccgtgattgcattatcaataggtaaatttttaaaaacaaaaatattttacacaattaaatctttttttattctttagtataaaaactgataatttcaaatgcctgtgcggcttcaaattatatgaacaaagggtaatttaattctaattacaatcaattaaaaagtataaaaataattctttagtcctttaatttgccgccttttttaaccgcaaataacaatggaaatggacaacaacaacaacaacaatcaggcattttgtattggaattatcagcaaaagttgagcaaaattttggaccatgagcaaaatggcacatttaaacatcgccaagcagccggtgccttgaatgaaattaagcaatatattagggaattgaacaataaaattgccgaatttttcgggggcaaaggctatttggataaattgacactaaagcagcaaaatgacagcaacaaaattgcatcggttgacacggtgagaaatttgttgaaactaattgcgaaagttgaaccgggacaaaatgccaaagatttgttgcaacaagtcgaaaatgttggccaagtgttggatgcaattgccaagcaagcatttgacaccatggagatgatgacagaaaatgaatgaataaa

SEQ ID NO: 75048 - DNA, 459 bp, Heterodera glycines
atggacgaatttgataataaaaattgtcagtcaaaatccataaagcgacgaaagttttcattattaattgggcacaaaaagctgaacattcgtatagtcaatggtgagttttgtatttcctgtttttgttctcttttctttctccgtcccttcacaaatgtcttcaatttttccccatttttggcattaatttaaaatttgttttcagcgaattcgccaccccaacaattgccccccgctgatgtgccgttgcccttccaatgccatctttgcaccgcgcaattcctgaaacagtgccactgggcttggcactgtttcatcgcccattacggtgaacgggcggacacagcgggcgaaacactgctaatgacgagcacaggggaagagcacggagaagagagtgccgcaattggtacgaatgacgacggcataccatcattaatggtaattaaagcctaa

SEQ ID NO: 75049 - DNA, 674 bp, Heterodera glycines
atgtcgcctttgtccaacaaccatttgttcctgccctaccagcgcaatccgatgcccgagtttctgatgaaggggctgaacatcagtttgtccaccgacgatccgcttcaatttcacatcacaaaagtaatacacttaaacgaaggatttgattatgttggattcaaataccgattagcattttattaattatttttcaatttccaggaggcactgatggaggagtacagcatcgcccatcagttgtggaagttgagttcgtgtgacatgtgcgagatggccaggaacaggtgggcgagttcaggcttaatcgcttttcgaattgcactgatttccctatcaatttcagcgttatccagtcaggatttgaggtcagtttggcacttttcctgggggtggatcattttcttccatttgtacaatttttttgctcatttggcaggaccgggtgaaagtgtattggttgggccccaactacaaggaggagggagtgctcggcaacgacgtggcacggtgcgttactgtacagtttcatttgtactgtccaatcgtagcaattctttgaaaaattgcaaaatttggcttttcagcaccaatgtgcccgacattcgcgtctcattccgtcacgaggcgttggtcagcgaactgtacaatttgttcaaggcgctgatgct

SEQ ID NO: 75050 - DNA, 1042 bp, Heterodera glycines
  unsure (1)..(1042): unsure at all n locations
cagtgttccgcaccgcgacttttacaacattcgcaaggtggacacgcacatccacggtgagtgatggtcatttcaacaattaaattgaataattattcaaaataatttttaatcattaaaatagattttaaaaatggataaaattttgaaattctctttttagccgccagttcaatgaaccacaagtgactttttggctttgatttgccggattttccgttctttgatcccttatcccttaaggcatttgttgcggttcatcaaaaagaaaatgcgcaccgatgctgatgaagttgtgcaggagaaggtacacaaataaatgcgtggcaacttataaattattttaaattttatttaattttaaatccgtataatttgtgatttgctccctaatttagaatggccaaaaggtgaccatggcccagctgttcgaaaaacttggcatccgagcgtacgatctgtccgtggatatgctcgatgtgcacgcggacagacacacgtaaaacggaaaatttgttgtctattttaaaatttcaattttcagattccaccgcttcgacaaattcaacactaaatataatccccgtaacattttttgtactgttttttgagaaaaaaaaatcaaaaatttcagttggccaaaacgaactccgtgaaattttcatcaaaacggacaattatgtgaagggaaaatattttgcggaagttatgaaggaagtgctcaccgatttggaggagagcaaataccaacaaatggtggggagaattgggggggggggatttgggattattaaaacataaaaattgaatcgtcggcaaacgatggaaaagactgagaaaggagggaaatttaattgcccaattaaaccaaaagagtataatgtttttaaattgaaggagccaagactgtccatttacgggagggcgaaggacgaatgggacaaattggcacggtgggccattggacacgatgtgagtgaacaaaattttcaaaaaagaaatgatccagtggcacaatngtgtcatcccattgatcggaaag

SEQ ID NO: 75051 - DNA, 631 bp, Heterodera glycines
atggctaagaaaagtgtaataaggaaactacaaagcaaaaaaggggcccaaaagcgttggactaaatgggagaataagcgagaggagcgacaagagaagttggagagggcgagaaaagccaaatccgcaaagaaaagtgagttttccaccaatttttaactcaaaaataattttttttttttaattttagccgctctacagccgaatcccaatgccgaaacgccacagcaagacgaagcaggaccgtcaacatctgctgcatccgccgaagaagcgatggaaccgccgccaccaactccaggaccagggccaacgccagaaatggacgaggaaattttggaattcgacgacccgccgccgtcgacacctgccacaccaattggcgatttggtgccgtttccgtcaacaccaactgcgccaatggacaccggagagacgaccccgccaccgctggccattgacgagcgatcagagcgcatcgaacaactggaaaagcaactgaaggaccgggatgacaccattcaatttctgcgcgagcaggtccgaaaccgagaagcgctgatcagtgatctgcgtcgtcagctggagcaatgtgcggcaccaccaacggcgacaccaaccaccagcaaaa

SEQ ID NO: 75052 - DNA, 76 bp, Heterodera glycines; identical to SEQ ID NO: 51705

SEQ ID NO: 75053 - DNA, 1683 bp, Heterodera glycines
atggcacactttgcccgtgagcgcattccggagcgcgtcgtccatgccaaaggcggaggagcgcatggctattttgaagtgaccaacaaggacatcgccaagtacagcaagactgccatgtttagcgaagtcggaaagcggactccacttttcattcgcttttcgagtgttggtcggtgctttttttttgttaaattagaaaatgatacccacattcttcatgattaccagaaaatattagtttcagatattgtttctcccttttggttctatctttttatcttcggcaaatttttctttttcttttaaaaaataatatttttcctcaatttcttgcataattatcggcatccgcgagtttgtactgtatactttttacaaaatgcctcgactctgcgaaaatttagttttttttccccgctttaggtggagaagccggaagcgcggacactgctcgggacccgcgcggtttcgccatcaaattctacaccgaagagggcaattgggatttggttggcaacaacacacccgtgggattctttggcctttcaattctgtgtcaaatcaaaatgttttctgaagattttcttcattcgcgatccgtttctctttccgaatttcatccatacgcaaaaacggaacccagtgacgcatcttaaggacccggagatggtcaattgttattggcagtaacatacacataaagcaggaagaacttcagatgtgggatttttggacacttcgacccgaagcactgcaccaagtgatgtttctgttctccgaccgtgggactccggacggattccgccacatgaacggtctgtcgaatgtgtgaatttgtttagccacacacaatgggaatggcctgttatgtaagttgcgtcacctttgtttaggctacggtagtcatacgttcaaactcgtcgacaatgccggcagcgccgtttattgcaaatttcacataaaagtaaaatcctttaatcatccactcgaacgcacttcgtcctgttaagactcgccaaggcattaagaatttaactgctgagaaggcccttcaattggcagccgaagaccccgtaagaattacgaatggttattcagtgtaattgggatgggtttgctcaaggattacgcaattcgcgacctttacaatgccatcgccagcggagactttccccaatgggacttcttcatccaagtcttaccatacattccttttttgttactccatctctcttttgaggttatgacctttgaagaagcgtcgcgttttcgttggaatccgttcgatttgaccaaagtttggcctcaccgtgacttcccattgcttcccggttcgttaaaatatgtcccaaaccaaacttaatgtgctttgatttagttggtcgaattgtgctcaatcggaatccgcagaattacttcgctgaggtagaacaatcggcgtttgcccccgcccgaattgtgccaggaatcgaattttcgcccgataaaatgttacaaggtgagcacgtgttcgaaaagcatgtctgtatcttcattcagggcgcctattctcttatcctgacacacaattccaccgactcggcccgaacttcatgaagttgccgatcaactgtccgtatagaactcgagtccgcaacacgcaaattgatgggtgggcatgctttgatgacaacagaggtg

SEQ ID NO: 75054 - DNA, 236 bp, Heterodera glycines
acaattgtccaacttttcgcattggtcgtccaatactcgcaaagttcgaattgggagggacgcgtcactgctgccgaattgctcaatgcgttgctggaggaaacggacaaaaatttcgaggacgaattggtcaaaacaaaagtcaaattcaatcgggagaaattagcgcaatgtttgcgggccatcgacgccctttctatgcgtgaagtgttggacacgtatcgaacgttggtcag

SEQ ID NO: 75055 - DNA, 4161 bp, Heterodera glycines
  unsure (1)..(4161): unsure at all n locations
gtcgtaacgtttatttgatagaaaatggatgccatttatttttcgtttttccaaaatttctattgttgggaaatatgcatagttttttgtttatttattttgtaattggcaggctaattaattctcgatttntaaaattctaggccatcttctcttgcgtgttttatttcgcgtcagtgtctctgtaccagggcattttgatggttgcgtaagtttattgtatttttttaatatattgtataactagcaataaacagtgaggtattcaaagacaaaaatcccatgaattttggaattttcttatttttttacactcccaaattttcatttactctaattgttacagttattccaccgcttacacaatgcttcccgtcttctcgctggtggtggacacggatgtgacggcaaaaaacgcactgacctatccggaactgtacaaagagttgggcaagggtcggtcactgtcctacaagacattttgcatttgggtgctgatcagtctgtaccaaggtgttcgtccatttgtaatttttaaaattaatttttataattgaaaaacaggtgccatcataatgtacggggcactgtacgcctttgacgatgacttaattcacattgtttccatcagtttcaccgctttgatcatcaccgagttgatcatgtaagtcacgacgaatcattggcatggacagacgaatgtgaggggaatgaatgaattgtgtacccgttcaacaaatcttggagatgttcaatttcatgtttaattttgaaaaattaggcttgaaaagattaaaaaaattttcggcggcaagattttgtcccgtccccagatttccccgcagatcattcccttttccccaggtatattgtatttgtctttttagggtcgccatgacagtgcacacttggcactgggcaatgctggtagcacaggtaaacaaaacctcccttgtttaccttggtcttggtaattgtcattccccccccccccttaaaggccctttctctgacactgtacggcgcctcgttgatcatctttgacaagtattttgaccgccaattcgtgctgtcctgggagttcttggccaagaccaccgtgatcacgctgatttcctgccttccgctttacgtgatcaaatttttgcgtcgacgtttctccccgccgtcctatgccaaagtgaactaattgaactgacgaactgatcagtcagtcagtcactccctctgcccatcagtcgtcacaaattgattggtaattgaattgatcgattgggttgatcaacagccaaaaagtgatcaaatttttttacttttgacatttgattacgcgtcaagcatttttttcctgttaagaatttctctccatattttcttcattttacaacaattgtaatgtctgtccgccacgctttttccatccaatttagttaataggccattttgacgatgaaaaattaattgaaaaaaaataattccgttattttttttatcggatggattgacttcttcaaaaatgacgtactcaacacaatctgccccccatcctttgcatgcaaattttgtgacttctctctttttttgtgtattgccaaatttacgaatggctaattttttgaaaatccaattttgtctctcgaaaatttcggttttaaaaaattttctacccttcacaatgtgtgttattcatgtacaccatgtttttcttgtccggggttcgcctactagtcgggttgtgccgtgaaatgcgaatttaaaaattcacaccccaattttcaacagacatatttttgtatgatgtattaaatatacctaaatttatacccaacccttataatccatggtacatatcaggggcctaatcggaggcccccaaaaattttaaatttggaattaaatctaaaaaaactccggttaagcccctggtgaatatttgctaaatgtgttttactacaaaactcctttttgaccttacaaattagcaaatcattgaaagctcttcaatctctccatctttgaaaattgtattatcatactcttaataaaaaaattaaattcctagatcatttaaattgttcaaattttaattgttgttgctttcaaattttaattgttgttgctttaaaagtgcaaatttatttcatttccaattaaattcaaatttttctcactttttctgtaatttggttttagctaaaccagccaaacagataaacgacgacaaatgggtgtcgccttcgtcctgtgctgtttctccgtcgcctttacgccttcgctgttcatttttcgccgtttcgttgcccccgacccgttgcgcatcattctcttcgtgctcgggtgggttttcaattttgggcattttccatcaaaactcggcactttaatgttcccattggaaagtatcgccccggagttgtgaaaacggattcacaatacaacaacaatgaaatgtgccccattttcagtgccttcttttggctctgttctctgctgttgtccgccgtcgttttcgccgtgttcggccaacatctgttgctggtcgccattttcttctccattctgttccaagaagtggcgcgcgcactcttctacctgttgttgtacaaaacgcaaaggtgcgaaaaccatgggttttcaaaaattttaaacgtattttacgcgtggaatagcaattaatataactcgagtttaaaagcgaaacaaaagttctttggttggttaccaacaaattttccatattccaaatactggacgttcttaatgtggacggttgtcctgtttttgggcgggacgcagcgcgttttgtttttcaacccctcgaacatggccttatttttaaaagggacataggttagccctatggtatttaaattaaaaatttgtgggaaaatttactcggcggaatgtaaaccggtcgtaatttctcataatattcagcaatttggcccgactgatggccgccgatgcgaaccgcaccggcacagtgtccagcatgcgcttgctgtactcgtcccggcacattttggccattgtctgtggcctcggcatgggcaccgctgcggcactgtttcatctggccaacgtgttggccgcctattgggacgacggcgttgtgggcctgccgggcgctgtgcaggcaaatcgtaccatggccgaaccaacggacgcgtcagcaacggcacagccaaacgcagtgccattggtgagcataataaaatactttacccccccccccccccaaaaaaaaaatttttttttgaggctctagcagaaccgtcgaacaacaaaataccttttaaatttttcagtttgatccatttattaaaaaaatgctctttttgtcgaaaaattgataatttcagccccatcactctgacccggccattcttctctctgccgctgctgacggtggcgtcaccgccgtccccggcaatttgcacccgtccgacgcgttctttcccctgttctatgcgttgggttgtgccctgctcacactgttcaacattgtgtggaccgtctgcagttgggacgcctttcaccggtgctgctacaaaattggacggccctccgcgtgggtgaccaccgccgtgttcacactgtgcagccattgtgccaacaccggaatggtgggtttgtttgttgctgttgatgttcctgttgttgtgcattgattgcaggtccgtagccaaaacaacacaaaaaattcggagggggcaatccgaaggctttttttctctttgggccaaaaatttttttctccaatgttatttttcaaaattttcaatgccggggcgaaaaagcaggaatttgtagcggttttcgaccaaaaaataataaatatatatatatatatatatgtggcagcatgttgtgctaaaataccgaaaaaggaataataatttaccgggtgctgactcctttttaattactaaattttggtattaatcactgatcaatgcaacatttttccacagcaaatttaaattaaagagataggaaaatgagtattgtccaccatatatttgtttgtttgtgccacagagtctctacttgggcgtgtccccgctggttgtgctttcgcttcaactgtttctgcttctgctcggcgtcgtctacgcttattttcttattaaacgcacgtgaaaaagctgtagtaattaa

SEQ ID NO: 75056 - DNA, 665 bp, Heterodera glycines
ttgtgtcaaatcatcctcactttgttctatggttatcgccgtcgaccacgtgtccgttttcctaccaatgtaagacccttcacaaattttggcaaaatttttttcaatttttaaaggacactccgctctcgccattgcgccgctttcctccaccaccgccgccctcaattgcaattcgggcaacaacacagaaagtgtgtttaattttgtttctgtttgaacaatttgtattagcatttaacattttcaacaggatcagcaccacacggatgagcgcaaaaatgaacagttcaaaaagagggaggaaccgaagggggcggaggacggacggcacaatttgcacaactcatcggtggttaaaaagaaaaccattgttatatttctaataaaattaaagaagcccaggacgtttccgttcaacaacaaagcagtgatggatgggttgccaaacaacaagcgcaacaagcacaagccgttatacggtatttgtttttgttaaaaattaaaaaacatcacaatattattattattattcagctttggcaagcatcccggaggaggaggagacaaaaaagaatggacgtgaaaagccggcgctcgtgaaggatgacaaatatggggacaattattttgaggactgctattaccagtccacttgggtctag

SEQ ID NO: 75057 - DNA, 498 bp, Heterodera glycines
atgtccccatgccgtcgttttaaatctcgcccccagaaaaaaaattccgaatataaatggcttcatattgtgaagcgtcaaaaacatcgccagcagcggcaccaacaaaaccatttcaatgaaatgtgcgtggcatttcagagtatggaaatgtcggaatcggcaagaccccctgcctggtggaccaataaatggaccaaagtccttcggtagaacaatttttgatatgcattttcagttcttactgtaatttttaataattttaggatgtgcatttctgaaagaagatatcgacaaacagatgacgaatctgattttcacaatcacaaaaatcgaagagcgctctaacggactacccgacccgcaagcggcgcacctttatggaatagtcaaggagcagctcgaaagaactgttcgtcaaattgagaaggactgcttgtgaatcggtattgatgatgggaattattttgatggtgatgggattattttttaaataaa

SEQ ID NO: 75058 - DNA, 2634 bp, Heterodera glycines
atgtttgcatggaagcaaatggtggaggaatacggagataatttggcagatttatataaaataaccgagcgagttaacaaaaaatttggactttgtgttatcatcgaaggcgaaactcgtaagcattcaaaacaaattaattatttttcgttttacaaaaattaattacttttttcctattggtttaattcttcatatttttattttaacaaatttcagaattgaaatgtagtgcgattaatgttgaaaatgcggaagtatttgtcaatcatttctacaaaattgtttttgagccagaatttgaaaaaaatttggcaaaaagatcagaattaattgctacaaattttttcaatttgttgagaaccgaacaaaggaagagcttccaggatttggaaggagaaaacgaacaaaaagcaaaaaataatgccaaaaattggaaattggcagagccatccatgcgcgtacgggtccaagtgttggtgaacacggcgggcacaaagtgccagcaactgataaaatcgcattacaaattcgttagtaacaaaaataaacaaaaagttaaggaaacaaaagcaaaaaaattgcaacaggaaaacaaaaatcagaaagataaaaagaaaaaagacattgatagtaaaaatgagcaaaatctgacggaggaagaggaagaaagaaaggatctcatgacagaaaattacacaaaaaggctggatgaattaaactccgattttgccacttgcatttaccattacatgtatgcattttcagagaatctgatcaaaaaaattgaagatataaatggtgaaaattcttacaacaaagaattgaaagacatttataagaatttgaggcaaaaaacgcgaaagcgaatggaatcagtttataactccgagggactggaaaatatggacaaatggctaaatggggagaatgaaccgtcggcatcaactgctaaaaagggggaggacgaagatgaaaatgaagaagaaacatgggaagacccgtttaatgattgtgccaatgttgtggaggaccacgttgaagcagacactttaatgaatagagagggtgaaagataatattcaaaatcaaatacattaaaattcatgttaggtgacaaatttacatattagagtctggcgtggtgataggcacccataggacttttttttatctttttcgactcgaatcagtttagaacaacagccctatgtttagatccgcataaattcctttaaatttgcttttcaggtgaattaatggacaaaagctttgatgaccatctgtttcaatgtgctagccaattttttgaggctgttcgtagagatcaattcgactataaattatttgttaatcaacatacgatgcaattggacacggcaatgaaatttccatcgtctatgaatggaatacaattgaataatggacaaaacaccaaggacaaatgcttaattatgcggtattttaaaatggaggatcaaattagagaatgaaaatttcaaatttacggatatcgctgcgagattgaaactcaaaattaatttaaatttgcggatcttgctgcgggattggaattccaaatttttcgggacaggattccgaaggattaatcctcaaaacctcggaaaatccggatttccaaaaaggggattgctgctccgggctctagataaaatggctttcttcctgctatttttaaagccaagtctattaatgtttatttctacgggttattcgtatcttactgatgttcgctttacgtaccaatttcattgaaaatgatgacaaaaatgtttatttctctggtttttcagtgagttattgctgtcactaaatcagaatttggcacatcgcctgaattatgagaaaataacattgcgcgaagaaaaggaaaatttggtgtcattgaacgaaaagtacggcaagctacgtctggacaaaatggacaacaaatggctgctgcttgaaataggcaaaaaaattgggcaaggatatgagaaatggcgcttgacaaattcgttgggtacacttacgcatccgatacgggaccaataccgaattggacgcgaatttgtgggacaaatgttggaagattatgggataagtgacacgtataaaaagggacaagaagcagtggtactgacaataaacaagcttagtgagtcattgggcactcctaaaaaccaaaagacgaagatagatcggaaagaggatggtcctgtaaaggatttaggtaaaataaataaaatttcttagagtaaataacaatttttaaattaatattaattttgcatttgaagatataaatatatttaaggaaatgagaagatcggacaagtccgaaaaacactgaaagaatgcatagaagaggatcaggacaaagacgaatgtgatcaaaaaataatggaaatgcagataaaaattcagaaacatccattaacaaaaagattggaagcatacaaaatgtttttccgggccttttacatcgctttggcaatggaattatttgaacgaatgtcaaatcaggcagaggaaaattggcattttgtatttagaagcaatgagaccgaccaggtgggaatacttactgaaaaagacaaagcaaatgtggcaaagatcaaagagcaacgggaa

SEQ ID NO: 75059 - DNA, 438 bp, Heterodera glycines
atgctaactaattacatgcaactgtttcttctgacgcttctgctatttgtcttcatgaacaatttttctgaaggtaagtgttaatttggaaaaaataattgaaataaaattatttaaatattcaaaaatttagcaataaattgccgtaacttttccgtgaaaagtgcccaatttgctgccgaaaatttccatcaaatacccatagaaggaaaaggcaaagacaaaattgtgcaaaattttgttgaatcaatcaaacaaaaaatttcggagagtaaaaaggcggcaactgatcaaccgaagaaactcgaagacataattggtgatccggacacaattgtgaacaatgccagaaaaatgatcacacttgcaactcgatgctcgctatcgcgtgaagaggtatgattcttatataatatttaattaattaatataaataaa

SEQ ID NO: 75060 - DNA, 174 bp, Heterodera glycines
caaaagccattccctggcggcgttcacgtgcgtctgttgccgaacagcaaaaacaatggacgaccactgattcagtcggccaacatcagcagcaccaatggagaacaacagaagaatctgatcgccgtcgtcgagcagcacttggagcagtacaccaaggacctcgttaaggaa

SEQ ID NO: 75061 - DNA, 1894 bp, Heterodera glycines
atgaaagaaacgcaaatgaaaaaagaaatcgacgaattaacaccggaggtatgaattaaattgtattttttgtcaatttttaaaataaagatttttgctgggacaatgcccatttatgccattagttttggcgttgtgacaatgtttgggatgtttttcaatttttccgtcattttcatcacatttcggacaaagtgtcaatcattttgtcaattaataataattaaagtttaatatttttttcaaaaaaaaacattttcttcccccaagggcactccgtggctccgtcaatattttgttggcattttattcattatgcgaaattgtaaatttgtgtggcaattttctgacaatattctccgcattttctggccaatattttgtgtcatttaaaacagccgtttattttgtggttattcctttaacaagcagtggatgcgcagtgaatttaatggtttttaccggcattgaacgattgttcgctgtgctttttccgctcaagtaaaatatgtaaaaaataataattaaaaacaatatttttatatcaaaataaaataaatgttttcaaaattattttatttaataagaaagttgaagaaaacatatatttttgccattgttctgatggttaatatggtgcaaatcattgcatcgtcactcatttatttaaacggttacgactcgcaaatgaattcgcttgaaacaattgacaattattttttaattatcggtcgcattttcaaatcagttagtttcatttaataataaaatttttactaatctctaaaattataattaggacttcttttttatgtaagaaaaatcgcgaattatgtaaataaaatatgtataaaaatgataaaatatgtatggaatagctataaaaacccaaaaatatataataaaatatgttaaaaattttttgatcaccttttagtattaaaattttttttttcatatctctttttttgaaaaaacccattttcttggggtacattttcaaaaataaatttttattatttcttctataaattctcaaaatatgtaaaaaaaatgaaaacatgtatgaaatatgtagaacaatcacgaaatatgtaaataaaagtccaaacttttgttcgtaaacacaaaaaagaaagggttttcctactatttcagagcatagagaatccaggaaaaatatgtatttgcatcaaaaaaagaagccctaattataatattaattaacatttattaattaaagagccactgggcaaccaatgttcagttggaaggcactttttgcgtattcttttcggtcattctttacgcattaattgctgttgctgttcagtgccgtaaaggtttttcagttaaaaatatgcaaaattatgtatttgccaattatttgtcatttcagtgccttcaaactccaattcgacccaatttaataatcgtattttccggtcgcttttcgcaattattttcgccaattttggcggttatctctttgcttgttccgttgctttaatatacaaattattgaacattaatgaaagtaatgcgattgttttgtggcattcttcacagattgttggcattttgtgccacatcagtgcttcgtcaagtggcctaattctctatttgacaaggtcaaaatgggtcaatggcaattcgtacaataaaatttttacaaaaaaagcttaagcttaggcttaaaccgaaggcttatacctagtctaagcctttgtacgaactgccgtgacatcgataaaatgttaattattctgttccgctaattgcttttcagttccgaatatcgcgcagcttttcagaaggaattttcatttctgttcagattattctcaaatagcagctcttctgtggtcgttcctcaacattaaaagccaataaa

SEQ ID NO: 75062 - DNA, 491 bp, Heterodera glycines
atggcactcggaggatggaagcgcgagcgtgctcgactccgttctctacaaaacctgaaccgcctgttcgtccgcccagcgctgaccaaagaacaactcaaggaagaatatgaagcgcgcgtacgtccgagtcgaaagacggcggttggttgggcctcaacttcaagatggtccaggatttttgtggcggcttccctgtcttcctgaacacgttccgatgggcgaatggcattgctttccgggaggccaatgaagaccagggtgcgttgtcgttcttgctccgcgagtgcgatagcgtttgggtccaggtcctgtgcaggtgccattgaacgttttgcgcgaggcggagtgatgtttgatgcgttggttcgcttcatgtcgaataattagcaagaataattgttttttgcgatcttatttggactacagagagacaaattaaattaattatgtttgaaaattaataattttagacctattttaaggtgtaa

SEQ ID NO: 75063 - DNA, 2336 bp, Heterodera glycines
atgcagattcgtgatcagggactccaaatcctccgggaacaagttaataaacaatctaccggacgatccatccgtagttttcaccaaaaaaaagaatgaattgagccgtaaattgacgaaatgccaattttttattttgagaagattaatgaaaattttaaattcaaaataaactcgtgggtcagattttactcttttttcatttctcttgttgtttaaagatagaaagaatttttttctagtcaattaatcaaaataaaccttggaatacttcgaaagctacatgtttatttgcccagccttttctaagattttgctaaaccatatcttaaaatttattaaaattttaataaaaaccaaattattagaattattaaaacttataaaaaattcgttcacagttgatcggttttgtctgattttatcataaatgatagagttcagcctttgttccaccatatgtgtggcgtttggcggttctcaaacataacgattttatttttgaggaaatgcaacgaaatacagaagaaatggaccgaaagttcgaggaaatggaaaaaagactcaccacaaagtttgaacaatttcgcgaggacacatttgaattgctcgacacgattgttgagcgtatcgaagacggcaacaaggaaattgcccacttttgtcgacacacagcccaaacgatggacttactggcacttaacatcaccaccagtgtgtcggccttcaaaaggcgcaaacaacagtgcggacaggttttaagttcactgttttgtaaaacgagaagaaaagcatgtcactatcaaaataaatttccaacaaaaatgcaaaatactcaactggcaaaatgttggttctgtacattcatggttgaaaaattgggtttcacccaatggaacattttctttgggccgagcgctgactcgttgacataaaacatcattaattttggcaacatttttgctataaaatttgcgaactgtaaaaaattttggtccttaacaccgagtggttggaaaaacgggtttctccacatttgagggaaaaagctaatcctgagaaaatactaaacttgttggcgcattgtataaactttaggacactgattcagccatgaccgctgaaggaacgttcggcggcggtcaactgaccgccgctgctccgtctgccgccacatcggccgcacgcggcggcgaattcagtgcgaaagtaaataattttgaggctgtgtaccgtcaacgacgtcgccgatctgcccaaacgacaaagtatatacttggtcgctggcttaattcactacgacttaggcttaattgggtcgtcccccactctccttgtctcatattcagtttttcaaaaaaaaaatcaaaagaggtctatttgcaaaatttttagccgattttcgccaaaaattactattttcgccatttggtccctatttttcaaaatatgctaaaatatgagtccccgccgggaaaaataaataaagcaatttgttaagaaaaattacttaaatttcaaaatgctgaaattttttactttttcgcttcggaggggggggggggggtgttttagctccctcaaatcccctggatacgcccttagtggttggttgtggttgtcctcatttgtcaactagggctggaggagcacctctttcatttcaatctgctgtccttttgttaaatcacatcaatttacgcctcaggtttcgctttcgactgcgattcgccaagggcgactggacaatcccggtgtcgacagcgccatcaagtcaaattgtgagaagtcagacaaagcacttttttacgaacatgccgagtctcttcaatctctgctgcatgattttcctcgcaaactgcgcaacgaatgcactgacagaacgtcgatcaacattggttcgtttgtcatgcccggggcagctcgttctccgtcctctctcatccctttcagcccctcttcaatttccatcaaaaattaaatttttttttcttacatttagagttttcatcagtaagatactcagttttttcaaaatcaaaccattaaaaaaatttagtttttcttttagaaaaactaaattttaaaataagaatttcgtgttttggcaaattttttagtgccataccataataaaagtgccatttagctatttccgactttgaagcgcgattcatgtcttctttggacgagatgaactctgtcatgaacggccttcgctcatcaattgacgctgaagaagttgccaaattaaaagaaattgttcaaactttgtctaagtgggccttgcacattcatgagaaggctgaaaatgtgtcgaaggtttccacaattgg

SEQ ID NO: 75064 - DNA, 68 bp, Heterodera glycines
gacataaacatttatttgatttattttaccatattcacaattgatcaaaatataggtggtcaaaaagt

SEQ ID NO: 75065 - DNA, 816 bp, Heterodera glycines
atgcgctggccgattgttctttcaatttttcttatgggtatctatcggacggaatccatcctccatgaccatttaaagatcagtaaagacttgccggtcgaatgtccaaaggaattgtctgtttcgataggccatgaagtttcactcgtcttatcatccaagtttgtctatcttttaatttgaacaattccattgttttgaatttatatttttcaggaaaagatttgagtacaatttgaacttggttctgaacacaagttggaccgtgctaaaactgacacccgaacgaattactctgaaaaaagaaaaggactctcaagtgcaagtgaatgtcaccggtctgtccctgtccagccgaacttatattgaactccaaaattgttcattggtttttgacaatgggtcatttgctgacatttgcccttttgagtgagtttatcattaacattagcattcattcttttcctaatgatgtcaatttctttcagtccacttgatttctttatccccgtcaccgtggtcagaagtaaaacgatctccgttttggtcattctctccggatggatttatttcgttgcgtgagtccctttccctttggccaattgtccgcttctcttcaggtggagtatttccttctatccgcagattattctcaacttccagcgaaagaggtggtgtttgtttcggttttttgaatttctttatttatttttcagtgtcattggtcttaacttcgattttttgctgctgaatgtcattggtttttcctgttacactgtttataatgtgttgctttatttcgatccgaatgttcag

SEQ ID NO: 75066 - DNA, 277 bp, Heterodera glycines
caaattggttgataatttgcggcaccggtcgctttctgttgaccaacacatagggcttgagcttatgtccattgctgcgggcttttgcagtagagaccggacaactggggtcggagggatcccgagtcgggatcccgaccgaatcccgatcccgatgaatcccgaagatttttttcgggatcccgcgggattatcgggatttgctaaaacccaattttttttaaatggctttttaatttttagttttgtgctaagttttgttcaagtgcttatctaa

SEQ ID NO: 75067 - DNA, 400 bp, Heterodera glycines
atggagatttttcgaaaaattatcgtgacttcagtcccgcgggatcccgcgggattggtaaaatggtcaggagggatcccgattcgggatcctgatgaaatccttatcccgatcaattccgatgaatttaaaaaatcgctcgggatggatcccgaatttaatcccgcgggatcccgatcccgtccggtctctattttgcagacggaacagctgtggcttcctccataaattgcgttacaaacacagcaaaaagactccattgctaaatatatggaatttttcaaatttttcatgaacagattttctgtattttacatgaaaatttgaaaaattccataggtactaggtcgatcctaaaaaagtatcaatgataatgaataattatatttaataattctta

SEQ ID NO: 75068 - DNA, 560 bp, Heterodera glycines
atggcatatgaagcgctgacagataaagtgtcgcaggccttctgttggggcaaatggctgggtgaaaaatgcgtacactacggcaaagttttgctcggatttttggtcgaaaagcttttgacagcattggcagcatgcccgaaattagaaaaggtcgccaaaacaatcaccgacatttttggcattggcgaaaaagcgaatccaattgaagtcaaaaaaggaatgtctgtttgtgaagtggtgaagcagtacacgataatgcaagtcaagcaggagattcccaacgttgtgaatactgtttcccgtaagtttgtccaatttccccaggttgtcatcatattgcaaaaaggggctcaaatttaaatatgggcattaaatcttagaagattagtgcttagttcaaaacttaaaaaaaaatttttgatgaacaaaccgagagggtccgatggtgctgaaatttgagtgcatttgttaaaagattttatcaaaaaatgctcgaattttgcgattttgagcaaattctttaagaaaatttgacgtttttgcagggactgtcccag

SEQ ID NO: 75069 - DNA, 556 bp, Heterodera glycines
atggttgccgcacagctcgagttattccgcctcaatcgcatcccgccaataatgcttcacggtgtgtagtgaaagacccaagttccaaatgtgggggggggggggggggtgggagcggtgcattaattagtgtgtttggtatggtcattaaaatggtaatctgtgcacacactgatcggatcggactgttgggctccgtttatgtaaaaatatttcttatcgcggggattaatttattatttgatgcccacgtgttcatgccttctctatctctctccttccaggcgctctctaccagcgaatgtgccgaagaatccctgaaatccgtgccatgtgtgaaaaagcgggcgataagtgtttgtacgcatttattcaaattctcgaagcctgggccttttggaacaacaaaattgcctacgaaattgacaaaaaaattgcggagacacaaaaagaaggcaaatcggtgaagtgagttttaaaacaatttggtgattttattttttatactcgagttttggttttcacattttcgaaaatttgatttattatcattaaa

SEQ ID NO: 75070 - DNA, 499 bp, Heterodera glycines
atggcggcaccgatgagaatagtgccggtggacaacatgaacagcggcatcattgagaagaactcgcagtacagcaacggactgcagcagtgtgttcagtcattgcaggacgtggagctcaccccgccgtccctgcacatttcccacaaaaataacctcggcttctttctgagcaaaaaggccgacataacgtcgatcaccggaactaccggaaacactgatgagcaagacttttccggcaacactttcaatataatgaacatcactttgccacgcttcaaagaacgaaaatacacgaaagacgatgacaaactgtgtgaaagcgatgaagagtggttgaaaagcatcagagaaaaggtagaagaagcatcacaacccaccgaattcatcgcattaaaaatttggaactcaggtggagggaaattttcaaattgaatcatgtttatggattttgaccaagaaaggctaattataggttttcttagactaagtgaataaa

SEQ ID NO: 75071 - DNA, 571 bp, Heterodera glycines
gtcaattcggtacgtccgtcctccgagctgagcagcacgaatggtggtggttccgccgcaacaaatgcgggcggtgccatgaatggcaacggtttcatggcaccgtcgctaccgtatgccgtctccccccttctaccatcttccgttgtacagcaaccgtcggtagcagcagccgacccactcgctcaatcgccctgttgtgtacgaacatcggcaaatggtgaggagggggataaacagtgccgagatttgtacagcaactctctccatcgtttctacagtatgctgccgtaccgtatccatgggtccaatgccagggccggctcctcctgccacggcggcattctttctgcccactgctcacattccgtcgcccaccggcgaaaaaatgtcgccgccagcgcccacggcgccattggctgccgtcgctgcggcggcggtggcatcgaccgccgccgccggtgccacaacagtcgcagcgccattgatggcaccgccaacagcaacttcagtgcaattcgcggcacaactgccacaaccgcaacagcagcaacaacaacagcaaattagg

SEQ ID NO: 75072 - DNA, 446 bp, Heterodera glycines
atgtgtcggaatccgaagatcaacaacgacgagacatatgcaagaattttaacggtgagttttttcatgagggcgtcgtaaaagaaaagaaaatttcaaatttaagagaagttttaaaaaatttttctaaaaatgataggcctatggaaaattgcacaccatgcagccagcttatgccgcgcttttgtacattgtcgaaatccaacagtgcgagggatatggcgaagaattattcccttgcaaagtctgtgaacgttttgccaaacagaaaaaaaaaaaaatgccaacattcaaatttgaataggacggaagttcgctggaagaagtttcactgggctactcattggacttcatttttgtcagacgaccaaatgggacggaccaaaaattcaggcaaaaattttgaaaaaaaaaataattagttggacaaattaaaattaaataaa

SEQ ID NO: 75073 - DNA, 569 bp, Heterodera glycines
atgcgatgggtggagccggacaagccgatcagacgccaattggaacggtgggcatgccgacggggccaaaaatgggccgtcaatttggccattttgcacgcgtgcgcaaatgtgaggggaattattttaaatttaatttaaaatattttacaatgcaataattttaaaatttttcaaaaaatacagcccccccccccaatttaaagcccacccccctgaaataaagccacccttttgatgggatttgaaaaatagagcctctgaaataaagtcccccccccctcctttttgagagggttggaaaataaagccccccgggggctctattttagggaatacggtttataaaaatatttaattttctaatactataaacaaatttataatgttattttcaaatatttttcaggtgtttacgctgcatgacactgtttcgcgcagcatttattacactttgctaaaattggatgtgcttcagagcaacaaatttgccacgttggaattggacaaatgcattaatttgggtaatttgaatatttaattataatttttaattaaatttaaataaa

SEQ ID NO: 75074 - DNA, 244 bp, Heterodera glycines
atgcggagcattgggaacagcgcattgtcggcagcggtgacacaattggcactgatcggcagcagcaacgttgtcgcccgacggcatcaaacagaagtgcataatagggaatcagaaaaccgatcaggaagccgaacgcgagcaccaggggcagcggtgatcggagacggatggtcggaagccgaaaaatgccgcttttttctttgtttgtccgccggctttactattcaatgagataaataaa

SEQ ID NO: 75075 - DNA, 388 bp, Heterodera glycines
atgacgaatattttaatggacgatgaacaaaacggggctgaaaaatatcaagccaagactcggtcaaaagaccaaatttttcctggtaattcaatgtggactgcattatggaaattttcattgtttacaaaataaataaataattgttaaatttaatttcacggcacaaaatggaaaatttaaatttaaaaaaatataaaaatgttaattagtcggttgaagccattaatgatttactcgaattatagagaaaaattataattttgacagaatgacatggcattttccggcattaaatccgtcctaagtttttttaactatcgttttcggtaataataaatgaacaattttaggaataaaaacaaaatatattatctaattgaataaa

SEQ ID NO: 75076 - DNA, 699 bp, Heterodera glycines
atgaccgaacacaactttgagcagaatcgccggaccaattcatcaattgttcatgaaggaaatgtccaattcgacaacgaaaacaacggaattgaaatggatgaaaatgaaattagacgccttctgcttcaagtcaaggtgctacaagacggaaatgcagaattggcgagacacggcgaacaggacattggccgcagagaaaacggaaggccaatctctgatgaggcccaacgaccaccaattacgcgaagagcacagccatacgccgactcattgcatatgccaaatgaattccgagagaatgaccgatctcttcaccctgggctggtattcgatggcatgatggcacaggccattcgaagcctcgacggtttttcatacacgatgacactcaacgcaattccgaacctggacggcaacagaggttctgattcggtgaatgctttcttcaagcaatttgatgttgctacagaagagtggcccgaagataaacgattgcgagcgctacgctccaaatgttttggaaaggctgagagagctttcaattcagctgtggacgcaaaccgtcatgattatcagctcattaaaagagcgatcatccgacaactggacaacactgacgcaaaacaattgacgtcttttgaccaactgatgcgaggaattcggcgtcgaccgaacgagagtatcgatgagctgtga

SEQ ID NO: 75077 - DNA, 1403 bp, Heterodera glycines
  unsure (1)..(1403): unsure at all n locations
atggatagaaaagcttcaacatcgaaaaggaaggagcaaacgaagaaggcgcgcaacgaacaggagaaggtatgaacggtcagacagttttttttggtagcaggggagtttgtatctcattttttgcaaaaaaaaattttagaatttttttcgtttaaacgtcttgaaaacaagtaccaggcggttttctaggtcgctgatcacgaatatggcatccatttcgcccaattcagaatcacgtacccgaattcgaacaaaaagtcgaaagttcgagtttttcaaaattcgcattattactctaaaattgattaaaacaagctaaaataagtcacatatcattgaaacatccattttgttcagattataataaaacaattttcgaccttttgttcgaatttggtttggaggtttggaataactatattcgtgatcagcgacctcgaaaaccaccacaaaattgacactttctttaaaaaaaatttccctcgcgccaccggactccaaatttttttaaagattaatcttaaaattctttaatgaccaatattgcatttacaggaagcctctgactcggaagacactgactacgaaagcgacctcaacagcaatttgacctgtgtgcgcgatggcaaatttgaagaattgctagtccgcgttcgcaatgcactgaaaaagcggaaacagccaaaaattgacagtctgcgggtaagttaacaccaatttaatatctgatcaatgtaatatataaattattaatttttttcataaaagtatttaagcttttttgggggacccgagcatttcgacactcgttttcgccgactgtttttttgacactcattttttgtgttctttttgccgcccattttcggcgcacgggtaaaactatagatggtgggcacttttnnggaagaaaaagtcgttaaaacatgtgttcggggtttttctgggtcgttgatcacgaatttgaattcattttgaccaatttcaaatccttggtccgaatttgacaaaattcgaaaactcaaagtctatttttatgtttgtatctatacatatgactattttttgacattgcaatggttttgacaacatttagcttgttttgatcaacttaagaacaaaagtaaatttttaggatgtatgattaagcagaagtaagcgattagtaaattcaaaaaagtccgaaaatattttaaaaaatgtcttcgagaggatttgaatccgagaccccattttggtggcgatcatctaacagattattgcgacaaaaattaacaaagttaaatttggttaaagaaaagaatgatcaactacctcatttagcagcatcaaagttgtttgcaaaaactttattcgatttcaaatttttggtgttatttttttattgtgattggctcgca

SEQ ID NO: 75078 - DNA, 103 bp, Heterodera glycines
ttcttaactttttaatttttttatttcttgcggctagtatcttctacagtaatttgtcagtttggtcggatgtgcgtcaaatggaaaaaataattaaaatttt

SEQ ID NO: 75079 - DNA, 2136 bp, Heterodera glycines
agagcgggaccgggaccaaaacacggacaactgagtacaactgagtaccgaggtcccggttttgaccgggaccgggaccagtcccgggttttttcccggttttcccagccaaaaattcccggtttttcaccccgaaaaggtcccggttaagcccaaaattcccggtcccgctctactctaattacaccgaacatgtgttttagtaatgctggaaggtcccccttttttccattaacacatggaatcattgttaggaccagaagtccaaacaacgaatgaatttataatatttttgaatatcagttattattgttctgaagaaaggagagcggattgagccgataaggtgcggctgtatgagttgaccaaactcaggggataagaattcgaaaacggtaaaaatatacagagacaatattgtctatagaacagaaccaggaatctcagatttttgcaatgtctccgcatgcgcataagattttaaaaacttggatgatccaaataatagctttaattcgctcctgttggccctggcaaaggcttgttcttttttatactgatataaagtcgggtcctcaaaagttcaaaagtcgggtactcaagtgtcaaatcctcaaatgccgcaccacgctctctctctatctcccctctctttctctttcctgcaacaacctctattagaacagcccaaaattgataaattggcattttgaccacaaaaaccggaaaaatttccaaaaaaattattttttcgcaaaattttctcgagaatattgaataaatttaaatatctaaaaatgaataaattaatgtcaaagataagcaaaagctaaaatttcgcatttcgggttattttcgcttaaaattagtaaattttagctttatcgtgttttaacttggaagccctgcttaaaaacactcaattttttgaaattttaattgaaattttaattacatttagcaaacctgaagaaatttgagaattttaccacaatttggaaaaaatagccctattataacggagtccggacaatccgtcaatggacaattcgtcagcaaattttttgagcaatgattaaaaatcttgcgaaaatgattgttaaatttaataaatataatttcttatagattcttaacatttctaattaccgtatatgctctaattatagcccatgggggattatttttcaacctcctcagaatacagaggataattagagactgcgtgattaatagagactgtgggattatttttcgactgatatcattcgccgaagggcggcttcactgttcatagacactgacatcaaggtgagaaaactgctacctatactactaaatgaaaattttctctaggcatcagttggatggctgcagaaatttctcaagaggcataatttcgtgctgcgtatgaagacatcagtttgtcagaaaccgccgtccaactatgcagaagctgtggcaaaattcatcaattttgttgaacaaagacgaaaggcgaaaaacaattttcccggcggcatctttgcgatggacgagacggccgtttggttcgattgcccggacaaccgatgcatagacatgaaaggcgcaaaagatgtaataagtttttgaaaactatttagagctatttcctcaaattatgtgacagtggtggccaccggccatgaaaaaatgcgagtgacagtgtgcctaacagcccgcagcagacataagctcaagccctatgtgttgataaacagaaagcgaccggtgccgcaaattatcaaccaatttgctggaaaattggtgatcaatttcgatggctctgtgtggatgaacgatgacacaacggaggactacctgcacaaataatcggggcaaagctgttcgttggcgaacgcctcttggtttgggatgcgtttggcagccacaagagcgagagaacgacgaaggtggtgaaaggattgggagtggaaacggtttttgtccctggcggttgcatcaaattcatccaggtaccaaagcatccttctcaatgaaattcacttttcttccctaggctcccgatgtctttcacatggtacttgactggatccaccgatcgtggcaggaaatcgccaaagaagtgatcatcaaatcatttgagggtcagtt

SEQ ID NO: 75080 - DNA, 1487 bp, Heterodera glycines
atggaacaggcgctgacgaagcacattcggtcgctggctgacttctcggcacagcagcggacggacgcaggggtgccattttacctggaaaacccggcatttgccgggttttgggggtccttgccgggtttttgccgggtttttgaagttgccgggtttttgccgggtttttgggtttttttccggctttcctattttcaattcatttatttgaattttattaaacattttgccaaaattaagagccaaatatagttttcgttaatgttcaggtttattttattgatttttgatctcattttctagtctgcagaatgtcccaaaaatctatttctgatttcatttccaaagttacatttcaacaatcatcttcaactcaaatttccagcgctgaggaagcaatttcagatttagccgtttctgtctcgagtgatgaatttggggtgatttcaacaaattgactttttacatagcaaagttcagatcacctctccaaaaaggaagaaatattcgcacaaaaagcctggaggaggaatatcaaattatgaaattcaaggcagattccatccaaaaagcaacaaaggaaatgacaaatttttttgcaaagcctgtgatctaaattacaaaatacacaaaatgggcgaaaaaataatcacggaccacatcaaaaccaccaaacaccaaaaaaatttggctgaacttaacagaagcgtgcctttgaccgattttgtcaagcaaaaatcggtagttcattttgggactcagtaattaatctaattcaatataattaaggctacagaagagaaacgttgtctcgccgcagaattaacactgcctaccattgtgcgcgattttacgcggacgcacatgaatatttgggcaattggtcacagcaattctctgagacggatgaaattattggagattgggtcatttcgagtcagagccaacaagtgaaaaagttcgaaaggcgtataggcatttctgtggggcatcaactgacgaaatggatgctttgtttggtgagatcgctgagttgaaacaaacattgaaggagctcgagggcgaccggttcaacaggaaaaacgtggacgaaaaatgggcggctattttcaaaaattggcatgcctttgttaaactcgctaatttcaatcaaattcaatgcaaatatttcatgtcccaatgctcacaattactttctttcattgccaaatttgctcaaacaggtgaaaagcggtgataaatatgttgtttaattgtttttgacgttttttacagtgaaaaattggcttaaaaaactgccgggttttttgccgggtttttgaaaatttttgccggggttttcaactggttttcgagttttcgagatggcacccctgatcagcagcgaccgccaccactacaacgacaccaaacagtacaacctgtgctgggctcccggacaatcggacagtagacaatccgacagtaaattacactaaaagata

SEQ ID NO: 75081 - DNA, 3677 bp, Heterodera glycines
atgcgccgtgttacaactgagtacaacattttgtccggcgcttcttttgacaccttggctcatctcggcaaaataagtgaaaaagcaaaaaatttcctaaagctcacaggaccagctggcagcattcttgctgcttttgctgagacggttttcccggtgagaaaattaattaaatcaaaaataaatttatagtgattaaattaactttacttattgatggtatttacatttaaatttgaagttggaaaatgaatttgattttgatttttttagcccgaacaccctgttctgaagtctcttgcatttttacatcagcacattgacagaaaattcgaagctcaaggcagattcattgagggagcattgagttcactaagatctgcccaagacttgaatcattacgacacagtatttgtttcaaattacgtaccgtaacccattgagcaaaaaagtgacactttaacaggttgtcaatgtcccgctagcccgcttgaccaaaatatttaaaaaagtgattaatcccgcgaaaacaaaaacgcacaaagaacaatttgtcgcggcgtgtacccgttggcagtttacgccgttggatattttggaagtaaattcatacaaaaaacaaaacaattaattttggtttttaatttaactaagtcagaaataaacataaattgaaaagtttgaagaataattgagaaataatttgccaaactttcagttcatcaatacgaaagtcaacatcaattgcaaaaagcaaaaaacgagagaaatgctgccaatcatcagcgaagtgaagtccgtcttcgatgaggtgttcgtcattatcaatgatcaaaaatatgcaacatcatatgaaaatttttttacaacatacataggtacgtaatatttggatgagtgataatttaatagttttcttaaaataacaaacgaaaaatattttaaaattttttttatggtataatgaaatcggatactgatttcaaaattattcaattttaatgtatttttcaagtatttttacattttagtggtgctcgaaagttttgagagtttatctttgggtcaagcaaatgaaactctagcagacctccgcgaatgtaagcctaaataaatttagaataaaattattttcattttatatgcaaattatttgtaacttgttttaaataatttcattttagtgttcacaaaaaaggacggacctgatttcgatttggatgaattgatcagatcaattttcgccgttgtccctggaccgttttctgacgtgtaattattaacaatataaatttcctttgaaatttaaaaactatttaattgtcactttttgcagttgccttcttcgaagcgtttacgagagttatgccgcaaaaaggaacgaattgctgcgtttgtccgagtcagtcacaatagacgtcattgaaactgtaagaaaacggaaaatttgattgttaggttaacggtttgcattaaaaatgtcagttttgttgatctttggttgaattccataatttacagtagcttgcggaaaagtatttgagaaaaacggtttaaaatgtttttttatatttcgtttcattaaatttagaatgggtaatggtaatttgcagaaaaatgtttgaaatttaaatttaggcaaaatttgcgagactgtcattgggccaagggctaaacgaaatttcgttttgtctcacctttttggcacttttttgtttcgttttcgtttacgaaattttttttaaagttttcgtacagccctgattgagccatagtgtttttacaatttggaacactttctaaaaattttgaagtaaattataaaaagccacctaaacatttcaaacataaatgcatcaaattttgggcttttataatatgtaaaacccattcttcaggcattgattggaggcttttgtgccaatttgagtttctctggtgcggcagaacaagttaaagagcagcttgatgaacttggctcatatgtacgagacatcactggcaatatgtcacagtggattggtaaagaattagtaagtcttatttattgaatttaataaaattattaatagttttaaatatatttgattttaaatttctggtaaatctttcaaaatctttaattttccttgtttccaaacagaaactaccaaaaaattttttttttttgtcttagtcctcaaagtaattaaaatgagaatttatttaaaaattataaaaatttcatatctttttctggcgtttcatttttaccatttaacaaaatttttcgtttcttccgcagagtgacgcgtggccagaagaagtcataaggaatatcaaacgtgaaattaccaaagacattactgacccgtacgcctacaacacgactgcaaatcgcatcaacaatgaagttttgtcaagaggaccactagggtaatttcatatgaatgcaatttataaacaaaaaagttacttttaataaaaaaataagtcaatcctggagaatggggttttctaattttacttttttggtttgggcttaaaatcagtttccagtggttttcgatggtgctgattacgaatctgacttggaattgcccaattccgaaccccgcacacaaattcgaacctaaatggattttttcaaaatacgcgttaatagaccaaattttcgcgcaaactgcgtttttttaacaattgttttgcatcaaataaatagatgcttaatgcatttgaagtttttccgcacattaaaaatttttttgttcgaattatggtccggtgttcgaaattgggcaaaccagagttcagatttgtgatccgtttctggttctggattttggagtttgtatcatgaattccaaataatgatcatgtgttggggcgaagaatcccgaattgcatagtcaaaattttttgtcgctaaaattacctgataggtaacttttcttttttaagaatcaatgaatcgggcagattttctcatcataatattcattttgttaagatgcgtgtcccaagttcttgttacgcaaaactgggattacatctccaatttttggtttcgttgtccatctgcctattgcgcatatttaaagcattttaatttgattaactttgtgatattacgccacagaacaggtgcccaggcaagggcagcaattgccctcgaatggtttggttcgaaaaaaaaatgcgatcgaatctgttatacggtgaaaatcgttattttaacaatcaaattggcaattttgtagaaaaaggcaaaaattatttatttatttattgcaggcaaaatgacaaactgtttgaccttggtacgatgatcgcaacaattgagcagcaaacgggcgacttaaccgaacattcacgattccgcagttttgtgatcctccacataagcacttggacctcaaaagcctgtgtaatcccaattggattatctacgaatcaatttttaaattattccggctttggatatgttgagatgtatgcacaccatttattcaccacaaatgatgaattgtataagttgttcctgtttctgtaatttccttgaaacgcatttgtatgtcaaaaaccattatttctggataaagtaacaaaactaaaattcctacccctattaatatagtcttaaaattaactctgttatattcttattttttgcgacaattttgttttgtatgaataaa

SEQ ID NO: 75082 - DNA, 1164 bp, Heterodera glycines
atgtggaggaaggaattggatgcggaagcggaggagggggcgaagtgggaggaggagaaggaagaggagaagccgtgggatgtgatcgacttaccgatctttggaaagttggaggtgggcacaatgcgataggaggaaagcaccagaaaacgaatcggatcgtggttagaccagggaagcacatttggccgagctttaccatcggaccaagaatcgggcgggagtttgtgatggatggcccgggaaagggaacccggtcaaaaggagctctgatcacgaatttgtgactcacttttttgattattagggggtcgattcatatggattttgcatatttttgcacattttgaaaatgttttggttcttaaagatccataatagccatttggggagtcataatcaccgcaaatcggttgtcctcccggttaaaaaagtgatgtgaaaagcaacataaaccatcaaattttatggaatgctcccattaacaatttgaccatcatctctctcaaacccccggaccctttcgaaaaatctgttgacccaccactcccttttcatgtatgccgccatcccacaaaaaatttatggtgtttatatttagtttgttgataacttttttatttaatttaaattttttcgaaatttccataattaccgcatttttgcacgggatcccgcaaatttgaaatggggtttgtcaaatacctaaacaccaattttaataagattcagcgcaaaaaatatattaaacgtttggcctttctctagtcgcagacaaccccaatatttatgctaaaaactgtataaaatgacttttgctggtaatccactaaatgtgacttaaatttcagatttggattaatgatcgcgcatccaataaaatgctgcaaaagtgtctgatcagtgccatcgataatttgatcaaaacattggaaatcccattcgttgcgatcaaacaattcgccttccgcgtccgagtttatggcgatgcgtattttgacaacacatacaccgcaagtctgaagatgtgcagcatcaaaacattcaatgagcttaacctctaaattttaaataaggaaaacactttgttatcattttcatattgatttttatttattttaaattaatgaaaagaataattttatcgtctgtatcataaataaa

SEQ ID NO: 75083 - DNA, 1167 bp, Heterodera glycines
atggacgaagtaagtaatttattttttcgcaaaactatttagcgaatttatatgagaaattaatagaattttgcgtcgtacgtactttgacaaccccctcatcaaaaaattgctctaaaatgaaaggaatgacgtatccataatttgcgccccctaaaatccctggacatggcattttacacgacacttaaaaatcattttatcgtttgaaaaactgcgaggagataaagcacagtattaccaaattttgtttcaggaatcttctacaccaccactggaaacagataatggacagtgcgaaatgtgtgcaaattatgaagtgtgtactgcttcatctgcgccttcaatgaataacatttttttggttgctttttaggtgtctcttcaaacattgcaaaccgcgcaagacacactccgggtaaacaaattagtgttttgtcaattctcatgagataaacttttatttagaactaacaattgatatcatgaatatgaatggggtttttagtggcaaaaaattacaaataattaacaaaaatttgaagaatttctaagtgattatgtaattttacgtttttttcaggaacaattggcagcagcaaaaggtttttgctattcgtttaatagttccccttttcaaatgtttctaaatttccccccccccccccgtagaattgtacgaaaaatatgggaaggaattgtcggaagagcggctctatcgtaaagaattggaaggccgttttgctgcacttaacgatgaaattgaacagaaaattcaggcaaacttgtgctttttaaaaaatatttttatttgttgttttttttgtcacagatttttatggacagtgtgaatcggtcagaagaacgggttgcattgttggccaagaaacaggagaccgacttggccgacatgggccacgaattggacgtggccaaggagcagcaaacagcactgcagacggagttgaagacgctctacgaaaagtgggacaaaaattttaaaaaatgcggacaaaatttgtgtcataaaaaacccactcttttaggtatcaacgaatgttgcacaaaaatgcacaaaaggcggacgaaatgcgtgaacagtgcattgatttgccccaaactgttgacgaactgacactgttggcactgcaattgcgcgaagatttg

SEQ ID NO: 75084 - DNA, 571 bp, Heterodera glycines
ggttccgctagttccgccacccaatcgcaagcggcgccaccgaagaagctgactgctgaagagttggaggaacggcgacgcgccatgttgacaaatgcctcatggcgagacgatatgcgtgagcggaatctgcgcgatgcggccgacaaattgagaaaggaacaggacgagatggccaataaccgaggtggcgccggatttatgcggttggttgaccggcacactgactatataccagggaatgggagataatcgccaaaaaagtcgcaaatgattcgtgatgttgcccgccgatgttcaatcctaatttaattgtatagttaaaaaaatattgtaaatctatacaatttggagcatttccagattttttgtcgggaaatttttgcgttacaattttataaattgcatctggcaaaaaaaatatttagtgaatatgtattcattttgtttattaagtccaatgatgaacaccgcaactgaagacgcgtccattgagaaacgcttacaaagcaatcggatgaacattcaacgccaacatgatcacatggacaagtcattcgtcagaaaatga

SEQ ID NO: 75085 - DNA, 1063 bp, Heterodera glycines
atttttatggacaatgtgaatcggtcagaagaacgggttgcattgttggccaagaaacaggagaccgacttggccgacatgggccacgaattggacgtggccatggagcagcaaacagcactgcagaccgagttgaagacgctctacgaaaagtgggacaaaaatttttaaaaatgcggacaaaatttgtgtcataaaaaacccactcttttaggtatcaacgaatgttgcacaaaaatgcacaaaaggcggacgaaatgcgtgaacagtgcattgatttgccccaaactgttgacgaactgacactgttggcactgcaattgcgcgaagatttggtgagtgagtgtatgtattaaaaattctcattctatgcatgcccttcagatcagcgagaaagcgagtcgagaacacgagtgccaagagttgcgtgacgagttgaccgttgcccgtgaacaaatgcttgaaagtgaacagcagttgctcatctacgcccagcatgcacaacagcagcaagaccacatggagcagttgctgcaccaacaccgaatcagcgtgggcgaggagggcggcggcgccgccggtggtgaaactggtggaaacagtggtggcagccgaagacaacgagcaggaggacaaccggacatggtcatcatttcttttggacaaaagactgacattgggcacatttttaaccaaccatgcaactcaagcccctctttcgagaatgggcaaattccctcttttgaggccctttaaacaaaatttcgagaaaatttctaaatttaaaattctaattttgtttagcatccatcaaacgctgttgtccgttctccgcgagagcagcgacgacagcaacaacaacaaactccaacagttgtggaagttggcgatgccgactgctgttgtccggatgcgaaatgccacgaacagactgttgagcttgaacgtcgactgcaccggtcgatgaatgaacgggcgcaactgcaggaactgttgattgaacagcggaacaaatgcagccaaatgcagtccgagttggacacttcggaagcagtacagaaag

SEQ ID NO: 75086 - DNA, 532 bp, Heterodera glycines
atgacgaaccaccacccctctgacccctctaagattttacctggagaaaatcctgcaaatgctagcaatttgttgagaaaaattaatacaattcaacaaaaatgctccaaatttttcattagcataggcttgcttgggcctaggtaaattttcgtttaaatatttaatatggagagagaaatgcatgcggatattttatttaacgagtcatttaattgtttcatttgttgagaaattttgtataaattcaaaaaatgcttcagcaatacctgaagatggcggatttacgcacttgaaaaatcacagaaaaaacgcattttaaattttggggctttctcctttcaataaaattgctccatattttatttcatccatttttttgtttcagcaaaaaattgacagcggcgagttggccaagccggaacagacgcagttggacaaattggcacgacggggcgagttggagcgtgacattgagcagctgaacgaacagttggccaaattatgacgacgacgacaaaaaaaaaacaaa

SEQ ID NO: 75087 - DNA, 2172 bp, Heterodera glycines
atggctaatttcttcatcattccccgtcgaaaaacaattcaacttttattgtttattattttatttaaaataacgcttcaacaaggtgatttaattttttgtttttggcattatcatttttatcatatgacattctgtaaaattctttacaaataaaacaccaaattttttgcttaaactttgacgaaatttttaaaaataattttattgaaaataaaaaaaatccaaagaaaactaaagaaaaaaataaaatggtttttttaaagacaaattttcttttatttcaaaagtttatttgatttctattttagactcgctcattgaaactaaacaattggttgaccaagcaaaaagtttgtttaaccaagtaaacgagggaaaatttgatgccgattcgtccattgaatggatacagaaaaatgcgattggcattttgtctaatagcgaatttgaatcaaaaatggatgaaagtttgaaaaaattgcaaaatgaattctgtgattcattggaaaatggcaattatcaaaaaatgatgaaaatatttcaaacgacaaaaattgagaaaaaaacatttgacaaaaggcaaatggacaaagccatagcaaaagatcaaattaacaagggcaaaaacaagcaaatgtttaaacaactatttaacaattctagcaagattcttgaaattcatgaagatttaattgaaggtaaataataattaaaattttaaatataaaaaaaatccaatttatcgtactcaattgtttcgtaaatcaaaattcgttgaatatttggcacaaagtgtcaattataagttaaaattgaaaaattcaaatattacgcttaggtaaaatggctaaaaaattcaaagatgttcaaattttttgttttcagcagaaaggcttgccgtgcgccaacaacaaatgccaaacggttttatgggcagaagaaaaaagcgtgcccgcgacagtgcaattaagggctgtgtcactgcagtgcttttaacattaatctctgctccatatttgggttattattctaacaaatatgccaacgagggcaatgtcatggttcaagtcaatagatgtaaaaagaggtttaatgtccgacattgttaccaagtccagcagtcggttgtcacgcagatttttgagtggacaattctattagccattggactaatctgtgcactgatattttgttcttgtgtccgttgatcatctaattattgtatgattacaattacggtacatatgactttggcaattggtttttgttttttttttgctaaatttttatggctataagtttttttacaaaaattttaaacatcaaaaagatatgatcaaaattatatttagacttttcattttcagattttttttcatagcgaaaaacaaaagtttatataatttacaaaatttcattttccgaattgaaacatttgtttaaggatttctctattctgtgcttcttctttatcaatctccatttatcacaggcttttatcttttccctcttttatctgaaatcctttttattttcattaaaaaattcggtggttactcgtcaataatagggttgctccccgacccctctgggggcaaaatgtcgggggccgggaaccttcggggggcacaagtcgggggtcggggacctcgatcgagtagtgatcaacaaaattttttaacgaaaaaactaatttttctttttaaatgctcgtaaatcttcccttttttctctttaattttctgattcaaattcattcgttcgcgccattaaaagtgcgtccgatttggcattttataataaggcatcctaggcaggggtgggcgaagctcggcttagtactcgaagccgaagctcgaatcgaagcccaacttttttcgaagcacgaagctcgaagttcgaagcccaaaaaacgcgaagttttcgaagctctaagcacgaagtttttgaaaaaatgattttaccctaacaaaactttttttcaaaaaattttcgtgttcactaaaaattaattaaactataatttaaaaaattataatttatgcttttcctaataatttttcattttttgattttgattatggctaccaactgaaaattttcaaaatcatcatttggccggtaaaaaatcagcattttggtaaattttattccaggtttaaaaactca

SEQ ID NO: 75088 - DNA, 1033 bp, Heterodera glycines
  unsure (1)..(1033): unsure at all n locations
atggctggagaaggaagaatgagaaagaagattgattatgatgtaaagaaagatggcaaagaatttgatcaatgccaaaatgcattaaaaataccaaaaaaatatatatatttatttttgtatcgtaattttgtaaaaagattatatttatcatttttgaaagataataataatgtcatgatggtttatccctcaaaagagtctcagacttcggtctcaaacctaaatcgaacaaaggtgcgaagacctttttattttttgctcttcagtctcttcttttttcgccaggattttccaaaattttcggaagggtagggttaagcgcaccggaaaaattatcgaatttatggccgacttttaacaaatttttaaaagttgcgatttttgagtctaattttgaaatttttgataaattttttagaattggtatattttttcaaaaaatttttcccatttttattttgaaaattaaaggtcatcatcattaggaaacgtattcttaggttttatttattttttcttcggcttaattcaatgagaaaaaaacgaataatacatatttagcgcgaaaattcttccctttaaagccctatctgtccctaggaatccctattttggcactttggaattccgcccctattacggcatttttcaaaaaatttcctaccaaaaatgcaataaaaatgcatccataaggaccggttatggccaaaagaattcaaaaaaccagattttccaacttttttggcaataaatttgttcaaaattgacgaaattttttggatttttgcaggttaatagagcatctgagggctctcgaatgataccaaaattgttagatttgactgacaaagaaaaaagttatgggtgccggggcccaactgaggtgtaccgttctaaaaccctttttgaagggatcgactcatttccttaccaccgtttccttaccaccgtttccttaccaccgtttccttaccaaacgtttccttaccaaccgtttccttaccaccatttcctttacacgtttccttan

SEQ ID NO: 75089 - DNA, 136 bp, Heterodera glycines
ctaattctcttgttcattcttctaatcctcctcaatcccttccgtcccactcatccgatctcatcaatggccaccactgtcgcctcaatcgttctccaactgctcatccttggcacggttgtccatctgtcgtacg

SEQ ID NO: 75090 - DNA, 1649 bp, Heterodera glycines
atgtcttggcattcttttgttcaacttgttataattatggcatttaccttggatggggtattttaccagagaggggcactgtattgttcaacccctcaaatctcggaaattttttttgcgagtcaaaaaggggtgaaaaccatttttctaaccggttttatagtgcagagcatgaatatgagtattattttacgttttacaaatttttgaatttttaaaaaatttcgaaaatttttcattttggccctcgggaatttggactcgtatttgaaaattcataactcatttcaaagtggatcaatttaagtacaataaagctttaaaaatagagaaaaataaggagaattttatgaatttattttaaatttctatcatcaaaatgaaaaattttttccagaaattctggaaaaattcgaattttcagacaaaaaatcagaactcggttcttaaaggatgttttcgaaaattaatatactcaaaaaacccgcaattttttgctctatagaactgtatttatttcatatttctactatttttttggaaaagattagaaaaataaaattgatttgggaatttgggaccaaaggggggaccacatggtttctgagtgggaaaaattttttcacccaaatttagctgaaaaatactttttagaggtattttagggtgttgataacgaatctgtaatcagatttcgctttcggcatcgacaaagccccagaatccctgcggatatactcgatccctcctggaggggggcattttattggagaggggcattctaccagagaggggcattgtattgttggatttccgaaatagggcatttaattggagggggcattctaccagagaggggcattcaaatagcggatttacggtatgtctggattatatttaaaatatttatttgtttaacattgtttttacatacaaaattcgttttttaatgtccaattggttaaaattatttcacaattttatacccattaccataaatcatcatttatttaaattatttttataaattcgttttgttaatttattcgctttttctttttcattttttgctgccatttccgtttatcgttgggaaagaacagttaattttttacgttttcactgcttttgatggacaaattatgtggttggatgatgaatgaatcatcattaacagcagaaaaactgtgaaaacagaaaaacgatgctaacaaaatgagcagcgaatgggcggaagtgtacaaaaattggtggaaaaatggacaaaatgggcaaaatgaatgaatgattcaccacttttggcacaatgctaaagccaatttctgctgctgggcaattggggcggaccttcggctaacggacggacgaacgaacgatgggcggacggattgtcggcgttagcagcgaaaactccgcccccaaaatggccgcataaatagccgttgatgggcccccagaaatcagttccaagcaatcattttgcagaccacgtaccataaactactcgacatttagtaaaattatgaccagaaaagccgagactgggcttggatttttcgtagcgcctggagttcccggcccagtcccaacactaactcttgagtaaatctaaaaagactttttggaaaacagaaaatttttgaaataaa

SEQ ID NO: 75091 - DNA, 788 bp, Heterodera glycines
atgggttggaagttagtgtctctttttctttgtattgccatcattggaatagtaacaggctattatcctccgccaacaacaacgggttaaaaatttatcagaaagataaaatgtaaaagaaaatttagcatgtcctccggtaacttgtccatgtggatgcaaagaatgttacacgacaacaccatatgaagtgccaggaacaggatcaacatcgacgccaggaccggaatcaagcacatcaacaccatctgaggagccagaaactccgagcagtgaaacgcccggaccgcctggacccagcactgaaacgcccggaccgcctggacccagcactgaaacacccggacccgaatcaagcacatcaacaccatctgagggaccaggaactccgagcactgaaacgcccggaccgcctggacccagcactgaaacacctggaccgcctgaacccagcactgaaacacccggaccgcctggacccagcactgaaacgcccggaccgccaggacccagcactgaaacgcccggaccgccaggacccagcactgaaacacccggaccgcctggacccagcactgaaacacccggaccgcctggacccagcactgaaacacccggaccgcctggacccagcactgaaacgcccggaccgcctggacccagcactgaaacgcccggaccgcctggacccagcactgaaacacccggaccgcctggacccagcactgaaacacccggaccgcctggacccagcactgaaacgcccggaccgcctggacccagcactg

SEQ ID NO: 75092 - DNA, 1687 bp, Heterodera glycines; identical to SEQ ID NO: 11641
  unsure (1)..(1687): unsure at all n locations

SEQ ID NO: 75093 - DNA, 417 bp, Heterodera glycines
gatgcccagcgattgtggcgcgccggtgaggcacgcctcggcaccgacgaaatcgccttcaactctattttggcggtgcagaactttgcgcagcttcgcatggtgttttttgtcttggtttgtttttgacgcccgttgttttgaaggtctttgacgaataccaacgacagcatggccattccattgaacaggcaattagcaacgagtttaggtgagttcaaattgagcggttcacttgttatcatctacgagttttttgggattttattttggtaaattttattttcctttttaagcggtgacattcgtgatgccaatttggctttggtgaagagtattcgcaaccgtgcctcatatttcgctgagcttctccacaattcgatgaaggcacttattaattttcaattgttactttaa

SEQ ID NO: 75094 - DNA, 1818 bp, Heterodera glycines
aaggcgatgatggcattggcattttggagttgcatcatttgctggacattggccaaccgttgggcatcgttttggccacttggccaaatcagtcgttatctcgcgcgccgactgacattggcatgcaggcggcgatgcgcagcctaaggcgcatggaaagggaaacactgctgctgatcagtagtggcataggcggaatggcaccgatcggaagcggcagaaggcggagaaaggtcaaaagtgagtagagggggagagaaagagagggagaaagagtgcgcgagagagagagagaggtatagagagaaacagagagagagagagaaataaagaaatagagagagagagagatgagaggagggaatgaccagcagaaaaatgagaaaagcatcaatggcaaagtagtgtgtttgttatcaacggagccaatcagacaatgagagagtgcccttttgccagaattgagggccgccgcccctcaggggcggaacattatggtgctggaggcgacaagcccaaacgccaccaacgggggccgctgcatcatcagcgcggaccaagcggtgcacttctgcggatttgaggaggaaggttgggaacagagtgttctttgctctttgttcgtgccgtgccgtgacttgcgctttttttaaattttgttgtgccatcgaccaacacatcactgatccttttgttttggtgtctttggtgtcattattgatcagttaggctttttcttcccgatgactcatcaacgaaaatctcgagcagtaattagcaaaatgaatgagaaatatatgatggaagtaagcaaaacagctatggtattcgggacataaaatttttattaataagtttgacattgcactttcctaatttggccttttccatcgagtggtaattaattagcagttaattgtccttcccacaatccgtgataattttcaatatatgtttggatgtttttgctgtgaattttaatcacattgacattaaacagaagcaggatcaaattgtgcctaatttcagttaatgagccgccaattccgccgcctttcgacggaatttgcatgcaaagtgcgcgaagcgggcgagtgatctgttacccgaaatacgaagttggtggccttgatcagacaaactgatcagtgtattgccttgggcatatcctttatcattgatctcatctgactcggtctaaaaatttaatcaaatttcgggacttggacaccacttgtacggacgcagcttcgatcaacgaacgctcgggacttgtggcaccgccggtgattgcgcatgccaagtgatcggaagagaaatattttttgatcgcattgatcatcactttcagtgttcgaacgatggcatttgtgccgcccgataatttgcagagattgattcgacattactaccgaagatacggaaaaaaagcgtacccaaaaaacgagacggacaaaatcgccatgtaataataattaattcaattaatcgagactattcaaaaagcattctatttttgtcctaacaaaattttgagtagttgactcaaaattctacggtattccattttcggaaattatcaacttaattaatcaccagaaaataattttgaatcgaacttctcggtgaagaacacggccctttctgttcgtgaagtacggctgcgacgcgggctacgaaatggtggacgaggcggacacaatgttttgccgcaagggccaatgggtgcaaacggcacccatctgccggggccaaggcctttgcgaaatggacaacggcggctgctcccactcgtgcatttcattctcacacaatgca

SEQ ID NO: 75095 - DNA, 1388 bp, Heterodera glycines; identical to SEQ ID NO: 11644
  unsure (1)..(1388): unsure at all n locations

SEQ ID NO: 75096 - DNA, 1240 bp, Heterodera glycines
gctggccccacgagaatgtcagtgagccgcatcggctgcacacactgcgcggtctgtcccccgacacaacttacaccgtccgaatccgtgcccacgactcgatgggtcccggcaaactgtccaacccggtgtccgtccatacgcttccgcccgccaaacggccgcttctcgcaattccggaaggcaatgagttgcgcgtgccgccaaaagtgccatttgccatcaactgcaacctgagcaggggtgacccaatcccacaggtgggaatttgtggaggcgaggagggaaagaaataagaggcacataggacaaaagacacaaaatattgggggggggggacaaagtatcaaactgaaaaagacaaatgactcaaataatgtgtcacttgtccagatgcattgggagtccaacggacggccaattcgacctgcgcaagacagcaaacacattgcattgcaacacattgggctgttggtgagtagggcagccaatatgcaaaagcggacaattgatcaaataatggacaattgatcaaataatggaaaattgatcaactaatgacaattggactgaaattaactggcaaattgacgattccctttttagtcattttgattttttgtgtttagatgacaacagagtttcaatgtgtggcagagaatgaggcgggacgaacggtgcaaaaagtgttggttacggtcagtgagttactgtattgtatttgtgtaccatacgtaatatttgcgtttatttgaccaatgagtgcacagaaaatgtgtcatttttgtgcaggtgacaggcccatcccaacctgagcaaattcgttaccacgtggacggaataacggtcattttgcaatgggacgagccaaagtaagagcaaaaaaaaaaaatcccgaggtttggggtggggtcgagacgactcgagactctaattctcgaccgatctcggggaaaattttgtcgaaaaccgcaagattgccattaataaaggggctattgtcgggattttgactatactcggggcttcgagctaagagaggttacaaataagctgttatcttcctagtccataagaagtggtgatctgttcaatcactctcgagtgttttctccgcgtgatctcgaccaacccttttcccactccgtgtgctgattagcagcttttcgtatttgcacttaacgttttgttaaggatcaccaacggtccgatggccgactacgaagtgttttacactgat

SEQ ID NO: 75097 - DNA, 715 bp, Heterodera glycines
atgaacaccaatttggagttgtctatatggtcaaacaaaactgaggatgatcagcgaatttgggatgttttggcctgtcaaatttggccaatttttgcgaaaagcattcgtcattttggctttcacgatggcgattatttggacaaattgcgtcgccgcatttcaccgacacttctcactgatcttgatcaattgatttcaatcgattctggacttctattacccgatggaattgctgatgataggccaaatgcaactgctggccaagcgttgtccaaatggttgcacactccgagcaaaaatggccaaccgaagcaattgcatcgcaataattattttggtccaccaaagctggaatgggtcaacaacttcaaagaggtgtgtctcgccagaatttccgtcaaattatttttgtgtttaccaattttttatttagacatttcgccatgccaccacttctgtcacttacaaaatttgttttggtgttttcttgtcgctaatcgagccatttgaattggtgaacgaacggaccaaagagaagctgacactgacgaagggtggagatggcactggtgaattcaattggctgttggagagatgcccaattattggggagacggcggcggcggttcagaaacagcagcagaagaaggacggaaattcggatgccaatttgaacaaagtgttcttccgtctttacgatgacattgggtga

SEQ ID NO: 75098 - DNA, 671 bp, Heterodera glycines
  unsure (1)..(671): unsure at all n locations
tacacaccgtccgaaaaaacgagatgtgtaccaataaatagagagtgccagagaaaaacattatctttttttctctaattttttgtctccttttggcgtactatctaatatttctattattaggaataacaacattcacttcgctctatagaactttttttccgccttacagaatttttccctagactaaagacaataccgagtggcttccacaccgattggcagtgtgatttatgcatatttgatcaattgaaaaaacataacgacggttacaagtatttattggtctgcatcgacgtgctgagtcgaatgatctttagtgcaccagccaagtcaaagaagagtgaggacatgatcgaggcttttgatcgggttttcgaaaagtcgaaaattatcccgatgaagatatatagtgacagtgggcttgaattccaagcaggaaaaatgaaaaaatattttgaggaaaaatttattatcaaaaatgtgatgtatagccccgatcttcacgccggagtcgttgaaagggcaaatcggacaataaaggagcgtttgtacagatattttacaaagaaagacactctacgatgngtcgatgtaatagacaanataacaacaaacattaacaacagtgtanataggacactgngggtcaagccgtcttcaattacttt

SEQ ID NO: 75099 - DNA, 378 bp, Heterodera glycines
atgacggacacagcgctggtgacttccgtggaggatggcctggcaggaattgtgcgccaatttgcaagcgtcattttgtcctcaaaagtgcgcgccgttctcgttgtgcttggccgtgacgcactgctctcaggggagacgatggacacaatcaccgaatatgtcaaacgcatcaaaggactgtgccttcgttaccaagacattcaaattgtatgggccatcccgccatatgtccacacccaaaaagtggcatatgatcagtttttggaggcacttttgacattgactgaaaattgtcccattcaaatggcctttgtgacgcgaaaaggacgttcattggccgaaattttccgttacggcggtactcacaatggataa

SEQ ID NO: 75100 - DNA, 219 bp, Heterodera glycines
atgccgaaaatgaggtgcctgggcgttctgagtcgcgccctgggagttcaaccggccgccgttctttcatggccaatcatcaccgccgtaatgatgctgggtgcaaccgccacgaccggattccgatccgcgatcgagtttcggcgtctaggcgacgcccggaattcggaaattcgcgttcgaatatcgccgttagcactcaccgccaccgatacctga

SEQ ID NO: 75101 - DNA, 1427 bp, Heterodera glycines
atggagtacgacgaaagcattgtcgacgacggagcggtgtcactcgtcggtgaagctgacgaaaacgaattgttgggcgtcagcgacgcacaccatgagcagaatgagcgggatttggcaggtttttaccattttccacggaacacaaatatgcaacagagcctagtcaggcagaaaagaactgtgggagacgaaaatagtggtcggcatgttaaccgcatgccaattttggaaaatttggaagcattcggtggccatgattttgagtactcttttcaacgccaccatagagaacaacagtccagacagagaccgaattttgaaggggactcaagggcttacccccctcctcctccttggtatgggtcctacccatggatgccaccgccatggttcaacgctgaaaaagcaccacccaaccaatgccaaaaccaaagggaagccaccgaaatgcaacaaagcgcttcccattcgacttataatcgactcgaagcaattcttatcttggataagctgcccgacatcaacggaagagagggctcggaccgaattcgagcattctttcgaaaattcgaaattggcaccgaaggctggaccaacgcagaaaaattaaaagcgttacaactaaaagtcacgggaaaggcggaaaggtctttgaatgccgcagtcgattttgagcgcactgcgtccaaaatagggatgcgtgaagtgaaattcgacctgattaaaaaggaaatgctacaaacgctggacgagttggatgcgcgcgagacctcagcttttgatgagctattcactggactgcaaagaaggtcgaacgagtcaattgaccaattggccgaccgcgttgggcgaacagttcaaagagcctatccaaatttgaactcaagagacatcgacgaattgtcgattaaacactttacgggccttagacagccatgagttggcattaacattggaagtgtctcgcagtccgtcgatgagctatgaccaatttgtgactttggcatcgcgagccgagtcaacaaaacgagcagtgcaaaaatcgatatcaaggcagcgccagtatgacaatcagaatgtgaaccgtagttcggttagcgcccattttccgcaaagtcgagcatctgttacgtgtttcaattgtgggaaagccggccacatttcaacattctgtactgaaccgagacagaataatcctttttcacgcgatgcgcgtaatcgagaccattttaatgcaggaatgcagacaaattcaaggacagcaaatgaaaaccgtgacagttggcaaaaccgtcagaattttccaccgagaacgggtggaaaccaacagccattaatgcatcaaactttcaaacgttcaccgaatcaatttggtggtaccaatgcagcaaattgcattcaaattgaggaaattccggcggaga

SEQ ID NO: 75102 - DNA, 531 bp, Heterodera glycines
gaccttctttgcagtccagtgaatagctcatcaaaagctgaggtctcgcgcgcatccaactcgtccagcgtttgtagcatttcctttttaatcaggtcgaatttcacttcacgcatccctattttggacgcagtgcgctcaaaatcgactgcggcattcaaagacctttccgcctttcccgtgacttttagttgtaacgcttttaatttttctgcgttggtccagccttcggtgccaatttcgaattttcgaaagaatgctcgaattcggtccgagccctctcttccgttgatgtcgggcagcttatccaagataagaattgcttcgagtcgattataagtcgaatgggaagcgctttgttgcatttcggtggcttccctttggttttggcattggttgggtggtgctttttcagcgttgaaccatggcggtggcatccatgggtaggacccataccaaggaggaggaggggggtaagcccttgagtccccttcaaaattcggtctctgtctggactgttgttctctatgg

SEQ ID NO: 75103 - DNA, 1938 bp, Heterodera glycines
ttccgttgcccttttttggcttttgtctttctctttttcggcggatgggctcagttttctcttttttctcatcggcaccaatcagttcgaacgtcacacttttgagtttatggcacaggaatttgcgcgaagggctcacaaagtgatgacggtgaagcccattttggtgccggaggaaccgcgattggtacaaaaaagcagaggaaagggaagaaatgaaacaccggacaaatgcccgggggatttaaaaattcaatggttaaatctccgaccaatttgataaatggggaaaaacagcgaacatttgccatttggttccctccctttccctgaaaattattaaattttcggtttttttttgttaggtaaagcccattctgcacatggtcaatgagaaagtactcaaagatgtgttgccgaggtgaataaattggaaaatcgaattgaaaaacggacaaagggaaaaaagaattgcaaaatgtccaatgactaatgatacagtaaccaccaaaggagccgctgaagcaacaccatacactcagcagagagcataaaaacacgtgctaattaatcactgttcccttatcaaaaggcgtctctccgaacccctggcgcatgtcggacaaaatgtgccctggggcgaagaaacggacgcggaaaatgccctgagggtgccgtattgggcggcacacaatcattcatgtgggaaggtgcgcacggaagaaggcaaaagtggggaaagccaagtccacattatgtagatgctgaacagcaatctcatggaagtgatggcccggggtgacttcgacttggccattctctacgcgggaaacccgtgtttggtttgaggccatataaaggctgtaaatggctatatttgacgatgtgttaagatgggcttggtgcactccgtgggcattccttttgtgctgttcgacctcgagggaatcaccgaagagactttggtcgcctcgggggttcgtcattttcaacactttcgcaatatttcccatggaaaatttgtaaaggcgccttggaatttgcccgagttggccttggaaggcaatgccttcagcattttcggggttttatcattggtttattttcgaaatttgcctaacaaataaggcctttactctgcgtctgtctcgttctctttctctgctctccgagtctttcgcccaaagtgccgtcccgtggctggcccaacttttatcgaagagatttcgtcatttggatgccccaattgatgctttgttcgcttcagattttgaaattaatcgcaaattccgtggcaaatttcccaaagttgccgaggtgcagaattaaatgaccacaataaaggatgtttctttatttaagctcagaaggatggcacgtcttttccttgtcaactctgaccctttccttgaagctccgtcttcggcatttcccaataatttgttgcccgtcggcggagttcacatcgattccattcgacctcttttttcagtatgaaactgaatttaggggcacattcaaataagccaatcaatttaaagccgtggaatttctcaatggaagccaatggaaagggcgtcatcctttgctcttttggcactcaaatggacaccggcacaatgccaacagaggtggccaagccaagcgaaacagaaagtgtgtgattggagttacttggttcagtttatccgttctctgttggacactttcgcacttctcagtgactaccgaattttttggcgcatttctcccaaactttcgctccccggcctttccccttctcaaattgatggactttctgaacgcatgcctcacctgaacatcaccagctttttcccacaaaacgaattgcttggtgcgttcatacagtacaccccgtcaccatttccctttaattaagcgcatcatcggacgcgtttgttgatcacaaatggaggt

SEQ ID NO: 75104 - DNA, 879 bp, Heterodera glycines
atgacgaacccccgaggcgaccaaagtctcttcggtgattccctcgaggtcgaacagcacaaaaggaatgcccacggagtgcaccaagcccatcttaacacatcgtcaaatatagccatttacagcctttatatggcctcaaaccaaacacgggtttcccgcgtagagaatggccaagtcgaagtcaccccgggccatcacttccatgagattgctgttcagcatctacataatgtggacttggctttccccacttttgccttcttccgtgcgcaccttcccacatgaatgattgtgtgccgcccaatacggcaccctcagggcattttccgcgtccgtttcttcgccccagggcacattttgtccgacatgcgccaggggttcggagagacgccttttgataagggaacagtgattaattagcacgtgtttttatgctctctgctgagtgtatggtgttgcttcagcggctcctttggtggttactgtatcattagtcattggacattttgcaattcttttttccctttgtccgtttttcaattcgattttccaatttattcacctcggcaacacatctttgagtactttctcattgaccatgtgcagaatgggctttacctaacaaaaaaaaaccgaaaatttaataattttcagggaaagggagggaaccaaatggcaaatgttcgctgtttttccccatttatcaaattggtcggagatttaaccattgaatttttaaatcccccgggcatttgtccggtgtttcatttcttccctttcctctgcttttttgtaccaatcgcggttcctccggcaccaaaatgggcttcaccgtcatcactttgtgagcccttcgcgcaaattcctgtgccataa

SEQ ID NO: 75105 - DNA, 1014 bp, Heterodera glycines
  unsure (1)..(1014): unsure at all n locations
atggcagatttaagaatggaggtaaaaataaatgatttcctttcatttattcctttcatcttaaggccggcaatgatgtgatcgttcccgtcaatgttgcaattcgcatattcggttttgttagtagagatgatttggaaaattgcaaactcacctgcaaatcatggaaagacgtgtaaggcattgaattttgttttttgcaataaaaccattggcaaataaaaccgattattttaagaattgattacgcagacaaccgaaagnaactcggagttgcaactgaggcacattgacgccatttgtctctcaactaattctgaattttctatcaaaatttactacaaccaaactattcgcgagttttactacaaaaaatatttcgctgatatgttaggcctttttttaaataaaatagaaacattttatcttcagggaaattgatgaaattgaagtgaaaaaagtcaggcatttaacgagtcaatttgacgagaaaaaatacgttttcccatgtggagagcatttgccaattcggcaaagtcattcctttgtttttccagcggttgatatttttcaccaacacaggtgtaaaagtaggtaatctttgggttaacggcagttcgtacaattttttaattttcattaaaaccgaattttttatcaaatgatttttttaaatttttgcgacacttttgctgtttaattttttgggtggtttcgagtctctgaattctaaagaactgcgatgacatcaattcttttgattaatttgtaagctaaaaataatttcaattttttcagtggtgaggccaaccgtttaccaggaccatgtcaattacacgcgaaaactcttcacacctccgctcagtttttatgaacgccttcaacaaatgctcaaaaaatgtaaaattcgtctggtgattttccacgcgttcactttcactgatttctttgttgaaaaaatgcgtgaatttgcgtccgatgcgtttacgagggtcgtttttctttcccttcact

SEQ ID NO: 75106 - DNA, 610 bp, Heterodera glycines
  unsure (1)..(610): unsure at all n locations
agagctttggaaggtaaaattgcagttgtgactggtgcttctcgtggtattggacgagggattgcgcttcaacttggtcaagctggtgctacggtttatgtcactggacgagctcctgccgcttcgtactctctgattgagaagggacttccatctttggaacaaacagcgaagggcgagtcactgattgaattttgtggtgttttatgtcaaattagaaatcaaaagtcgtggaggagaagctcatcctgtgtattgtgaccacgcgaactctgacgacgttcgccgtttgtttaagcgcgttgaggaggaacagaacggccgactgcacattttggtgaacaatgcctattccggagtgcctgtcagtttcttcgacactaaatttgcccgcacagtcattaaatccctctcccgttcaagagtctgattgaaaatgccgggaaaaagttttgggaatgcgaaccggagttttgggatgacatcaacgaggttgggctgcgcaacgtgtacttctgttcaacgcttgccgctcgtctgatggttccgcatggcaatcttntctatntctgagataatcattgctttgacggtcaattgttttagagga

SEQ ID NO: 75107 - DNA, 1275 bp, Heterodera glycines
atgtgtcgtaattttcaggctgttgaagcgcatccaaaaattgaagacggacaaggaacagttggcccagaaatacgagcaggaggaggagtatctgatcaacgatttgatgcgaaaattgacacaggttcatatttttatttttcaaaaactcatgtttaacgggtggttggggctcggttcaactttttggcgaaacactccggttttttcaaaaaggaccattttgttcatgagtttctccatttctttggttttccaaattgaatgcatttattatctttcgatagagccccaaatgttctctatttatctgcaaaatttaaaaaaatctcgttaattatcaaaagagatatgatcaaaaacttcaataattggttttccgaataatttttgcctataacctcgacggaattctttgaaacatgtccaattcgaacaattatgaaaggagttattagaaaaatgcccgtttgaaatcgcccaattgatcctttacgggacgactacgtaacaggacaaaaagttgtcagccaaattgaattcttggacaataacttttttctctttggacccaatttgtcattgttcgaaagagtttgagttcttctggccattaaattttttttgaggtttgacagaataataatgaacaccttagactaatgaacaaacaaagaatacttaatttaattgacaattcatccgacgaaattttggggtgcaccggggcggctaaccccctccccaaattttagaaattgcaaaagtttttcaaaacttaattattatttataaaatttttaaggttttttttctaacatttagtgtattttcttcctttttttgcagttggaaggcgaacgggacgaattggccaatcggttgagcacggaccaaagctgggtggtggcaaatctgttgcagaaaatccgcaaattggaagccgaaatccagaacaaccacaaagtaacgaagggatatatttggcgaggacactccgtctcggtttagcactgacctcatttttcacgcaaatttttccataaggggggggggaggcaaaatcaggcccgtatccagaaaaaaatcacaaagtttgccattttgggctcaaattttaaaaaataatggttcaattggtcgcctggaaaaattttttggaaaatttaattcaatatgataagaaaatgtgcaaaattttcacaaaattctgtcaggttcaagtctgagttttttcaatccctgatagcctaaatagtattgaaaatgata

SEQ ID NO: 75108 - DNA, 212 bp, Heterodera glycines
atggcagggacggaggaaccgcaatacacccgggaggggcgaggtattcgtaaaatgcaaatttctggcccaccccaaccaaacacacatttgggtgagattattgaggcccaatctccaaacacaaatcataaaatttgaaattcatttgcctttttccagtctttggagcagttgcgccgcgaaaaggtggacttggagaattcgcttga

SEQ ID NO: 75109 - DNA, 1210 bp, Heterodera glycines
atggcgttggtggacaaacatttcaatggcaaaagcgaattgacaatttggagaccaatcgaaattcgcaaggacaaaggaccagaaccgaaactttatgtacaaatggatagaaaatttgacaaatttgtgccatttccattgcccgaccgtccgttgcccagcaaaattcgctttgattctattcagattgagtacttaaaagcagagctatgacattaaaagcattctttccattttcaggtacattgatcactccgtcatcgcttttcttcgttcaaatcaccaaattttcgacaaaagaggcatcgatttacatttgtggcttccttcacataccacgaatggccaactaatttgggacatttttggtcgtgaaatttggcccatttttgcgccaaacattggtcatttgaccatttcaaacgctgagcatttggacaatttgcgtcgtcgcatttcgccgacaattctcaccgatctcaaccaattgaattcaatctattccggtgctttgttgcccgctgcgtttggtgatgattttgatgggccaaattcaacaatttctgctggccaagcattgtccaaatggttgcacaatccgagaaaagatggccaacccaagcgattgcgttgcgataattactacgaacaaacggacttagattggatcaacaatttcaaggaggtgtggcccataatctcgacaaatcactgatttttgtttccaaattgtttagcattttcttcgtgccaatgccatttcttccgtcagttacgaaattcatttttatgttcatgtgccgtcaatacaaatggtgccatttgaattggtgaacgaatggacaaaggaaaagctgacattggccaaagcaaatgaaaatgaattggacaaccgatggataatgaaacgatgcaaaattggagagacagcggcggtcaattgggaagacggaaattgggacaacaattgtaacaatgtgttcttttggcttttcggtaccactaattgcattgggtgagcaataaaaaggggatttgtttttatacatatccaaatttgagatttgcgcttaatttaggcctttgtctccgccaccggcagaagaaacgggacaaagcatcacaaattggccgtcttttgctggcaattagtgatggacaaaagaacaaaaaacacaatgatgagcaaggttttcggggacgctga

SEQ ID NO: 75110 - DNA, 771 bp, Heterodera glycines
atggggaaaaagagacgcactaccccaaatctcaacgaatctgacgacattttggatcgtcttgatcgccttgaacagcaaataaattcaatccaaagcccacccttaaactcggtcctcgaacggctagaaaatttggaaaaactggtacaaaatttggtcaataaaaccaaaaatcaatgccagtgccatgctggtgacgaccaaatcaacaacagcgccactcagtggggtcaaccccctcactttgttcgtcaatcttctcatctccaaccggggtccatctcacagatggttaacaatgccatcctcgacgccgaccaaatcaaggcaaaatcaatgcgggcggtgctggagaaagtgcccgagggcatcaatgtcaatgaattggtgcaaaaagtgactgacgaatgcggaatcactgaacatttgaacgctggagatgtccatcgccatccatggaccgttgtgggttccgatcaatcgaacaaaaagccccgcattgtcaaaatcccattcactgaacgcaaataccgtgatattttcataaaaaattttcgcaaaacacttaaaaaacaccaaaattttccgcaaaatatcacggtccgtcgggatctgacccgttcggaactgcaagtcttataccagcttaggactcaagcatatgaaaggaataagtccgaaggactgttcaaatatattgtcgttgatctttccattatcacattgaaaaacccacaccctctcaaaacacgggaaaataatgcatag

SEQ ID NO: 75111 - DNA, 1240 bp, Heterodera glycines
atggaggttaatcctgccgatttgaatttccctaaagcagtgatcgctcgtataatcaaagaagcgttgccagatggagttacagtttcgaaggtattttttacacactttcatgtaataaggaggttattttttaaattttgttttggatgctggacgtaattagctgattagattaaaattttgagattaatttcaggaagcaaaaaatgcgattgctagaagtgctgctatatttattcttcacgcaacttcactagctaatgacaatgcacaatcaaaaaagagaaaaaatctgatcgccgatgacgttttatatgcaattaatcaattggaatgcgatgagcttgagaacccggtcagttttgtgcaaatcgaattgtaagaatgaattatcgcacttgcatagtgtcaatttggaaaattagtaaaaatacaaaaagggaactttatccttggtttccaacgccataaattttctttcttggtcaatgcctgcatttttgtattcaaacgaaagctcagtttctcaataatttataaatgcaaaaagaaaacacgaaatttagcttttttcgggtggtaaaaataattttttgtctattatattatcccataatatagttaaaccaaaaatgctgtagacttaaaaatagacaattaccaagtaagataaaagttatggcctaagaaactgacaaatgagatggtcattgatttggacgcataaactgaattagaaccaattgggcttcaaactgactctgttttaccaaataaaacccctgacaggtaaaggaagcactcactctttacacgcaaaagaagaatcagcgacaacaacaccgaagagagagaagggcaaaacaaagagaggaaaaacggtttgaaaccaaaggaaaaggggagacagaagaaaaaggacagcaagaggatggacaaagcgactgcgaacagggaatggagaacggtgacgacgatggagaggaggaggaggagatggaagacgaagtggggcaatagtgcgcatttatttagactttaaactgcatttttgcataaattctttttactacctattttaaacggccgttttccgttcaaaaggctttattatacttctaattgtaaaaaggaatctgttttttgaatggtattagcttgtatggcgacgcatgattctgaaagttgttcagcagaacaggtggataaacacggatcaaagcactaaagttttgga

SEQ ID NO: 75112 - DNA, 48 bp, Heterodera glycines
ggtgactttggtggtaagaagttcaaccagggaaaaatcttcaagtga

SEQ ID NO: 75113 - DNA, 289 bp, Heterodera glycines
tagtaaaaagaatttatgcaaaaatgcagtttaaagtctaaataaatgcgcactattccacttcgtcttccatctcctcctcctcctctccatcgtcgtcaccgttctccattccctgttcgcagtcgctttgtccatcctcttgctgtcctttttcttctgtctccccttttcctttggtttcaaaccgtttttcctctctctgttttgcccttctctctcttcggtgttgttgtcgctgattcttcttttgcgtgtaaagagtgagtgcttcctttacctgtcaggg

SEQ ID NO: 75114 - DNA, 937 bp, Heterodera glycines
acgcatgattctgaaagttgttcagcagaacaggtggataaacacggatcaaagcactaaagttttggaataaataattatttcctccctataaaaggcttctactgccgatgaggttgagtcgtccagtaggaggtccagcacagataacttgggaggtgattccgactacggcgatgactcggtgtctgacacagattcggatgacgaaaatgaaaagagcaaaagttcgacgctgagagaacgcatgaaatatacggactcgaaaatacacgacggaaaaacaagtaataaacgttaattgtcaaatgggagagacacttcctatttgtgctcagatacacaaagtgacactgagacgaaaaatttgctggatgacatgggcgaggaaatggacgacgatttgtcgatattgcacgagatgaattgtcgtagtaaacagaatgggtcgtcagagttaggtatgtttggatgtaaaaatatcaattccccatttctattagactcaaaactctttgagctctccgatgaacagttgaattattacaccaattgctttctttttcttatgcagaaatcgcaggttggctttaactccctttttcatcttctaaacttaattttgaggggttcttttctctgcaaggggcgctccaaggtcgtattcttttccgagtccgaatttctgcttttttaaggcaatgacagaacaattcttgacttcttccgcaaaagttccctcgacgattcaattctttccaaaatttggtctctcagcgatgtgaacgaggacggatttttgaatttggcggagtttattttggccatgcatttggtcgttttgcacaccaaagtgaaacttcctcatgcccatattctctctctcatttctcttcttatttagggttctgttcctatcccaagtaggctcccttcc

SEQ ID NO: 75115 - DNA, 1424 bp, Heterodera glycines
atgacaatggcatttttgccaaatatttgggacaacgatcagaacaaaccgctgattaaatggctttggatggatggaaatatggccgatgaatgtaaaattaccataaattgtttaataaaaaagtttttgtttttatttttattttaattttaaataaaataattttatttttcccattttctcccattttaaagtgttttacaatgatcctttgctgtctgcccaatattctgagcttctttccacattggtcagaaaaaatgctgtcagcagttggcttaatctcaaattgaaggtaaaaagcaatccgatcaattaaaattaatttagccaattaatttttgctaattttgatggcattttcagttggatttattcgttttcgtccgttggatggatgccaaaattttgcaacaaaaagagcaaaaaaatgcgctccgttgcgccaacttttgggcacgcaacaaatttctgcttgccattctctacgaccgattgtttgacgagcacagcgacgaaatgccaacatttgaaatttgccaaacaaatttattgaatgaattttatttatttttggacagtttattgagtgcaaaaaatgccaaaagtgaaaaagccatggaaaatggattaagaaaaatcattgagaagaccgaacaaatttatgagctgcttaaagtgacggccgaactgaaaattgtgaaatacagccaaatgggacagtacaaacactttgagggactaatgatggaaaagcacgtggagacaattaacgaattaatggccaaggatggacagttcaaagagcaattgcaatttggtgaggggaaggaaaagccaaaaaaggggaaaataaataatgaattcattcagtgtttgattgttctcaactcaataaactccaacaatttaacgatggatctgttggagcagaaaaatgtttgaatatattgaactcaattaaaatagatcattctgcgttaattggccaattgaaaaaaattggcgaaaaaattgaaaaaggaaacgaaattaaattcaaaagcaaaaagtcgaaaatgaaaaagcagaaaaatattaaggaaaaaaacagagaaggggaaaaagaaaaggaaaaagaaggagaaaaagaagcattgggtacggtagagacaataacggacaattggccaacagcagaaaaggatacggtagagacagtaatggacaaagggccgacggcggaagaaaaacacaaacagtcttcatcaccagcagcagtgatggaagagaaatctattcgggatacagtacaagcatcaccaatggtagcgaaatctgctgctgatcaggatacggtacagtcattgcttgcagcgaaatttgttggggctacagtacccgacgtaccatcaatgagggcaaaaagcaaaggggatacg

SEQ ID NO: 75116 - DNA, 1586 bp, Heterodera glycines
atgaccaacgaaagtgcctttgtgcgcgttcgtcgctttttgttgcgccgaagcgatgctccgctggccgacaacgacaattttttgcagttcggcacggcccttctcattgactacatgataaaatttggcaaccatttgaggaatgattggcccaaaatgccgccgggcattgccactttggccacaaaaattgccgacgttcggcgggacgcttttcggcactttggctcggcccggcacttttgcgtgatgctcaaattgatacttttcggaacacgcatcaaacagacactggtggcaaagaaagagaaaacgctgctcaaattgaggacggacgaatgcgacgaacggaaagcgcgagaaaagctaattgaggggagcagcggtacggaattgggcgaactgatcgaatttgccatcgcgggaatggtcaaggcgtcacccgcccggttccgatcactgatcaaatgctcggggacaaagaggcgctttgcgcgactaatcggcaccccggaacggtttaaagcatttgcaaaacggttcaatttgacggcactttttgcggaaaacggtgaaggattgtcaaattatgtaaaataaatacagaaaaaattatcattttaattaaagcattaaagaagcattttttacgatttataaacaaaaatcaaaaaatttcttcaatttttaaaagaaatttgaatttttttgcgctttttgttttaattcagttcaatcgtttatatattttttttttactaaacatttctctaaccgttttaacaattcctaattaaataattaattaacgaattcaattaattcattaattaattatcattttccagcgtttacaagcgacgattctttgtgggatcattatttttgcgcattgcaaaagcccgacacattggcggccaaagcgcacaaaatcagtgccgatttggcggtgttcgtccgatgggtccaacgccaactgagcgccgccgggagagaccggcgtctgctgcccaaattttttgagtttgtggacgaattttatgaagaaattttcgacttggaccaaatgcaactgacagtaagagagcactttttgagacggaaattaatcgttgaaacgaaaaaatatgctgaagaaaatttgggggaaaaaggaagcgaaaagagtggagaaaaaagggggacaaaagtgatcagaaatgggaagaagcaatttgatggaggagagatgaagccaacggaggaggaaattggccaaattgggccatggatttggcaattgcacaacgcggaattgagaagcattttggaaagtgatcagaacaaaaatgctgcttttatgggttggaaaattagttaaattgaaaaacaatcaatttcattatccaattttcagaataatatttaaattatttaaaattgatgcaatttttcaaatattattatttttattaaatccgtcttccataaatttatgtaaaattaaaattttattttaaatttaaagttttgtatttcaccgacgaaaagaaaattaccgacgcattgcgccactttctggggaataataactttataataaa

SEQ ID NO: 75117 - DNA, 144 bp, Heterodera glycines
atgctcagggcggcatccgggccaacaattacgtcacgacgacagtccaactgcgcgagccgcacacaatccgacagccgaccagcgactgtctccgcgtggaaattttcagggacggcgaaagcgttgcggtcggaagaaaag

SEQ ID NO: 75118 - DNA, 457 bp, Heterodera glycines
agggttggccatgccccgttactgtttgtttggggatacggtaaacaccgcctcgcgcatggaaagttcttcaagccgtacgcttgtttcactttgaattttgtcattgggtttttctgaattcacttttagcaaacaaaattcacatgtccagtgaaacgctcgaattgctgcacaaaaatttcaacggctcttatcacacggagagcagaggcgaagtgatcataaaggtcacccacttggggcaattaactaattaattccgctgcctaattaacgacaatgattcgattatttttttgccctttttgtgctttagggcaaaggcgtcatggagaccttttggctgttgggccaagtcgaaaatggaacaacaattaacgccgattatgcgcatagaatgcatctgccggtgatcaaatttggggaggagggaaatgaaaccggaaaaaatgcg

SEQ ID NO: 75119 - DNA, 56 bp, Heterodera glycines
atgcttgtgatcagcgggtggcagacgctggtacaagggcgacaggacggagagga

SEQ ID NO: 75120 - DNA, 103 bp, Heterodera glycines; identical to SEQ ID NO: 74247

SEQ ID NO: 75121 - DNA, 185 bp, Heterodera glycines
tcgcgactcacgtcacgagaaataaaatggaaaagataaattttaaagcatgatgcaatttcattaaaaatgggaaaaccttaatttaattggaaatgttccccctcttcgtcgttctattcaaaaaatatttgtttgtttacattcaattcttattcatttctcacacaaaaatgtattaatca

SEQ ID NO: 75122 - DNA, 1482 bp, Heterodera glycines
aagggtggacaacaacaacctgcagcaacagttgctggagcagtcgctgcttctcgcgctattagccactcagcaacaaacgacggcggcgacacccatcaacagaatgccaacacagccaatgccaatgatgacgccggaaacaatggaaatgccaatgatgacgacgccgacaacggcaacaacccacggtgaaatgccggatatttacgaaattgcccccccccccccttgatgcacctatgactcgcagcctcttcctttttctctatcagtttattccgtggtgagtcgttccacaaaaaactcagtgattgattggtcattttccggaagcctatcgcaccactttcgggcaccaaaagtgcctgatccgcaacccggaccggcccggttaagaaaaattttttgttcagtttttcaagggctatctcccaggccgggtccggttctttatccattcacttggagcccgtcatggttcgggcaaatctgccggaggaccctcagcctcgcccccgaccctgtcgatggccaaccaaagctaagcttgccggtaccagcggcttttttgtacagctcgatgagctctacaaaacggtatcaatggcgtcaggttgtgtttactacaaatgtagaaaattggcgagaagtgatgccaaaaattgaaaaattaaaaaatttgaaaatgacttgcgaacgacctagcaccgtttattcatgaaaagccatttatctctcgctctatagaatggagccgcgacagcattgacatgtgtctttgcgcattgtttatcaatggcatctctaatgatgcaattcgggttgaattgatcaaaaagggcgacaaggacctaaaattcaaggacgcagttgaatcagccgttttgttggagcagtccaatttggatgcccaagcaattggctcaaatgcaatgcctgaggtcgcgaaagttggcaatcagcaaagaggaccaagaacgccgacgaaaagcacgagaagttgctttcggtgcggaaaaccgggacattttgcaaatgtgtgcccgaatcagaattcgacatgcagaaaatgcggaaaaattgggcattgggccgttggttgcaaaagcaaaaacagagacggtaatgccaattttggtcaacaatttggtcaaaagccaaggaccaacggacgacaaatcaagaacattgaatgttcaaatgtcagcgtcattcatgaaatcaagggaatttctgccgatcctggtttcattcaactcaacattcacaatggaaagttggagtttgagttggacagcggtgcggacgtcacagtgattgacgagatcgactggaaacgcattggaaagccaaaattggaaccatcccaaggattggttgcctatggcggaaaatccattgctggaattttaggaaaggcaaaagtgaaactgacgcacgaaggaagaacgattgagtccaatattcatgtcataagtg

SEQ ID NO: 75123 - DNA, 156 bp, Heterodera glycines
atgcacgctgaaaatatcgtttggctcgaaaaatacccgcgttactttcgcatcaactggaacggaatggaggaccgaagaattgaccgttatgaggcatttgttaagcaactgtccggggtggacgattgggcacgaattggaagtcttcctgtt

SEQ ID NO: 75124 - DNA, 1153 bp, Heterodera glycines
atggaagttgtgctcagtcgggtggactatgcccacgttgggacgacttcgaaaggttggcgaaagggaatgaaggcttaaaacaatggacaaagtgaagcaaagatcggatccaaacattggtccatcggtcgaattggcggcacaattgtgccgaattttacttttcaatttccaccaaatttttctcactatttcccctccccatttcccactgaaaaggctgtttgtgtgtaattcaaaatcagtcgccagtcggacgtgccgaagatcagccgattactttggcggaggatgggggagaaaaggcggagaaattgggaaggaggggacggcgggggagccgaaagggaatggcaattgcagcggaagacaaagtgaggggaaagatgggacaaatgcctatggaacaaaagggacaaaatttgggttcaaatttaaagtggttttgaagtgtttgggggggggggggaccgaccatcatcgaaccgccgggggccttttggcaaactttcacaataagctgacttataatcctccttatttggccatgacattgaaaggtggtcatcggaggacagaacggcgttttgctgtgcatggaaaggcgaaataacgacacaaatgtgagggaaagcgaaggctgcgccttttatgggctaatttcactgagaataattcccaggttctcttcaaaacccctccaggctctcccatttcgcgcatttatttgggcggtgcgctcggctccgtccaggacaaagcattcgtcgcctgtggcactgaggttggtcccccccatcctctgatgagggagttgtactattcttccaaatgccattttgaattggcacaggtccggggctacagccgcaagggcaaacagtttctgacctttgagagtaatttgacggaggacattcgctcgttgttcgtctacggcgtggacatgttcatcgggggcaccaattccctttaccatttccacgactgtgtggagaaaagtgtgagtcacccgaccgaagaacggacagcaaattgtattttaataattttggttttaagcacttttccagtgccgacccgatcaccgattgcgtgtgtttgccagtgacggagggcggatgggtggggcgcggactgacgcccgttt

SEQ ID NO: 75125 - DNA, 2314 bp, Heterodera glycines
atggagacactttccatttctttacaacaagggcaagaggtgcagcaaaacgaaaccaattcagtttccacgtcttccacagattccaatgatatcgatatccaagcattggttcggccatcggctcggcggcagggcgatgtgatttcgtaatcacgcagatttttaatgccatttaatttgttctcgtctattttaggcctcatcgtgcggttttgactctctccaaaagcatgttcaatgccggatgcttctcattgccttacgcttggatgctcggcggaaaatgggtgtgtgtctggtggcttccgattccctttctgtttatccgttcttcaggtgtcattggctctcacttttgtcattgccggctttaattggtacggcaaccacattctcgtccgttcgtctcaacatttggctaaaaagttaacctctttccaatttcttcacatttcaacaatttcaggtccggtgttgcctctctcgattatggacattttgcgaaaagagtgtgcgactacagcgaattgccatttttgcgacgtcacagcaagcgaataatgtgccgaattaaactgacattgttatgctttctcacattttcaggtacgtcgtcaacatcaccatcctcttctaccaacttggtccgttcccatgtccatctttctcatttactttctttaggaatgtgtgccgttgccattcttttcattgctgacaatatggtgcacatgcttggctcctggcttggcaattccaccactcttatggccaccattgccattgttttcattatctttacgaacatgtaaatccgttttcgtacttgcgtttgaaattgcttcattttctgtcttaaaaggttcaccgaaatgcgcgtgatcagtgtttttgccgccgtttcttccgttttctttttgcttggtgccggagtgattatgcaatttacgctgactcagcccagcaaatgggacgaattgccggcctacacaaatttcaccgatacggcatgccaatgtgccatttctccgatattaaatcctatattttcaggtgattttcattggaatgtcaatgtacgcgttcgaaggacagacaatgattttgcctattgaaaacaaattggcaacccctgaagattttcttgacaattttggtgttcttccaacgacgatgtgcctttgcacggtgaaaacaaaaacaattttgcgcaaataatgttccctatctttcccatcagttttttatgatagcgattggattctttgggtacaacggtttcgggacgaatgtcagagagacgatcactgtaaatgtgccgcacacggggttagtatgccgaaagataaatttaaatgaaaaatggttgaaggtaatcgaatgaatgcaaattccaagcctatttattaatgggtttttgtaattatgctagtaactcttgctgattcagtctctattccgccgtcaatggctttctgtgcattcagtccatgcttggccattccattgcgatgtacgtcgtgttcgacatgttctacaagggattccgcagaaagttcactgctcgttttccgaatgtcccttcccttgtgcgttttcctttgttaacagtttcattttatccaattgttcaggttgtcgacaaagggtttcgcgtcggttgggtttttctcacttatctgatggccattctcatcccccgtttggctgtgatgattcccttggttggtcgattttttaaaatcatttttgcatttgcttttaggtcggtgtcacttcgggtactttgtgcgctttagtttatccaccattttttcaaattgtcactttttggagcgattggaaagtaattatttaatatattattattattattttattttttgctctattccaatttacgagttcaatcagtgaccatccttaatttattggccacaactttttatttcttccttggtcaatgtctatatttttggtatccaacgaaagtttaagtctctggaattgattagcaaatgctgacattaagaaactgagtatggtcactgattgaatgcgtaaacattgattgactccttgtgaatgtatggagccaaaaattggtttttcgggtgaagccccgattccccagtattgccaatattactgctaattatgtttaatgtctctaattcagttgaatatgagtcccgttcgacgtgcctttctcattggacgtaattgtttcgtcatcgttctcggcttctttgcaattggtgccggcgttgcagcaaatgttctccaaattcttaacccgccgccttcttag

SEQ ID NO: 75126 - DNA, 317 bp, Heterodera glycines
atgccaaagaaaaaacctgcgaggctgttgaattttgaagaggaggaagatgaggaaatggagcccgaattggaccatgagctattcggaaaattgacggaagaattggacgaggccatcgaaaagtctatggaaaggacgtacagcgacacattgaacacattcaatgaaattctgagaaatccaagcaaatgttagttgagagatccctttttgccatcttcgggtaacatatgatcgaccattttttggactgaatttaaaattgatttaaaaccgatgggaaggagaatcactgcctattttcagataattga

SEQ ID NO: 75127 - DNA, 58 bp, Heterodera glycines
gggcttcgctttcggcttcggcttcgagtgcaaagccgagcttcgcccagccctgatc

SEQ ID NO: 75128 - DNA, 2533 bp, Heterodera glycines
gtctctgccgggctcgcaatgggccaaacactgcaccaaattcagcgggttttattttatttattttttattatttccatttttatcgcattgacaattcaacatgtttttgcaataattcaaaatctaaatttatttatccaagcagagaattttgtctgtccatcttacatgaaaaaaaaaattttttttttttgggttttttaaacacttcttattattattttttacgctgaaaatttggaattgaaaaaaactcaaaaaaattagataattttttttattttactgatttttgtgtgcatgcatttgcagctgtacttgcgcttcaaagacatggtgttcgacaaccgtaggccgcacaacacgcaggtgctcgagaagttcattcgccaggagatgggggccgagacaatgttcagcgacctcaaatggccaaggttgcttcggtgttcccaaaatgtgtcagggacatagcatcgccgaaaaaaatctcggaaaaaaacccttggaattttttttttgaaaaatttgtgtcgttgaaagcaaaaaaattttttgtaaaatttcttgaaaatatcttcttttttttaaaatttcggggacgttgccgaaaaatatttatatgggaagataaaatttgaaaattgaaattatttcctcatttaaaaaaaaaatttccagacttatgttcaccaccacgcgggccgagttcttcccggttcagctggagctgatgcgcaactacaaactgccgacaaatgacgaggagaatgaggagctcggctaccggacgcccgacgatttgttgctgtggaaagtgttaaggcgttcatcggcgggtaaaaaaaaattttttttttaatttacaaaaaaattttaagcccctacctactttgccagtgtggacaacaaatacattgatggaggtgggtgaacagtggtgctttgattgttgttgttgttgttgttgtattaatcggtgggcaatcaaaatgcatttggtgacaagaaaaaagcggtttttcgaaatttaaatgaaattccatcccattagaatatgtgttttttctgtccataaccctcactcatttttgtcaggcattattgcgaacaacccgtcattggaactgctccaggaaatccaattttggaacagcttcaacaagtacaaggtaaaacaccaataacaacagcaaaataaattttttaaatttttttttcgttttttcagaattttcccaatgccgtgaacgttggatgctttctcagcattggcaccggtgtcattccgcccactccattgaaggtttttttaaaaacaaagtgtcattaattcgaatgcaatttccagcccacttatatcgaagtttcgcaaaactggatcgcccaaccgctcacctcaataaacgccttttggaccatcggtgaaattctggttgaccaggtactgtattgtatcaatacaaaaaaatgtttttaaaggaaaacttaaatttttcaaaaaaaaaattttttttttaatttattagtgtctttttccaaatataaaaatgaaaagtaaaaatgtttcatcgattttctccctacaaattaattacctttttccacaattttttggccaatttaaaaatggaaaataaattaaatttttcattgtttttttctgtttttgctattaaaaatttccctatttaaaaatggaaaattagattttttctctctaaaaagttgacattttccccccattttcccctcaaaaggttgctgccaccgaaggggtgccggtgctgcgggccggcgctttttgcatccaacaacgggcgccgttctttcgcctcagtgcgccgctgttccgcaacatttcaatggacgagaaaaatgacgcggacattgcgcgaatgatgtgggattgtatggtgggaacattttttgggattttcaaaaattgggcagacaaattattaattaattatttttattgcattttggtatggcattggcacttttcgggtttgaacggcaccggaaatttgaattaaaaacacaacaatagggggcatgattttttttcatctttaatgcatttttttaagaaaatttcaagcgaaagtggaacaattttcagcaattttttggaaaaatcaaaaaatccggaccacaaagcagaaaattaccatgacacccccccccccccataaatttcatggaggttttttcaaataaaaaggttaaattttttacaaaaaatttttctttcaaaagttaaacaaaaatctatgttttttctttataaaaaatgaaatttttttcaaacaatgcattaaaaaaaaattagaaaattaattaaagccgctcccattctgggaaaggcatgtgtctgtccatgccccggaactctattcattggttcttatcactgcccgcatttttcaaggagtacatatacaagcaccaagactatgtggaacggttgtgcactctgctgcgacgggttggccatgcggagcaccggcgccgtctgttccaaacg

SEQ ID NO: 75129 - DNA, 1058 bp, Heterodera glycines
atgtcaaaatttttcagggttgatttgctgaaaagtctgatcatatgcgatgctcggcgttgtccactcaccaaggtaacaagcacagattttgctatatatatatataaaaaaaattttttctttgccttccaaaaattttttcatggtttcaaattgggtaaacacatccatctctcacgttttgtgaatccacaaatacgcatttttgtgtttaaaaaattctttttttccccgtattttaggttggctgtgtgtccggttgtgtcaacgagaagcagttgcacgagctgaagaggacgtccaccagttcaatgccatcatccgccaccggcaacaccacttcaacatcttcgacggcatcgtcatcgtcgtcaagcagttcaacaacatcggcagcggcgtcggccaccgcagctgctgctgctacggcaccaccagctcaaccagcaacctcctcacaaccagcagcaggagcatcaacaacggcaccaaagccggccagctacacgtcggtgacggtggaggattttgaaaaccgggcatttgacaaggaacatttccgcttcaacaaactgttggacattcagcacaatgtaaagagtttgttaagtcctcttttcttcttcttttttggtggttttgggaggggggggacggagttcgcggagttcattgtttgtagagctcgatattttgaagaaaaaaaaccgggacctgacatgggggtgcacctcatttccccgaaaaattttttgtataaaattttcaaccctagaagttttccaaaaaaaaaaaaaattttgtattaggaaattgcaagaaaaaattttttaaaacatttttcagcgatttttggaaaatttttgccatttaaatggccagaaataaatggagaattttcaattttgcgacaatatgttgttaaggacatatatgacgaggtgttggaaaagttgcccgaagtgtcctcagacgaagacagtccgcccgaccacaatttcatcaatgtcctttcgttggatggcggtggcatccgtgggctggtcatcattcag

SEQ ID NO: 75130 - DNA, 166 bp, Heterodera glycines
tttggttttattgcatttttgttaaggaattttccaaaaaatgtcgaaatagtgaaaaaatagtgataaaacgccaaaatagtgatttttaactattttagtgacgaagtcgccaaaatagtgatttctagtgacgaaaagtgacgtccaaatgaaaaaattttaa

SEQ ID NO: 75131 - DNA, 1351 bp, Heterodera glycines
atgtcaacgtccattgtgcttggagccggtgcgcacgcgtcggtggtgtaataaaattgaaatacgagaaataatgggagagggaagtgacaaaagagtgaaatcgcatcccttttatgtaaccacaaaacacctcaaacccagcaattcgaaaaagtgattgtaaatgaaaattttttttatataaaagcattctttttcctgaacgtccttcatttgggctcggtcggttattaaatgcctacattcttcgtatcgtcaaaatgcatctctcattttggcctactatttcttttgagtgttaatagacaaaaattgaatttaattcatgacgtttataactcgatatgtaaattagaacagagccaaaatgcctaacagaaaataatttttaaaggacaaacatcaaacatcggggcatctaaacagtgaaagtgccaaaaaaaatttcaaggagagtaaaacgggattctcgtatttttccctttcccgtaatgtcatcgttattcattttactattctttccagatgaagagcattagcgatctttgcaatgaaataaattacgtttaacgatcaacaatgggctgatgaatgctgggtggaaaatgatggagaatgccgtcatttatttgtggagtaattaaatactttaataggaagatgttttctaattacattggacgtcgttcagattgccaaatggacttttcacacttgaaaagatattgcaatcggaacacgaggcaaccatcggattattggctctgaaatcaacaaacttttgaagacgaacgctgttgaagtggtcgctgaaacaggtctattgctttttcaccgcaaatccgaaagtttccactcatcattttcccccatttcagtccaatcgaacagtttcaattcaaatgctcatcagaaattgctgcagcgtttgcgtcatgcgattgaggacaccaacgcggaggctgaccgtctggagaacgactacttcttgttgcaggaacaaatagcagcaatgagacaccaattggttgtgcatttacgccgtcaactggagcagcagaagaagataaagaagcacataaagaaggaacaacagggaggagggaaaagagtgggagaaagcgaaagaggaggggaagacggacaagagcaaagggaagcggatgaagagaaagatggaggagggggagagaaggaagaacggcagagaggaggggcagaaaaggaaggcgatctatcacatctattagattcatgctttcttatgtgctttttaatgtcagaaatgtgtaaatattgtctgaaaaagagtaaaaacaacaccaagtttgaaaaaaaagatggatga

SEQ ID NO: 75132 - DNA, 165 bp, Heterodera glycines
atgctttcttcttcctcctgctgtactctgttggtcgccctcatttcggcggcgtttgtctccgtggcaaatgcacaaaaggtgaagcagtgcctgtgctccaaaatacagccctgcacccaaaagtacatgaacacgtggaaaacgtgcatgcggcagtgtaag

SEQ ID NO: 75133 - DNA, 106 bp, Heterodera glycines
gattgcacgtaattgccgaaaaaattcgagaccaatttccgaatgttgaccgactaattgcaaaacgaaagccgtctttgtcaaagcgccttaccgagtcaaaaaa

SEQ ID NO: 75134 - DNA, 242 bp, Heterodera glycines
acccatcttatcgtacgaaggcacaaattgatcattcgggcaccaaaaaagtcgttaattctcgccactctcccgcgccggcgccgcacagccaacggaaggagaagcagggcaaaaaagagaaggccaaaagcagcagcagcagttcatcggcggaggaggaaggaaaaaaacacagaaaaaagggaaacgggcgacagatcgtaaagcattttggaaaggggaagaaaaaggacgactga

SEQ ID NO: 75135 - DNA, 2314 bp, Heterodera glycines
  unsure (1)..(2314): unsure at all n locations
attgtactttttctgttcatctcttcactaatcgctttgtcattttacaatttttattataaacgacgcaattttccgccaggtaaaaaatacattaaattattatttaatgtaggaatataattttatgtaattagatattaaaaagcaaaaaaaaactgtttggaaaactaaagagtgatttttaattaatatttttgtatagttcaaaaatattaaaaatgttattctaagactaatttggcttttgtgtatttgtgcccatttctctcttttttaagaatttattgtccaaaaaatcaaataatattattttatttatatttttagaacatacatatttcggggtttttgtgcttaattcataaattttatcttctttttttttacatattttgcgacttttaataaatgaaatttgcattatcctaaattttaattgtttttaaatgcctaaacttccaactcatcaggcccaacccctttgccgatttttggcaatttgatcgcaattcatttgtcgggtgctggcgaattggcatttaaaaaatgggcgaaggaattcgggccaatttacacttattggataggcgaattgccagtaaaagttttaattatcatgctttaaatcaaatttatctttgaaggttatttgtgtggcggcctatgaacaaatggtgcaaattttccaaaaagacgccgaaaattatgccaaccgatatatttttcccattcaaagagtgatcaatggtgcaaaaaattaaagaaaatattaaatttaaaaattgaatatttcggacggacaacccgcctttggcattttgatttcaaatgggcaacgatggcgccaacaccgccgtttcgcacttcatgtgctgcgcgattttgggctgggaaagaatttgatgcagcagagagtgagcaaaaaaaaaggggggggggttatggccaaataatctacggataattacaaactttttggctcagtcaaaattaaaaaatataaattttaaatgccttttgccaatttccattcggtgattaatttttgatgactaaaccaactttgaatcgttcagatttttgaggaactcaaagcaatgtttgccaaaatcgacctgaacattgatcaatcggaaaacaatgagataaatttggccgaatttgtcgaacattcaatcgcttcaattgtcaaccaatttctttttggcgtcaaattagacgaggttttgtttgtttattgctgtttaattactgtaattatttaaatttaattttaattttaatgataaaattgtttaagaaaaatgcggcggacttttacgaaattaaacaaatgatggacgaacattcgggcgaagtcggcggtcattctctgttttggatatacattttgtggccagatttactgcgcaatgtgccatggttccgaggaaaacgttggatttaattttaatttcaattaattaatttggtattttaagggttacaattggaggaaagagtcgtcaatttccatcgatattttgagaagcgaatttttgaaagacagatgaaaatggaaaatcctatcaattttgagaagccttcctcagattacgtggaggcgtatctgaaggaaaaggcacggagagacgccgcgggggaaaagggacaccaattcgagtggggggggggggcgggagggcggaatgccaaacagtgccatttgaatttggcaccctttgaggagcacttatcagctggggatgatgtgcttcgacctgtggatcacgggacaagtcagttttgtaaaccgaaggaaatcccggtttaaaaaaataatattttaattaaaatttgaaactttggctttttttacaacctaaggaaacggttgtgtccgttttgagttggggcattgcccttctgctgaacaatggcgaaccgttggtaaaaatgtgcgaagagattgatcagctgatcagcagcgaaaccgtaacagaagggcggcggccgcggatgattactgtagcggacaaggcaaacctaccgtacacttgcgcagttacaaacgtaagtgcactggcgatacagtaagcccaagcaaagactttacggtagtttaaaatcaaagccaataaaaaaatcaatgcacttttgaggaaattctccgctgtgcgaacattgcgccacaaaatttcattcggacagtcgccagtgacgtccgattggccaatggttttgtcctcctcaagggcacttccattctnccccaaatttcggtcgttccagttaagaaacgggtgaaatcgcttcaaataaatatttaccg

SEQ ID NO: 75136 - DNA, 2415 bp, Heterodera glycines
atgattgtcaccacggatctgcaccactcctgcaccaagtcgcacaccggcacttccgcgtccgccccgttggccgccggcatcgccgcactgacgctggaggccaacccgaacttgggatggcgtgacctgcaggtgagggggattcccattccctctttcgacgccttttgttcattctgtcacaaaattgaatttacaaccaaaaccctttttcacaaattttattaaaatttccaaaatttcgcgccattttgtcatactgttgaaatataactccaaaatgacacaagcaattaattgtcatttttcactgaaatggcttaagaagttctagtttttgctccccggtgctgcacatttttgaacataaacattggaggaaaaaaaacttttagccccaaagagcaaaataaataaataaaataaaattcgcctctctgaaatttccgtaacttttttctggcttcagttttgatttttttgtttttctgtaccaaatgtgcattcatttcccccctccattccagcacattgtcgtgcgaacggcgaagccggtgaatttgcgtgccggcgactggcgactgaacggcatcgggcgcaacgtgtcgcattcgtttggctacggactgttggacgcgggtgcgatggttcggctggccaaagtgtggcacaatgtgcccaaacagcgcaaatgccgtgccacctatcccaacccgtacaagtgagtgtgggtcggcaattactagtactattactatatctgcctagtgatcttttttttaactttgctatttgctccccccgccccttccgcccgaactattttttgtctgaaagtctgtatttttttttcaaaaatgctcctagaaccttgcagagggatttttgcaggaattctaggtgttcctatatttttcaaaattccggattctaatatttgttatcagcccctggcgcaatgaattttcgaaaaatttggggtagaaatttaaatttcaaaatttttttgaagcaccggtttttttaaattaatatttccatttgaatgcttttaattattcggataaattttcaaaaaatgaaaaataaaattttttcatgggcgcggaaagaaaaatttgtttgaatctgtaaattctaaaaagtgccattcccctcacaaaggagagtgttcgggtgatggtggaacttccaaatgaaactttgtaggtgggtagaccacccctgggttgtattgccaaattttttttctagctgcggaataagcttctgtgccgagatatgaggctttaaatatttaataattatattatattaaatttaaaaggagaagcaaaaagcgaccggttggcagggtggttgtgtgtcacgatttcatttttgtaatggaaagttcgagtcccccctacgcaaacatttttttttattgtttttaataaaattacatatttagataatttaattataatgcaagttaatccccaaaatattatttctttacttcaaaaacatttttcgaataattttaatgattcaactatttcgcctgtcgagattgaaatggctaataattttatttcaatcattgaacgatgccttaagaatgaagaagaaattgaaatcgttgaagatctcgcatttgatgagaatgcagataaaaagtttaaatttatgatgtgtaaataattaacaaggaaagtcactcaatttgttattgtttgtgaaattgatctacatttgcacactcttaacaatatcattaaattgctttcactgatacacaaacacactccaaacatgacgtgttattgttagaacaaatttttagtgtttaaaaatttcagaaaggattcgtcacccaaacggaagaaggaggcaagcagcggagataagtctgaactatccgaacatcaatgtgtgggggcgaaaagctaatattcaggcaaacaaaggccatcggcgggtttaaattttaaatcaccttttaatttcagccccatttccacggcgttaactttgccaaaaacaatttgaccacaaaaatcaccaacatggcttctgtggagatggtcgcccttcaataccgagccgaacggacactgttggggctgagcagcgacgagatgaagcagtatctgatcagagtgtccaagttcttcgagaagttcgttcaatcaattactataattgttttgatcatttttaactttcagcgaatttcgcagtgatttgatccatgtgatgagcataagccaaagttatgtcgaggcggagttcgtccgtgccagcttgtccatgctgccgtaccttggcttcggattcgccgtcatggctttctgtacggccattagcattcctttgtccgccgcgtattttcaacaggcgaccgtccacaaggcattcactcattag

SEQ ID NO: 75137 - DNA, 951 bp, Heterodera glycines
atgttcaaacttttgactgcattcacttttgtgctcgttttgagcattgcatggtgtagccaatggaagagaccgtaaattttcattgaaaattgaaaaaaaaattttgactcaaattttttcttttcctttttttgatcatttttcagttatcagtcagagctcgacattttgaaaaaaacctttacctggacctgtattccatgtggacctggacttcctggacaaaaagccaggaaaaatccaggctcttcaagacctggatccaggcctggacctggattttttgattgttttaaaaagcaaacaaatgtttgaaaaaaacaaataattgctgaggaacatctaaatattcatttttcagttatcgatttaatgaaatggccatttaagcaaaatttttgttttcaaggacgactaattgtgagaacaaattctaggaattctgaaaacaatttatgtgtataatttcaggcaatttatatttttttatttttgaaaaatttttagcttctctaaaggcacttacataatccttttatggaaaatagccacttctcaaaatgccttaaagtttttttattagcttgcaaaattgcacaatgccatagaattttaattttaacgactttttcggcattttttaacttgtcacattcaatttttagcccagtttgctgtgacccgtgctccaaaaagtactgggactgcaaaacaaagtgcgaaacggacgacccggacaacatggcgtgcgagccgaactgcacttttgcgctggacaaatgtgcgaaagcgcactgcaacaacaaattatgcccacgcccgaggggcaaatattgggaaatcgatggatgatgggccaaggaaaagcgcaaattgtggaaaaaagggaattaaaaagtgtgataatgtgttaaaattcactcacactaattaaatggatggatttga

SEQ ID NO: 75138 - DNA, 692 bp, Heterodera glycines
atgcaggcaattctaacagaaaagaaccgtacaaagcttcaacacaacggtcattcatacatttttcacaagccgagtgctgacggtgaagttcgctttggtcgtgtgaacacaatcacgcaaaagtagagttgagcgggaccgggaaatttgacaaaaaccgggaccgggacttgccgggagtagaaaagtcgggacatttaaattcgaactgataaaagatggatttatttttaggggccgggttatatgcatattcgctgtttttaaatttttataatattttcttgaaaattttcttaattttaaaattgcatttgatttttgctgtgatatgcaaaaaaatcttcaattgacactttgaaaacttaaatttttttgtatgccctgataaatgaacggagctaataaaatttaattttgcgcaaatgaaactttttggtctttaaattccttatcaaacaaatttgctgaaaactttattaaaataatattctaaatttatgcatataaataaaaaccattattattattatttaaatgaaatgaaataccatatattaaattgttaaataatattttctttttccagtttttgtccttacaatcatttttgggccactcttagccgttgcattagcgcttttgtgtggcatcgggatcaaagtcttagtgaaaagaggtacagttag

SEQ ID NO: 75139 - DNA, 749 bp, Heterodera glycines
atgaacaaagttattgtataaaaagcaggtattgtcaattgattggactcataaaatacctttggactcataaagtgcaatatagcaaaattaagtgccttttaattattataaattaatttgattttgtgcgcttttcagcaaattgccattacaacaaaagaatcattgcgagaatttaaacatctgctgacccaactgtacggcgagcaaatatttgagtgccgtgggacgttgtcccttatgttggatctcgtcgaaattttggtgagaaaaccgtttttggtcgattcctaaagtgcaaaaatcaaaaaaacgattttttctatgatttttttcaatttttaattataaataagtaaaatttacttaaattgtacaagtttttttagatctcgaataaaaataattaaaatttacctaatattaaaaaaaatcattaaccaaattactttgaattttgaaatattttaaagttcattacaaatggattaaaattaaaaaatgaactcaaattataatccgcttcaactataaaatttataggaattgaaactttaaaatatttaacaaattcaaagtaatctggttaatgatttttagggatgcaatttttaggctctaaaaactgcaaaaataggtaggctttaggctctaaaaaaccccaaaaataggcactaaaaaatgaaaaataggcactaaaaatcctcaaatttaggggtgtaaaatgacaaaatgtattcaaaaaa

SEQ ID NO: 75140 - DNA, 525 bp, Heterodera glycines
atgatgaagttgacactgacccttcacccgaagaagttgagaaatggacgccgaaacaagtgattaagtgggaccagcgttgctacgagaaaatgccagctgaagaagagctttggcaagaattcctcgacaaaggagaggcaaatgtcagtaaataaaaattttgatccattttttaaattatttaagccgcaaccaggcactagcgcaccagccccaagcacagggctgagcactagcaccgtgtccaaccgttcgccgcaaagtgtcaggccggaggccacaagccgcgaccaggcactagcacaccaaccccaagcacggggttgggcactagcaccgtatccaaccttcgtcttaatgcgtcaggccggaggccacaagccgcgaccaggcactagcacaccaaccccaagcacggggttgggcactagcgccgtgtccaaccgttcgccgcaaagcgtcaggccggaggccacaagccgcgaccaggcactagcgcaccagccccaagcacggggttga

SEQ ID NO: 75141 - DNA, 1375 bp, Heterodera glycines
atgttgtgcaaatgcggcgaatgcttcgagtgcgaagatgaaaagcgccgcctcaagcgcaatcgggagctcaatacccgcaaagagcaaattaagaactgcacaggcaatcatctagcaccggctatgatggacctcaaacgccggaatatggaactgtttaaaaaggcttataggccggtgaagggcgtcatcaataaaataaccgggggtgagtttaaaaaagaaattgaaaaaaaaaaaacaaaaaaaattttttaggcccttggaatgtagaatgtgaggtctgccatgagaccttcacatacttcatggtggagtgggaaaactcccggaccgacttctcgtggggtcccgggaggaccatggtcgaagcggataacatagtaaaaatttttgaaatttttttccagttaaaaaataattttagaatcagaaagaaattttggctcactatgtaggccaaaatgatctactccagaatgaggtggactattatcagaatcttggtaataatcctccgttgaatgtgtccccaatgggggaggatgctataattttgaccagggacgatggtatgccgattggtgcagaggtaaaatattaaaaaaaaaacaaaaaaaaacaaaacaaaaaattaaaggcaaatgatggggcacggtcggtggccggggaaagcatcgttagcaaaagagggggagggcagagaaagagagagagagagagaaagaagagggcggaagaagcgaagaaagcacaaagagatggagcggaagaagaagaagatgatgactttttcttctttgcgagaaatgggggagagaaacgaggggaaatggacatggaaagcatggtagtgaaaatgaaatataaatttaaaaattaaaattattaaacaaaggaggggtcagtcgccagcaccacaatgagcaagagcacgaatcgcaccaatcggagcagtggaaaaagaaagcgagagaaagcgagagaggcgaagaagcttagagggttggaggaggaggagagggaaaaaatgcaggagacgccaaaaacaagccgaccgaggcgcgggcgtgatggacagggaacgagcatggggacgggagggtgaagggggaagaattgcattttttgaaaagggggaattttcaaaaaaatgtttttgaaatcgatcaaaaatcatctgttaatttttttatttatgttgagtaaaaatttcaaaaattaaagtgcaaaaaaaaagagattaaaaaataagctatgaaaggattacataaaaatataaatcggctgggaattgaaaagaatttaaaatattattaagctgggaatgtaaaagttttttaaaaacggctggtaattgaaaagaattaaa

SEQ ID NO: 75142 - DNA, 1219 bp, Heterodera glycines
atgcccaaaaaaagcgaaacgcgaaaagcgaaacttgcaacagccctggtaagtacgtatgtgtacggtatgcgtgccgttcgcagatttaaaaaatggacgcacagttgttacacatttataaatcaactttcttatcccaaaatttttattctggcgcatattttttagcgcatatttcagcacttcttggtacgtattttattacatatttcaggatttttagcatataaaatcccatttctctaattaggcatttttagagaaaaaaaaattccgtaatgaattatttggtccaaaaaatgacaaaaaaaaattttagccaagaaacccttaattgcgaaactcaagtggaaacattttttcagacccaaacaaaaccaacggcacgtttattttgaaaattgaaaaactttccgaatttgcgcaagagaaaaacggcaccaagcgtagcagtgaaattatgttcatcagaggaataccgtggcaaataatggcaattaaagaagaagatgctttatacttttacgtccaatgctccgatgataaaacaggtggctaattagggggaaaattttgaatgtattaattacctaattaagactccaaatggaaatgcccttattcggtaacatatcaaattgatgcacaaaataaaggaaacgagcactttgtcttcggaactggcgggcacattggcaccaattttgaatgccgatcttgccgtaacagacgcggattccaggtcattaataaatgccaaatttggtcaattaatgtgattagcggcattgtgactgggatcattaaaaagtcatatttagtatctgatgagcgagtacaacgattggtacaacagagcggaggacacgttgactttgcgtgccgatgtgcttattggcgaaccatataaagacactaaaaattaaaaaaaaacaatttgttgggttcgtggctgtcattcttggggtttgaaaaattcggggacacagacccgaaaaatgttcttatttgttaggggattcaggctaaactaaccacaaaacttttcgagagcgggggggggggaacccgacaatggggaagaatgagagacttattaacaaatagggctcagaaaagatgacacctgcgaaaattcgttaagtgtaggcaaattttaggaaagaagaaaatgcaaaacctgcattaaaattttaaaaaatatttttaaactgaa

SEQ ID NO: 75143 - DNA, 290 bp, Heterodera glycines
atttgtggccattcttgtaagaaaaaataggagtttcgggggcgcggcggtcccgataggcgccgccggggaaaaaattggaaatttcgatcatttataaacaggttttcactgaaaattagccaatttataggtaaaattttgaaagattttatgggaatttaatccaattcttaggggtgtaaaagtcgcgtttcgcgccaaaaagcgaaatgcgaaatgcgaaacgccaaaaaatgcgaataatgcgaaaggcgaaatgcgaaaagcgaaacctaggcacatccctg

SEQ ID NO: 75144 - DNA, 755 bp, Heterodera glycines
atgaacttcatgattccgacatttttgaaaaaaaatgcaacgcgtgtgaccaaaggcattgtaagctcgacggttttggcaccgctgccggagggcaccaccactacgacgacgacgacgacggtttctacgactactacatccacggcttccaagacgatttcgacgccctctgcgaatttggtgaccgacatttcggatgaaatgtccgaaacaacggttgacggtaaaactgagtcccggccgtttcacccccaaagttttttgttcaattaatcattttattggggcggaggagcaataaaaaagccgagattaaaacgctgaccgaaccgaaatgtccatgccataattagcaaaaattgttcataataattgctcttttaatgttccagaaaacgtttccatttgtgccaacattccgaccgtgtcgattgcatttggtacattatgacaacaatggcacataaaaaatgattatttttgagcaaaaaatagtgcagataggaatcgggggaccgaccaaggataagcgatttagttctgactgatcccaattattcaaaaaaaaaaactcccgggctttattaagagacagacatacgaacgatagttctaattaatgcaaatattataaaaataatatttgaaatttaataaatatttttttagccattttggctctttttttcattccaatttgaattgaaagatggcgggcggctaaacacaaaaggaagaatttgcagaataaa

SEQ ID NO: 75145 - DNA, 551 bp, Heterodera glycines
atgaattcccagcagcgccaggcagaacgtgcccaactccgtgcaaggttaaacttacttgtcgacgaggtcgactttgtggtccaagggctgatcagcaattatcaggccgatggattgatcaacgaggtaagttttctttattttttatgctgtttttgctttttttgaattttaatcttgattgaacaggcgccgcatgagggacagctgatgggcatggaccatggacaaggtctacagcatgagcagcagcagcagcagccgtgggaactggacccaccaatgcctgcacagcaattggaaattgggccacagctcccggatgcgtgggaactggttccctaccagccgacaccacaatgggcccaagttgcacatgtggaacaacacccgcagcagcagcaacactaccaccaccagcaacaacaacaacagcagcagcaaggcgcgtgggatgaggaatgggaggggcagctttcgccaaatgcgcttgctcaaatccaggacgaagtgaaggggctgcgtcaggatttgagtaaggattttgg

SEQ ID NO: 75146 - DNA, 367 bp, Heterodera glycines
atggaaattaaatttgaaaaaaagaaaagttttgataatgaaaattttccgataaaaaaagaagcagcaataattaaagaagaacaattatcatttggagaagaacaaattatgatgggtgatcagaagcgattgaaaatggtaaaagaggaaaaaatgatcaaaaaagaggaaaatattgatgaaatggaaagaaaaataaaaatagaagaggaggaggagcaaacaatagtgaaggaagaacaagaggaagatgaagaatgggaagaggaagaggaagaacaaatggaagatgaagaatgggaggaggaagaagagggggaagaagaacaaatggaagatgaagaatgggaagaggaagaagagg

SEQ ID NO: 75147 - DNA, 742 bp, Heterodera glycines
atgttagcgttttgttcacttttggtaccagcaattctcaaaatttggcaaaaaaaggcaaatgaaaataaaaatgttgtaaaaaggtaataataatttaaatttttcatatttgtaaaaatgtaaataataataatataaaataatttttttcttttggctttgttcgtttaaatgctaattcttttatccttcataataaatcaattattgaatttcattaaaacatttttaattgcaagaaaaaaaggcgcaacattttattacaaagatttgcaagaaacatatgtaaaaaagataaacaaatgcagctttattagatatgcaaaaaaacatttccggatttttaagatatgagaggattgtttttaaattgaatgggttaatttgtaagcgtactgtgccccccccccttgtcaaataaatattaatgggtttttcattttttttttaatttttagaaatcgagatttacattaaatgactttacctgtatttaacaaattttcaaaatgtaactattgctttgttcatgtattctgtttaaaacgctaggctgcttcaactttcgatgagagaggtcgcaatttgagtatggagaccgtttgagtgtgactcattaaatacatgcatttgataaattcatttttaattagagcaactctccaatggcattggtcattttttggtcaaaattcataaaaaatttgtatggaaacattaaatcgttggcggaaagtta

SEQ ID NO: 75148 - DNA, 656 bp, Heterodera glycines
atggcctcgcttttgctttgtctgcttttaattctctgtttttccattttcaaaactgctgaacagcaacagcaacccgacgaaaaggaccatcgacaattgctttttgttcaggcaatttggcggcatggcgacagagtaattaaataattaattagataattcattaacaatttaaaatattaatcgactttttttggtaattctcaggcgcctggcaaattgccttaccccggggaccaatacgacgaaaaatattggccacgtggttggggtcaattgacaaatgtacaattgagcatttgtcgagtttgtgtgtttatgttttagcttggcatgacgcaaatgcgcgagttgggccaatttttaagacaacgttatgtgaccgaactgaactttctcgacccggcttatcatcgcgaggacgtaattgggggcttaagcaaagttcatagaaatttgcacttggataaaggtttttgtccaatcctccggctccgaccgggcattggtttccgcgcaggcactgctccaagggatgtacccaccggtggcggagttggagcagttcgaccccacactcaattggcagcccatccccgtgcactcgactgggccaaaccatgaagtgcacttttaaggggacggataaaaca

SEQ ID NO: 75149 - DNA, 1274 bp, Heterodera glycines
atgaaaaaggaagtgaagcagcagttggaacaaaacttgaccaacacgtacccggaattgttcacattcatccagcagaatgtgtacaaaagcgcacaaccaatctcactgcatcaggcggctaaactgagcaacatcaaaagggaggtgggaggagcaaaatgggaaaagcaaaatgaaaaacgcttattaattattccaatttaaaaaatcagcataatttaatgggttttcaaaactacttttccaaattctgattgaaatgatgagaaaatgggggagaaacaatctcacttcatttggaaaagacgagaaattgaaaacccaactgaacatacaattttatttaaattctgaacataatgccataatttgtccatttcagtccctctcatcgtccgtcccttcccttcccttcttttccttccccctttttttgttaggtgcttcacaatttgtcccagcccgagtgggtaaatcgccgttgggaccaatacggtgggcagacaacgcttgatttggtgacggaactgcgccgcttggaacgcagcgcggagtttgcccgttccgagctggccattctgaagggcggccttttgctcggcgattgggtccaacgggcagagacggttattaactaattggtttaaataattacgtaatttgaacggggttagatttcatttgtttaattaaggtgttgcaacgacaaacgccgaaagaggcaaacaaagccgtcctttattcagctcatgacggcacccttcaggcactaaaagcatttatttgcccaattagggatgattaattacgctaatgaaggccctgctttatgcgctcggagtcggcgatggccaaatggtcccttactccgcttgtgttatgatggaattgtacaacgcaacgggcggtgtcattcatttggatgtgagaagtttatttttgcttttcaaaattaaataatattttcaaagatttattatcgacacaacggaattttggacaaattaaaattggcggattgtggcgattcgttttgtgaagcggacaaaacactcaattcgtttgagaaaaatgcaattaatgggctgcaacaactttatgatgtttaaatttaattatcaaattttaaattgttgaaataatcctttttagcaatgcaaaaaagacggattttgcgaaatacccattgaaaagggtaaagaagatgattaattaccactcattcgttaattaaatttccacattcttattgtattttgatatttaaaata

SEQ ID NO: 75150 - DNA, 654 bp, Heterodera glycines
atgttttccatcgcaattcatccaatttttctcgtcgccgttttgctcacttttttctccctctttttgtcctccaccgacggggccatcgcgcgacgccaacacaacacgcagaaaaaaggtggcacatataaatgggaaaattaataattggctgatcagaaggaaggattaggcgtaggtaaacggctaattaggaagcaattaggcgggtaatttgtcaaaatttgctgggagtcaatcagattcattgtccccaaattcggcacttaattatcacgttttcagcaactgatccaaacagcagtgacgagtacgattatcgtgtggacgatgattacagtatcggcgtttttgttgacgcggtgccaatcgccaaaaatggggacgaaagtgccaaaacaccacagacaaatgaggacggaaaggcgtacaaacggacgaataggtgaggaaaaagagaatgttggcaaagcgacggtcgaattttcgattttttaaaaaaggggggaaaattggcaaaatgacagtccaattttcaaaattttaaggtacccgacgaaaaagctgcgcagattttttgacgaatcaaaagcgcggagggaatggtacgaatcactgttcagcagaacggcggagagacggcgaagataa

SEQ ID NO: 75151 - DNA, 461 bp, Heterodera glycines
atggaaaaatgccttgacagaaaagatgtggaaatgtgccaagaactagcagaagaggcaaaacaatcaatagaattagcaaaaaattatagaaaggaaattggacaaacttatcggaccgcttactcgcagcccgatttaggcattggagacttggccaataaattaaaagaaacaatgcgagaaaaccaaatacggtttgaaaggctaagacctcaggaagaatttagggatgaatttattgcttataaaatttaagaaaaaaaaattcgagaaaatgaaactgcatgagaattaaaggttgtgggacataaaccaaaaacaggtgaaaaaggaaacaggtgaaaataggtgaaaaggaaacaggtgaaaacaggtgaaaataggtgaaatttcacctaaaaatattataggggtgtgcatttaatggggcatattagagaatgtctcaactagtatca

SEQ ID NO: 75152 - DNA, 456 bp, Heterodera glycines
atgaattctgaaaaatcagaaaaagctaattccatattattggaagctgcaaaaaaagagacagaaagagcatggcgggatgtagctacgctaacggatgaagtaagcgattttgccaaatcttctcgcgaaacacttaatcgtgcaataaaatctagagaaaaggctccttacgctaatggtattcgagaattatatcttaaaatgtccgattcaatttgggaaatcttcacaatcctggacaaaatcaatttggagtcagaaaaagccgaatctacgtggcgtgatttcgagagatgcaaaacttttgaccaggcaacaaagctcgaggaacaatcgcaaaattcattaatggaagcccgaagattacatttcgagtcccggagggtgcagagccaaatgttaaattatgaaaataggctccaaacaattgtttgggagcatatgggtatataa

SEQ ID NO: 75153 - DNA, 1084 bp, Heterodera glycines
atggcccatcccaccatttcctcccgatttcaaggccaagttcacggtcttcggactgcagatcttcccttgggacggggtggatcatggcccatcccaccatttcctcccgatttcaaggccaagttcacggtcttcggactgcagaacttcccttgggacgggttggatcgtggctcatcccaccattttcctcccgatttcaaacaaagttcacctatttggagatacagaaatttatttgattacttttctttaccagaaaaattggtctttacagttttattagcgtgtctttttcttgagtccaattttaccacggtcaaaatttttgtttatttgtagattatgcagagcgacagtggatattgagcgaagactgttacggtcttgagttatgtgtggatttcaccagacaagccgcgacagaagcgactctcgatgttttgagcggcaaaccagtgccagcggaacaccgcgcacttatggaaagcaaccaaaaatttaaaaaacgtaataatgaaaacgaggcaggaagtgccgacgatggctatgatattttgttttgtaactatttttgagctccgcgtgtactgaaacatccggaaatcgtgtttttctgcgttgagctagtttatgagttgttagaaaaaatttttgaaaaactattttcaattattttggcgtttaagacaataaatacgaaaaacacacacctaagaatcgcactcaaaatttttcaaaattgctcctttaataatttatctcattttgatttggattaattattcttgttggattaaaggttgaacaactatttatcaatttggcaccaacttttacgtattaactatttaggcagtttttagcaacaaaaaattatgtttctttaattaattaattcagtgcacaaaaaacttgcgctctccgctactcagcacacgaatgatggtattctgtggatgccaagggtgccaagggcgattaaaacggaggtgagcctctatgatttcttcactttttacaaatgtaaattcaggcatccaaatgcatcgatgcctttgttgatgaatttatgaaatga

SEQ ID NO: 75154 - DNA, 434 bp, Heterodera glycines
atgtcgatgcaacaaaatcaagggtccgatgatgttttgccaatgtgggcggtaccggattttgatgaaatggaccaaatgccgcagcggcaaaaacaaaaaaaaatcccaacgttgaaggagtttcggcaccaatggaaggaacgaagacttctgtgggagagggagcaagcagaaaaaaaagacccaaaaacatggaagaagaggaccgatgagatgaagaaaatctgtgaggagagattggagcaatcaaaaggtgcaggcggcagcaacaaacgacaggagccggacacatacacttggaactgggacgaactactgcgccaagaaagagaatatttggacgggggtctatggggaaaatgatgagatacccccccccccccctccagctcccctccccctcccgcttctaaatatgttgttgtttttaa

SEQ ID NO: 75155 - DNA, 733 bp, Heterodera glycines
atggctaaaattgttattgcgccctacaaaaaaattactccggtagttttaatgtttcataaatatttaaaataatttgaaataacaggagcagagtggtccaagcaaaaaaaccctccggcagaagcagaagcgcaagaacaaatcaatgaggaaaaaacaacccaaaaaagtaagttttttttgctcatgatcagggttaaatttttagcacaaatggtgtaaacccattttcttctaggaatttttatttttgtttttcttactattatgtttatgaactttttagaaaccaaccacccactttcttataaaattaattgtttgatttaaattaatttttcaaaatgttcttattttagacccataaaacttcactggttacttattgccaaaaatgaacattttttgccttttttcaattcaaaaaatggatgatagggtacaacatttccgctatatgccgtcgaaaaaattttttttaaatttaaattccaacgcaatatatctattcaaaatacattaaaagcggatgatgatcagcaccaacagcagcagcagcagcaacaaaatgctgggttccaagaatcgcaccttttggaccaaacagatggcacacacggaattgaagaggagaaatttgagctgaaagagattttcgcctgcttcacacatccgaccacacaccgcaagtcctactatgtctcgtggctaagttggttataaaaataaa

SEQ ID NO: 75156 - DNA, 950 bp, Heterodera glycines
atgagctgtgctatggcgttgttgctgctgatgctggtgcagctgcagttgttgcggttgctccggaggacaaaggcgaggacggccagcgaccgatggcaccggacgaaggcggcggcggcgacgatggccaacaacatgggcaggaggtaggacagggcggtgcaagggaaaccaaaatttcggaacaactcaagccgtttttgcgaaaaaatgtagaaaattataaaaattaatttttctatccaattgtaatgtagtaaaattctcaaaaattgttaaaacagagacataaattaatcggtaatttttgactgattttttcagcttttaaaagatttcataaattgccgatagacgccgccaagaaaactttttaaaattagagtgaattatgtaacagattttttcaaaaaaaaattgaggctttgttattttttgaattttccgcaaaattttgcgaaattttttgggaaagtcgggtgaggtaggacttagagaatgggcagggttcaacaggaaaagctttatgtttatatcacaatttccctcttcagcaaaattgctcatccgcttccgttgaccccagcaaaaagtcgtgcacaactgtcgctgctgttgatggcggcccgtcgttgttggtctcttctccgccagtgccggtgatcgccacggctgccgcgacttcttcggcgccgacttccgccgccgcgccggacacgcaaagcgtcgcctcctcctccgcctccactgagccgtggttttgcgagccgtgcctgttcggcgtgcgcgaggtgccccactgcgagctgtgcccgagccgttacggcgccttcaagcgcgctgctgctgctgccggtgaggcggtgcccgaaaaattgtgtcaaacagtacaaaaaactgattttgcaaaagccaatcccgggggccaattttcggcaccgaataaa

SEQ ID NO: 75157 - DNA, 1787 bp, Heterodera glycines
atggacaaagaacgacacaattttctatttggcgcaggtgttgtgcaatttttgaaatttaattaataatagagatgtacaaatttactggaaaacattttacttaaaaagatggagttttccatgccctgattttccagacattttcggcatcactgggccatccctcctcactgaaatggattttcatcattattgtttttattactgttattatgtatcatggaaaaatcaaaaaatatcccgacttttaaatctgcatttttgagattcaaaacagaaatttgctttctcaatttgaagaacattttaattaaaatcattccatttcatatttatctcatttttatccgcttttccaacacataaaatatctcaattcaattttaaattcctacttttttttatcaattaattgcacttattttagtaatttttaataaaatgattaaacatttttctttcagctgcgcgtgagcccggcaagcggcagtttaagccaaatgcggcattttttgaccagttgcaactgatcgcggcggacggcgcggatgacgacgaagaggacgatgacgtcatttttccatgttaggcaaaaaatggcattttttaaaataacgcattttctaaacccattgaattttgatagttaggtaattaatctccgcacattaattggatatgcggtattcataggtgcgcattttcgcaattttttcaaaagttttgtacgaatgattcgtgtctgtttcgcaaacaatcgcgcgaactttttgccaaaattggaattgggcgagggttggtaaaaaaattggcacaactaaggccatgattaatggaatctggcgcataatgatttatcatccgtcttgctcttttcatttgtaatttgaataattaaaattggcatcaaaatcgatggctcagcgggttttatttcgaaacttcagaaaacagcgaacatttaatcaaatttcacatttaaaagtacagtttgaaaagcgcaaaaagtttttttttgaaatttgtcttttttttttaaacaaaacattagttttaagaaagggtgaggttcgtaaaattttctaaatgtattggcgaagagtttttcaactatggccctattggagggccgtaattaaatcatcatggcattttttattcgattttgtacaaaaagaatgaattgttcagcgcccaatgtgtcgcgcagttcctccgacaacgaacagcaaaaggaggagggtgacgaggagggcgagcagtcctcgaccaacgacaatggcgaggacgacgaaacggggggcaattcgtcggatgacgaggacagcggcgacggggaggaggagcagcaacagcagcaggggaagccatggaaaagcaaaaggcaaaaaggagcggcgccaaatgctgcccaggttcggaacaaaatggggaaatgatggcaaaaagcggcactttgtaaaatgatggaaaaagggggcctttaaagtgggaagggggggggcgtcctttgaggttgttgatcacgaattttacatccatattcgactagttcgtagccctccccccggatgaaccgaacgaagtcgaaaaattattttcgaattttttcaaaaatggtttatcgagcagttattgcagtacttaaatgtctgtttgtccagggttcagaattttgtagaattgggtggatggatttgcgatcagcgatctcagtgaacttttttcttttacaactttcgaaaacaaaaataagcttacatatcaccggggggcttaataaa

SEQ ID NO: 75158 - DNA, 1291 bp, Heterodera glycines
atggccaataaacttattctgctgccgtacgagcactacaaggggctggttgcagcgagggagacaaagaatgacgacgacgacgacattgctgagcggacaaacttgggctttgtcaaacgacaggtgaccgctgcagtacagaagcggaagggaaacgtcagcgaacggaacgcaatgtacaaccagcacctgcgccggtacctgaagatgcgcaaggaacataaggagcggcccgtccgggtacagctcagcaacggcgttcaactgctaaataaaacagtggagacgggtgtgcaggtacggcctggtccggacgaaccgaaggacaagtccgtgatggttaccgacgaagatgaagaggaagaagaaattgaagtgccaaaatttttaaccccaacaagccagacgcagggaagcagccgatcacccaggaccaataagaaagcagcaaaacagcaaaaattgatcgagaagaaggaccacctgttggccatcattatgtctgatccgcagagattcggcgcaactgaccgtgggaaaatcattaacccaaagacgggccgagagttcatcgactcggacctggcctggtcaattgaacgcctggtggaccctcgcccggagaatgccccttcgccacgcggaaccaaagagttgaagaggaaactcgcacagaatccgctcgccagtagcctactcaatcgactgtttgttgggtctgggttcgtcggacaagtcaaacaaacgagaggatttgttccctcaaaatggacaagaaaataaacaaaatatacaccgacccggccaatccgggcgggtatgcgggggcgagtgctctgtacgcggcggtgaaggagaagcacccgaagttgaagcgtgccgagtttgaggactttttgcaaaggaacaccacctacacgctgttcaagccaaagagagacaagttccgacgcctacgcactgtgcctgcgggtttcatgaccggtaagttgtactggggcttattgcgcacaattcagggttcagatgttcaggcggacttggcagatttccaggcactttcgcgcaagaacagcggctaccgttacttgctgttggcggtggatgttctatcgaggcgaatgttcggcgcgcccgtaaagagtaagcgccctgtggacatgaaaagggcttttgaggagctatttgagcaaatgccaagggtgccagacacaatgtacaccgatcgagggctggagtttgtggcaaaaccgttgaaggagttttacgcggagaagggcattcaaaa

SEQ ID NO: 75159 - DNA, 4748 bp, Heterodera glycines
atgcctaatcttcggtcgcctccgcttactcgtcaaagagcactcaacctcggcattcgtctaaataacaacgcaaaccagcagggggggcaacaaattgtagaaccacagcacctagcagaccgacgtttggaaaacgaggctcgccataattctgtctcttcagttgcttcatcacttttggacccaactgaaattcgccgacgcctgctcatgtctggaattggagaaaatgctgctggagttgagaacggaccgcgagatgagcaacaattcgacgcactgctgaaccagcatggtaacgacttgtttcaaaatgaaaatcggggagaaaattttgagagggacgtttttcaaccggtggtcagagaaccgccgttgcaattttcggaaaattttgaaaatggtccgaggcaatatgagttagttggggtacggcctgttgtgacttcgacaccccatgcggtgcaaccacaaaggcgaccaaactctgaacccttaaacccgggcttagttcgtccccaagcgatgtttctgaatagttttcaacaaaatatcgccgcaaatccaaacggcaatcaacggcaaagagccgaacagcgtttcattgatgaagacgaacgacaagcggctctggttagacaccgccaagcaaatttgacccattatgtgaacaacgaccgcgattttaacgcgtttcatcctattgctggtgctcaacacgtttggcgcgcacaaattcagcatgtttcatacccaaacaacccgcaaatcggcgaggttaaccctcaacaaattccacgacaaaatcaaggatttgtagggaatcaacaaatttttcgtcccgttgcggtacgaaatgattttcaccctgaaaattatggcgacaatttcaacttcggacatcccgaacagcaaaattttggtcagcaaagaactgaacaaattcaaatcgcaaatttggaatatgttttgactttggaccgtctgccagagctaaaaggaaatgaaggagcggataaagtgaaaatttttttcaaaaaattttcaaacgcaacggaagaatggcccgagcataaaagggttaaggcattagaaacgaaagtctcaggccgtgcagaacgtgcttttaatgcagcaataagctctggaccacatcgcttcgattcaattcgacgtgcaatgcagaatcagttggaagagacggattgccgtgagatgggagcatttgatgagctgatgagcggcgtaaagcgtcgttcgaatgaaaatttggacgcattggcggatagaatccaaagcctcgtctcccgtgcctatccgggattgacacaaaatttatgcgacgattatgccattaaacatttcgtcagagctctagcaaatcctgagctatctctaactttggaaatgtcgcggaaatcgggaatgtccttcgatgaattcgtggcactagcagctcgtgccgaatcgattcagcgggcgaccagagtgtcatccaatgaaaacaaatactcggataatcggaaccgaggcttttatttttcgaataatttttcaagaccgcaaagttctgagtttcaaggaaactcacaacaacctcgaggaaggattgtttgctacaattgcaatgagccgggtcatctttctcgggattgtaatcagcagatcaaagggcagcgagtcaacagcaacgaaaatgagcgaattcgcaatcaatttgcgacgggttcgaattctgtagcgattcgtaacaacgaagagtcgccaagaaacaatcaaagaaattttcaacccaaatcacagaattttctcaaacaaaactgcatcgttatgcaggaggaccaaccacctgatgcattttgctgtggtgtgcaactgacatcggagttttcgaattttttggagaatgagttgcatgaggaaaatcagagtgaagagtccaaagaaaaggaccatgtaggaaaaattttggtgatcagagtggagacgaacaatgttagaacggatgcaatgttggatggaggggctcaaatttctttgattggagcagaatttctctacaaattgataaaggagcacggcctggacctgagaaaatccggtttttctcgtacgaaggcacgaattgctgacgtaaacggacaacaactgaaatgttttggaatggttacaataccaatttcaagaaaaggacgcgagaaaacgccaatttgtttccatataactacggcgcaatttggctacaatttgctgtttggcacgaactcaatgacgaaattgggctttcttctatacgactcggtgaacaaagaaatgattgaatttgaggaagggcagcaaaatgatgggaattcagctcgaattattttttctacaaaaatcgaacctcgaacgaccaaattaattgaaattggagtagacaaagaatggaatggtaaagatgtgatcatcttaccttcaaacatggaaagcggtgttaaagttgagccaacagttggaaaagttgaagatggcagagtgattgcacaaatcacaaattattcgaccctttcgcaacgcataaatgaaaaaacttatattggcatgattgaaaaggtggacgagatttttgacaccgaaaattcgattttgtcagctgaaatttcatcaacaatggcttacggcaaaaacgaaagtgggaaactcggacgcgctgatcttcacatcggagaaattttggggcatcataagaccgaactgttggaacttataagccaacacaccgaaattttcgctacttctgaacaggaattaagccaaactgacttaatccgtcacaagatcgaaacgggaaaggcgcttccaattaaatcgcaaattcgcccagtcccatatgcctaccgagaaaaggtatcggcaatgattcaagactacttaagccgcggaataattcgctcatcaaattcgccatgggcttccccgattgtgatcgtgccgaaaaaagacggaacgctgagattttgtgtcgattacagaaaacttaactctgtaacagtgaaagatgcatttccactgcccaacatcgacaacacacttttagccttgggcggaaagaaagttttttcgaccttggacttcatttcgggatattggcagattaaaatggatcgtaattcgattgagaagacggctttttcgacggagtttggtcttcacgaatttttggttctccctttcggcctttgcaatgcagtggcaacatttcagcggtttatgacccgactttttgcggaatgtcttaacaaattcgtctttatctacatagacgacgtcttaatcgcatctgaatcatgggacaaacacatcgaacatctgaaagaagtttttaaacggatagaaaatgccggactgaaattgaatgtaagcaaatgccattttgcttcaaacgaacttccgtttctgggccatattctctcccgtgaaggattgaaaatggacatggcaaaagtaaaacctgtcctggatttgcccattccgtccaccaaaaaacaacttcaatctcttctcggttttctcgcatattaccgcaaattcatctacgggtttggcggaattgctgctccactttattcacttttaaaaaaagacataaatttcaagatcggcgacttagaaaagaaagcgattaatacgttaaaaagcaaaatcgtcagtgatgttatgcttcattttccaaacttcgaagcagcgaaaaatgacacaacgagaaaatttattctcttaaccgacgcaagtaaaattggtattgccgcaatactttgtcaacccaatgaaaaaggcaacattcggcctatttactttgcatcacgacaatgtaaaaactatgaaagcagatactgcccaacagaattggaggctttggctgtgcgattcggtaccaagaaattcagccaatttatcaccatgatgcccacaaaaatttttacggaccatcgagcattgataccaatgttcaaaagcaaaaaggaaacgggaaacagccgtgtggacaaatggctgatggaaatgaatgcgaaattcattttggaagttgaataccatgccggaaagaaaaatgtgatcgcagatgtactctcacgctctctcgccttaaaatgtttggattcgccaagtgaagccgaaaaagtcatcatcggacaggttcgccgatttgaaaatggtcaaagacctcaagaaatcttatcgcaccaggaatgggtgaagaaaacgaaagagagtgagctcggatttctatatgatttcctgacaacaaaagtactcccaatagaaccgaaaagtcggcaaaaactggcatcttcacttcacaattcacaattataaatgaacttctttataaatgtggaaaagacgctgaacttcgccttttcgttccgtcttcttttcgacaaaagttgataagagaacgacattcgggtgtttgttctggacatatgagcggaaagaaaatctttcttcagttggcagagaagtatttttggccgaatatgtatttcgactgtgttaaatctgcatttccatgccgaatttgtgcgcatacaagaaacccgaggtcaaatgagcctcctctgaaaattgtagctacggcagaaccgctcgaattggtctgcctcgacattttatcgattgggcccgcgcactcgtgcaaaatatattttggtggctggaaaccacttctcaaaaaatttgggtggcaaccgcccattcca

SEQ ID NO: 75160 - DNA, 1839 bp, Heterodera glycines
atggagacggacaacatcgactttgccttgacctgggatatgcagtgcggcggactcggaccggagcatcgaaattgtgtccaattgacaaccgctgatttggacccagttttggagagggccggattcggactcaaggtggccgaaagcagactgaagccacaaaatgcaaaattcgggcttaaggtcgtcggaactccgttgaaggctttgttggccacttttctgttaaaaaccaacgccatttcttcatctgcagccggcagaaagttggcacaatcagtgattggagcaccagtcgggtttgaactgatcactttcatcggaagccgcgaaaccaaatcaaaagtggccgaattccggtggaagaagatttggaggccatcctcgagaaatggaccgaatgctgtgcagttacacggacgaaattggcaaaatgtggatttggcgccatcaatgtgccaattccgcgctcaattgaagacctcccagaaggagaaggaaaaccgtggaccgaactgctcggaaaagccggatttgtgctggagaaagtgaaggccacgtcggtgctgcgcaaacaccaattcgttacgtcgccacgcataattattggagactcaagcgcaaagcaattggaggacttgtggccgacttctcagtttattcgcgccacccaaggaagtgttggagatgtaatgcctccgccgttcatccgcgatcaacaaattgaacacgacatgctgatcgaccgaatgaaggaccatttcgcgctgatcaggggaaacattcgctatgtgtcgacaacaccgtcaggccgatcgcttctcgaaatttggcgctatgggaacggctacaacaccgaacatgtttctgccgaaggaacgatgaaggagaagggactgtacatgctcaaggcatggttgatgacacaagtcaacgatttcccgggtgatcgagaattggggatcgagaagaaaagggcggagagcgaagagaagggaagagggaaaacggaagggaaaaacgtgagaacgggagaaccggaccgaaaacccagtcaccgccccattccatcgccatttcgtcacaccggccgtgcttttcatcgttcgaatcgtacgccgactcatcacccgtatgcgaatcccgtcgaccgacaccagccccagccttttcggatgccgaatcagcaaggcccgagccgccgacagttccagcgctgaggacatcgcttgtcggagggcgaggatgtcgtaattaataatgacctaattttatttttgattttatgatatttttggcattttgttttaatgtttgtgatttcgtttttgttttctttttggtcctcagactttaatttggaattgcctgatataaaaataataagactttattctgtgtgctgaactgttcgacgtgctgctgagtaaaattgaattatttgtacggtgcactcactcagggacattgcctggtggcatcggttaccagaggtcgtcaccattaatgatgtttgtcagatgggcgtcgtgcggacgacggaatgggccgagcacatcagaccgtttttttacgatttttggaaattggaaagtatcccgccgattccgccgttcatcaacgacagagcaccattttgccgccgtgtccgggttgaaaaaagaggcgaattgctaggattttttaatcagcaattttatttttcgaatttcaacgaagcgtatgaattcgtcatccacggaagaacctaccgatgtgttgagcagtattactgtgctcagaaagcgttgtatttgaaacgtttcgacgcggcggatgcgattatgctggggacaa

SEQ ID NO: 75161 - DNA, 135 bp, Heterodera glycines
caaaaatcgtaaaaaaacggtctgatgtgctcggcccattccgtcgtccgcacgacgcccatctgacaaacatcattaatggtgacgacctctggtaaccgatgccaccaggcaatgtccctgagtgagtgcacc

SEQ ID NO: 75162 - DNA, 260 bp, Heterodera glycines
atggctgttcactctccgtccggacaatgtgccaaaggtgttcaaatgccggattgacgaggatggtggcaatttggcgacgaagctattcaatcggtgcttattattaattatatgcgcgttaggactagtcagcttgggataactcagtttatggaaaatatgctttacgacaatttagaaaaattataaaaatagaaaaaacaattaaataaataaaataaaaatattttttaatttcagtaaacaatatacattaa

SEQ ID NO: 75163 - DNA, 372 bp, Heterodera glycines
atgaaccgacggtaatgaattttttaaaagtcacttattcttgtttgcctaatttattttcattatttcagttggatttgcaacgacgtttggatggacattttcccctgttttgaccatactcaactcggcctcaaattggcattgctttcgccacgtttcaatgcgttggtggacaaacatttcgatggcaaaagcgaattgacaatttggagacgaatcgagattaacaagcgcattggaacaaaaccgaaactgtctgtacggatggatgacaaatttgtgccatttccattgcccgaccgtccgttgcccagcaaaatccgatttaaattccttatgattgagtaatttaaaatcagagatatggca

SEQ ID NO: 75164 - DNA, 1074 bp, Heterodera glycines
atgccgtttgaattggtgaacgaacgaacgcaagaaaagctgctgatgctgactaaaggaaacgaaaatggctttgacgattggttaatgaagcgatgcaaaattattgggaagaccgtggcatttcagcaacagaagaaagatgaaaattggaacaatgtgttcttttggttttttagtggaaccaattgcatcgggtgagcaattaaaaaaagcatttgattttgattaaataattaaaattgcgcttaatttaggccattgtctccgccaccggcagacagaagaagaagacgaagcggaaaaaagcagcagcgaaaaagggccgtcttctgctgacaatgattgagtgacggacaaaagaacaaaaaagggctgggaatttaagtcactaaaaatcttcaaaaagtcgactaaaaaagtcataaaaaatcgcaaaaaagtcataaaaaacccaaaaaagtcacggaaaatgaaaataagtcctgaaaaattaggcaaaagttaaaatcccatttttaataatttatagaataacattttgatcatatttttaggcacttaattttataaataggtacctaaaataggcataaaaaagagattcttccaacaattgagaaaaaatttatccaggttttttattgatcgaaattttatttttcggaattttctttgtatttttcgtcattttcttcgctaaaattcaaattttgcctcaaaaagtcaaaaaaaatcacaaaaaaagtcgcaaaaactcaaaaaaatcataaaaacaaaaacaagtgtaaaaagtcacaaaaaatgcatgtaagaggcttcagacaaagtttagaacactttttaagtcattttaaggccatttagagtcaacaaaaaaaagtcatttgacttaaattcccagccctaatgatcagccacagaagaaatggattaattaagaagaatgaccgatcgatcataattcatcagtgttaaaatgtattttatgaagaaaaaaaagcctggaagaagctttccaacttattatgccgaaaaatttttgcaaactaaaagggaccccatttgttttta

SEQ ID NO: 75165 - DNA, 631 bp, Heterodera glycines
atgctcagctccgcaattatccaatggtggagatgccgacgaatacaaaagcaaaagaagtgagaggaaagtgcaaacggaaatttacaattcatcaatggagagaacggctcaggcacaattcggcccaatattcaaaatattatttaaaattaattagaaaataatatttcataattgtatttaatattaagttcacactttggcgaaggaggtgtgactgcaacaaatgaacttggaaatttgccacaaaacaaaaatcactcaattgcagcgaacggtaagaaattgggacagtacatttattttcacgtgagcaattttgtgtctacattatacatttctgtttttatgctaaaatgaagggttacagttgcacggaagcaggccgggatttctgcttttttcaagggtcggtcccgactttggaaaaagccagtctcagtggggaaaagcacccttttcctggtcatatttgtttttagctacaagacgaagctgattcgttttctcgacgcaaaacatattatgaactaatgtttcctctaagattttgttctttttgtaataatcttaacaaattttaaaaacattggtttaattgtgttggcgttgagaacaacgcattaaa

SEQ ID NO: 75166 - DNA, 557 bp, Heterodera glycines
atgttcatccccagcaacactcacgagctgttcatggccaatgcttggccttcaattccaaccacctctgcttctgctgctggttgtggaccaacagcagctgaacaatcagtcgctgctgatcctacagtagttgatccgcaatttcacatcgcaattttgtacggtaggataataatagtaagttttgaatggaaaaaaatttgccaaaaaacaaaaaaaaaaattagtttttttttgaattaaaaatttcctgaaaattttcccagatggacggcaaatcggtcctggttgtctacaaaatgttgccatgcacagcagatgccttccagaaaaacccgaattaccatcgttatgttgaaccaagcacaggcgaagtaagagcaatgaatgtgtccggccgaccctacaatttggcgttggccatttttggggtgccaacctaagccttggcattcttgaattttggccaagatcttgggtcggcggctcagggcgtggttccttttttggcgccaaagcccaagtttttggactttgacttttttctttgccaa

SEQ ID NO: 75167 - DNA, 5253 bp, Heterodera glycines
tggatgtgatataaaaatttaaaaaaaaagaatcgaaaatgggaattatcccttccattttaaatatttttctcttcctctaaaaaagacttcattcctaaatctgcaaattagctcattaattaattttgtcaatgaatttttgtaaagaaaacgaaaacccattcgaatttttccaaaaaaaaaatttttttttcctttaaaaaatctccattgaagctggctagattccccccacccgaaatttttttattgaaaaatttctaattgaaaattaaaaaattaaaaaaaaaaattcgggggagcgagaggggcaacgattcgtaggggtggggactactgacacatgaggagcagggttgttccgggacgagaaaaatatcgggccgtgattcgggtcgggtctgccgaaaaatcatcgggtcgggttttggaacgagaaatatgtcgggtttcgggtgacccgggacaaccctgaagggaaggagggaacggggagggggcgacagggaggtgggaaacgaactgctcccggagcgctagctagagctgcccacccacggggttgcgtggaggcgcgggttcgattcccacccggtgccgaacattttgccaatttgttattattataaaaaacattttaaattcaatcagtaaacactacattgatcgatgagcaacaacataggcggtatcttcagcagctgaacggagaaaaaaaaagaaaaagatgcgcacaatcggcacaaatgccgtcgtcaatgatgcaaaacaatggaatggagccaacagcaaaaatgccgaaacttcatgcaatggcggcacgaacgccagcagtagatgcacacgaagagagttaacagcgatttaaattgaagcgctggtgtggcatagtgcccaatttttgtgacaattggcaacggataactcatatgaacaaaaataatttttgaattaaattgattttcatgggcagtccttgagggattttgtactggattttgcatcacccggatttcggattttcacaagaaaattctcacccttgagcaaacattttcaagatatacactcataaagactgaaaaaactttggaaaaaatagaaaattgtcaaatttttcgcttttcgtctcaaaaatctaattcgtattcaatttttggtaaaatttgtttccatatttaggaatattttgtccatataaatcctggtcttcgttataactaaattttcgattcaaatttctcaaaaatttcaattaaaattttttcgaccacccctttgccaattgtcacaatggcacacataaatggcgcaaaattttttttttaactaatttgtataattcatttaccataatcatgaagcgttttttgattctcaattacggtaatcactactataattttcatacctatctctttctgtttaccaagtgatattgttttaacttttttttcttgttttcctgatttaggtatatatacattaattttttcaattatttaaataattcactgtgtaaaattactaatttttcaatttaatttaattttgtttaatttacatattaatagaactcagaagaattgtataaatgatattttttaatgaaacccaaattaaaaaaagaaataaagcgacttaaagttcaaaaaaatttattcattaactttcaaatttaaacctgactgggccagggccccgccgggaatttgccgttactcctctcggtcccgggttttttcgggaggtgggacggggggggggggggggggaaacgaccggggggaaaacgacctggtcccgaccgcgggacctaaagtctggtctttgtcctggaaatcccatccccattcattgaaaaatgccgttctctgatttcaactataatggcatattgttttaattctcaaaatatcgatggaattttcacccaggccccgcgcgacattttcgaaatggaaaactcaatttatgtatttgtcgaatttattattttaattatttccttggcagatggaccacccaaatcgttcatttttgtaaaacaaaatgacagccagcatataaggtacatacatctgtcacaacattaaagcatatgtaaacaaattatttttttttgaacgaacatacgaataaaaatgtttgagcaaatgaatgatgggataaattaaagaaaaaatccaataaaattatggccattaaaatttgaaaacataggcatccatggccatttttaattaaaaaagtgtaaaaataaatcgactcttaaagctccaatgaaagtagaattaaaatttttaagaattataaaactaatttggatgattaaccattttaaataaaagtttttaattagggttattaatatttataaaaaaagaaattgaggaattatttctaaatatttaaggtgaatttttttaaatgtctcatataagcaaattgatcaattttttggcaatttggtcaattattattgaagaaattaactgtgaacaaattaatgaggtaaaaattaataaaaaaaataatatttttaatttagtgtataattatttttattaatttgcagaatctttctgttgaaaatcaaaaagatgttgaaaaaatgaatcaagctgaaaggttccttccatataatacttaattaaattaaatgaattatttttatttttaaaataaataaaaaatttttcatttttcggatagatataattttcatattaagtttatgccgtggaaaattcacgatttctcctgaagcacaagcaaaattgcattgctatttaaagagggataaggtaactataaaaataaaaaataaaaaaaattatattatctaaacatatttaaataaattatcgattatttttttattaagccatttctgttgttggcaccgcataaagttgaagttgttcatttggaccctcttgtgctcatttttcgcgctgtgatttcggacacagaaatttttagcatcaaaactttggcctcgaaaaaggtaaattccggaaatgttttgggaaatttcagaaaaatttttcagctttgtcgtgccaaagtggttgatccaaactcgggcaaaactgcgcttgccaattacagagtcagcaaatcggcatggcttaaagatggagttcaccaagtggttgaacggatcacaaaacgagttcatgtgaggcattcagaaaaacaaacaaaatttttatgaattttccacgcaccaactaaattttagtcagtctgtattaccatatatattttcataaatgttactgtaataggcattggttgacctttacagtatacttctattacggtttcgaatgcataaaacaataaaattattcattttttgccaagattcgcgcgattatttctcattccccattacagtatcaataccttaaaatacagtaccgaaaaattctctacaggagcattttccacgcataagtttaggacatgactaacttggacacggaatctgctgaggacctgcaggtggccagctacggtattggaggtcattatgcaccacattttgactttttcagggtaaggggacaaaaaattcaaattgtttttcaaattttatttcgaattatgagtgaatgggtaacaattttttcattttcaaaagcatttttcgatttttcaaaattattttaatatataaataaccatacaatttatttataaatacttttttcagtaactttatttagtctaatgaagtggacaaacgaacttttgagctctatggcaaccgtatagccaccgttttgttttatgtgggtgaaggctaaaaatttttcaaaaatttcaaaaaaaatttcacagttaacccaaccccacgatggtggttttaccatttttacggacctaaacattggcattgaaccaactgaacatgacgcgttgttttggtacaatttgcgcagtgatggaagtgttgacccacgcacgagacatgttttgcaattttaaattaaatataatataatttatttaatagttttaaattatataatatttaggccgcttgtccagtgctcagcggcaacaaatgggtggccaacaaatggcttcatgaacgtggccaagaattcattaggccatgcccgctcaagatggcacaacaaattgatgaaaattgacatttatgaagcgagggacaacgggcagaaaaaaaacaaacaattttgcgtttaaatttgttttttttgaccaaacacaggttttcctcttctttttgtcgcgttagttaaaaaaccttttgtatcatgatacagaccaatttggtagctttttattcccctgaaatccgggaaaagcactttctttaccacagcagcgacactttgggaatggttggccagaaaaaggaagcagcaaaccgcgacagaaaagtgatcgtatgcatctctgaaaaaaaaaaatttaaccttgctggggtgctaggtcgttgtgtaaaatccaccattttagcgatttttcgacaaaacatatggtataacttttcttaaaagcaatcaaattttatattcttggacccctaaatcatgcaaatttaaattttcggaaaaaagatgaaagaaattctgaaaacactactttttcaaaatcccttcggagattaagtcaaaaaacattgaaaaattaaaacaaatttatttatttatgaaattcattttcatgctaaattattcatcaaactttctttttcagaaaaaattggttataatctaataaacaattagggttttaattattttttgctttcctaaatctggatccaggggtccaggtcgagctcaactaatcttacaataagacaaaaataaatttatttcttaatatttgaaaaaaatgaggttggaaaatgatgagattgcagggaaagaatgaccagcagctatttattagaacaatttgtaatttattttacattatttattacagttaaacgtgattaatgacatcatgacaaaattgggaaagcaaattccactcctaaaattggataatcaaataaatggctctcccctgttgaagcatttcatgccaattttggcaagcaattgccatcagggaattatgccgaaattgggcaagcaaacgttcccactatatcctcactttttcgttaaacaaagaaattccattacatgacataaatcaaaattggtaattcctgcaaagaaaagaaaatacaggacgaattttaaggacatatga

SEQ ID NO: 75168 - DNA, 3406 bp, Heterodera glycines
aagggtgccgccgacgacaatgaccgcaccggtggcagcgttgccgccatcatcaacagcgatcacaattgaaccgccgcaacaacagtcatcaacaacgacgacggcggcacaacatcaaaaacacctccaccagcaccaagcgcgagcagtatcagcaacatcatgcacatccgaggagtctgaagagagtgtgcccgattcgtggggtgcgcgatggggagcgggggcataggatttttggtcaataaaagacaccgctttttgcgacgggaccgtgaaacagttgtttcagtcgggatctcacatatccctcatccattcagctgggtgggatccggtccaagcttgagattctgctgctaaaaatcagcttatctttctattagctgtactatgccctctggggtcagttccccccaccatatcgttccctgatttttttttttaattttaaaacagaaaatcttcaaaaagaatatagatttttcaagaaaaaaatgtttgaataatttttctagcgattttttcatgatgaatatattgttatgaaattttttaaagaaaatttcaaagatttctaaaaatattttttacggctgcggaatgagtaaaacttttagttttaataaattttaatttttctctctctctcgctctctcattcatcccttctcttttcagaagagggacgtgccccgttattgaggcgatcgccccgctcgccgctggccgacgacgacgacgaatgggcggcgccgtccgccgatgacagaaccgccgggcacgaaggcgtcgcaggcggcacggcagtcgcggatgcggcagcagctgccgacgccgccgcttcaccaaaagggcggcgacgcattccacgcgagcgacgaaaagccggggtccgtccgctgttctacccacaatttagggggcttgggattccgaaaattagaattttaagtgcagggattccatgaaaaatttggaggattcgacagggtcttatggcctcgcttcagttagcttagtagttggttcggcgttaaaacatgaaaaaccctcagaaacgtgaaatctaaatcattttttaaatttttttgtttgtttatggcattttttcgggcttccaacaaccttagttctaaaattcggttaaaataaaaaaaaacacaattttttcccaaaacaaaatgaaaaaataaatgtaagagaaaaaacggtaaaatttacaacaaaaaaatggcaattcatcaaaacgcaaaaaataccaaagtgttgtgccagaaaatagtgtttgttgatgattgataacggataatgcccgttcagtacgccttcctcatgctcgttttttgcggcacactcaacgacattgtgctgtcctacatcacgagtggtcccggaaacgcacctttgccggacattgcgttcacttatctcccatattggccctgggcattggtcgtgtcggagtgcctgatgattacgtgagtttgttgttgtttccacggcactacggttttcggcattacggtacaaatttcgttagtcaataataaaatagggtatttgcactttttcgccaaaatcgctgccaaaaaacctcgaattttaatttttttttttttttttgccaaaatcgttaaaattttgactttgtatttaaagcagtaattttatgtgttttcagcatgttctttatcatgatgctcattgcagttctgcacaaacatcgttgggtggtgttaaggtgcaattttttaccgtttgtaaatatgtcgacgacacccatgataaattcctataatcgatctgatcatgatcattgacttaaaagttaattcgtagatctctatccgatctctttcccatttgttgatcactagaactttaaattttgatcggggcactattgtctttgatcacttcacatcctctaatcactcatcaactttctcggctgatcactcactaagacgcatttcctttttcaccctcccttgtcttggtcacttttatctctgatcacttcactctctaatcactaatcatcattcattgtgtccctccccagacgcattttcctgatcggctcgctgctttaccttggccgttgtgtgaccatgtttgtcacccaagtacccgttgcggacaccaactattactgctcgccacggttgaagcccgaacagcgcaccttttggaacattttggcccgtgcactgtccgtcgttgttggcctcgggttgaaaatcaacggacggcacacgctgtgcggtgactacatttacagcgggcacacaattgtgcacgtcacctgctgcctgttcatccgcgaatgtgcgtttatttttttgggtgccaaaattttgaaccgcaaattacccgttttgttggcaccctcagaggatggggtgtgggaaaacgcacccttcgcaaaagttataaaaattttcccgacggcgctgcttctcgacatggggacaattcccttccctcctcgcgcctcccccccccccccacattgtttcatcttgagaaattaaaaaaataattaccaaaacctaagatttttcacaaaaaatgcctacaaattttttctacctacgcaaaaaaaacttagaaaggttttggaaagaaaattgcaaacccgaaaaaatgatttcgcatattttcaataagtttcttggttttaacaatttctaggaatttctatttttcatttttttattcaattaaaaaatttcctagaaaaataattttatattaaaattttaaattccgcccccaattccatgcatttccattttttcagacagtccgcgccgttggcgtctgctccatttgggcgcactttgtctcgcctcggttggcgttctgtccctgctgttctcccgtggtcactattccatcgacgtgatcattgcctattgggtggccactcggctgttttggatttaccacactttggccgatttgcccgcgttgcgcaacgaattgcagggccgaaaccacctgacgaagacggtgtggtaccgactgttcctgtggatggagggcggcgtgcagcggccaatcccgcgaaagtgtgtgccaaaaacaaacaaaattactattgctaattagtctcattagggtgccgttgccgggatttttaaattaagaaaatcccaaatatgtgtgtagctaagtacataattgtggtcgaaaaactggcaaaaacaaacagtaggtataaattttttggtttattgcattttgttaataaatatttcaaaaaaagtccaacttaagtagctaaaaatccgcaccctgctaattattagagctaggaactttgaaaaagtcgggattccgattagtatcagaccgggcaatgataggattgaaatcaaatcccaattttgtc

SEQ ID NO: 75169 - DNA, 774 bp, Heterodera glycines
atgagcaactacacaaagaaattcggattgacgaactatgatgctcgattatttttacgaagtatttaaataaaattggtagagattccgctttttaatctgtaaccgaaatgccatttttagattgaactaaaaaagcaataaattaaataatgaattcaaaaagtttctgaatatatattataagcaagtactaaaagtaaaaccatattgcaatagatgataaatttaaatatataaaaaataagataactttaatcatggaagaattggagaacctcagccatggcccgttggttccacttttaatataatcttcacagaaaacaaaaacaaaaatcaatttgagatttattgcataaggaaaagtttaattgtaatacaaaaaatttattttaaatttcggtcaaaacaaaaaagaataaattgtatactttaaaaatagaaacataaattgatcatagcagccattcccgaggaggaggcgctgatggagaatgagaggaatacgaaaacgaggacattgggggcgattacaggactgttattaccagtcgacaaaattaatttttttctatttggtgtcttataaatataattaataaattaaagatattgtagaaagggttccatctcgaaaagtccacttgggatcctatggaacacttgaaggagccaaagtgcttttagagaaggtaactaaaaaatagtgaaataaaataaaataatttattagaaaaaaaccaaaacaccttcaagactacaaaaataata

SEQ ID NO: 75170 - DNA, 177 bp, Heterodera glycines
atgcgcgtaaggaaaaagtgacgaaagaaggcatggttaaaaataaaaatataataaagttaaatttacaaatatattttaaatttgaaggccattgtgcttcgcaatctacataggattatgtgcaagattcttatggcaatgcgaaaaattgatcaatttttaacgataatttaa

SEQ ID NO: 75171 - DNA, 1065 bp, Heterodera glycines
atgttcggaaatggaagtcggaaatcggaattccgtgccatccctgatgtgtacgttttcgcgacgcaaaaaaaaatttttttttccaatttcaaaaagtgtccctttttttgcttatgttcacaacagaccactgcttctccggctcgaaaagctatgccccgcctcaattgtctggtcgacaaaatttgcgcaaagttcgaattgtttattttttcgcattaaaataaaattgttaaattattatttgttttaaatagggttggtcgggaccgagaattttgggcaaaaccgggaccgggacttttcgagttgaaaaaacccgggactttttggcgctgggaaaccgggaatttcccggtctcggtcaaaaccgggacttcggtactcagttgtccgtgttttggtccgaccaatcctagttttaaataaacaattctgaaaatgcattcatttctcggaatttctaggattttttgttggtccttaatccggcacttatttcgacaaattttaaaaaaaccggattacaattccaacaaaaagtcaaaagaaagatatataacatgtttaaatacgtaaaaattacttaaaaacatcataataaaataataatttatatttttggacataaaaaattaattaattaaatttatgtttttgctcgaatttcggatatggattgttcggaactcatcgagatttaatcccttaattccgggaaaagtaataaaaaaaatttttgcaaattttcagaaaggatgagaaaggattattggtgcataagctgaagcgacgctttgcactgtttgccaaaatggatttgcaagaaatggaatgttgggaattgcacgaacgcttggccaagctaaaagtggccaaaaagaagaagaagccgaacaagttcgagcggtttgacgccgacttcggcaaggccatgatgaccgaaggcccagtgtttgtggaggatttcatcaaagcgatcctcctctgctgatcacttgctaatgaggggctaattaattgaggggggaggggacgaggaggcgataaaacgtacataaa

SEQ ID NO: 75172 - DNA, 394 bp, Heterodera glycines
atgttttgccgcttccccctccccctttccttcgcctcctcccttttaattctgctactttcttcgaatttggtgcttcttgttgggggtaagtaagctgcttacaaattaacaaatgaattggcattggcattgaaccgtttcaaaatgtttgtgcttttttaggtgtttttaaactgttggatggaaatgctaaactcgtgagcaaccctttggagaatgtggtgtatctgttccaattcccgagaacgtcgaccacgccgagccaagcgccatacaatctgatggtggagacatggctgcattggaagcacatcccattccatgtaccatattatctctaattatcccccggggtgattattgttcaacttcctcagaaagggggggatta

SEQ ID NO: 75173 - DNA, 455 bp, Heterodera glycines
atggtcgatcgtgaggccggcttagaatggatgactaaagatgaggcccttgtggagatcattgtgccgcaaaccttcaccgatcgaccgcttactgtgcagcttggagaggacggtaacttcaatgtgagcgtgaaccaacagttttgggagcagtactttgacgcgtacaacgccaaaggacaaactgagaaagtggcatttgtgaatgcttttctgaagcctttaaatgggactgatcagaaagaggtgaccaaaaattgatcagcatttggcgaagctatcgcatttgtcggtttcaggaaaatggatcaactttgacggacggaaggctatgggtcgacttcagtgcgtggcttcgccagaatgtgatcaaacgcacaatggaaacggtactaatggtgacggtgaacggacagccgaatactgcgaatccagggaacagtcaagcgaag

SEQ ID NO: 75174 - DNA, 2237 bp, Heterodera glycines
  unsure (1)..(2237): unsure at all n locations
atggtttcagtgccaaaagattaccgagcatggaaagcggcgataaaagtcggaaccgacatgataatgtaggtgatcaaaatggaaaaatattaaatttggtgaataattttttaaattttaagaaagtttaaattttaagagaaattttataaaaatattttttgaaattttccaatcattgaaaaaaaatattcaattttttctttaaaggttttcctttatgaataagtaagattctaaaattttttcttttgtaaatcctaattttctctcaaaattctttcgttaaaaaaaattcaaaagtctctttataaaaacgcctaattttttaaaaaatctttgtcataaatttgtgctttttttgccgtgattgaaggagcattttgcgctaacaaagaatttttgacgtcaaatttgttgtgtaaaaattttcagggcattttgtttcgcttaataatttgtgccgttttttgaatttctaatttaaaatttgtttatcctttttaattttcaaaacaggcaacacacatgcgttcaattcaaaattgttaatgttgaagaaaaggacaattacagcgaaggcattttaattagagaaattgagtttgccgaagctcacaaagttttaaagacttgccgtaagttttaagaaatgatttttaaataaatcagaataaaaaaattgaaaattttggaaaaaattcttaaactcttgaaaaatagcgatttttttttgaaaatccgcgcgaattgcagagtttttttttagttcaaatatcttttgagattagggttgctccccgacccctcggggggtaaaatgccggggacctcggggggcgacatgtcgggggtcggggcggggaggagctcaattgtcgggggtcggggaccggggagcaaccctatttgagataatcaaaaatttagtctttggagaatcgaaggctggaaaagttggtggttggcaagaacttaagcttgcgatggaacacacttgtccacatgtgagttttcaattaaaaaaaaagaatttttttaataatattaaatttaaaaaaattgccattgacgctgatactgtaaatgaataataatgggtacggtattggcatggcaattaatgtttgttgttgatgaatttgaagtgtcaagaaaagtttaaaaatatcaatttaatatttccactggctaactatactgtaattcaatcaatgctatgttggtacggtattgtctgacaactattagtgatgatattaatttgcagttacaaccaaacatgtcgggggttgcttgtcatgaactgttgcacgcacttggcaatttgcacgagcaaagcaggagcgatgcgcgaagctttgtcattttgaggcaccaaaacagcgtaaaaataatttaaattaaaaattatacaaaaattaaatttttcaaaattttaatagcaatcggatataagccacgacgcagaaaattttggctttggttacgattttggctcggtgctccattacggtggacattatgacgaagaaaagtaataatcatttttagaaaatacgaatagaatccggaaccgggatttctaggctcccggacttttcgacaggacatacaaaaataatggacttttcgacattaaacataaaaacaaataaatcttattaaaataaattatattgcttgtcagttttactaaatttcttttanattaacatactaatatgtattgctanatcattattactaggtcattcatgatttaaaaaaaactatttatctcaatactgatttggcatcattttttataatatttctgtcgaaatgtcctttgctctaactagagttgcacgggaccggggaattttgacaaaaacccgggaccgggactggcaaaaccgggaccgggatttctgtttttccaaaaatcgggaccgggacctgaaaaaccgggatttcccgacccggtcccggtcccgtgcaactctagctctaacccagaatgttcaccaatgaaaaattttcgaaaataacacaaaaatgcttaagttttcggctcctgctaaataatgagactacttttaataattgttattaattattgtttgattgcagcgatcagtactctctgatcactctgccacggttttaccagcaaacgattggccaacgcggcagaatatctttcaaagacgcggcgataattaaccaaatttattgcaaaggcaaataaa

SEQ ID NO: 75175 - DNA, 318 bp, Heterodera glycines
atgttacggtctctgagcatcattttgttgattaacattggcggttatttgatcacgctggccctgtaccgatttatagacataattagctctatttttgggtaataaaaaatattccaaattttcaaataatatattttataggtctttaattcgaatttggcaaaatgaatgctttcttggcattctgttgaatttagcggcaggatcaaatgcaattgtgctttattttagcaggtcatttattattttttaaataatttttatgcattagaattttattgtttaagtactgaatatcgtcatctgtttaataaa

SEQ ID NO: 75176 - DNA, 771 bp, Heterodera glycines
atgctttcctattgggttcgacgatggcgtttcaaaattcctgagataaagaaaccaaaatgcgaacgaattagcaaagaacggcgtcaaacaatcaaatgtatcagtccgaacacaaaagtcagcttatatgagcggtgggtgatgtacgagaattttcaaattttttaataaaactattaaattattttattttttttatatataatttaatcaatttttttcttaattatttaggacaggactattcattgaatttggtttaccaacaatttttgtttgaagaagcacaacgatttcaaggacattttcctgttgagtgaacaaaataattctataagttgatggatcagtcacaaaaatttacctaaaaaaattacatgttttcatgttcctaaaattagaagccctggggggtttagcacctttgtttgcgctgatcaacaacatactggaaattcgtttgtattcattttgctccgctttgttatttcgttcaattttaggatgatttaatttcataagaaaaaaaacaaaaaattgacaaatacattttctctaacgggtacatccctccaagtcttgaaaattcgaattcctatggctgtcaaaaaattttaaaattttatcaaaattcttaattaaaattaattcagaaattacatggtttccttaaaattctctttttcatttcctaactctatcaaataattgattgatttcttttgaggttttttcacactaattttaaaagttttatttttaaataaa

SEQ ID NO: 75177 - DNA, 2769 bp, Heterodera glycines
atggtcgtgtcggcgaaacaggtcttcaacgagctgttcatcacttcggaactaggaaaaagcattcctacgttcatcaagctagtcatggcgaaagtcgtctgtggtaggtatttattaaattcccatattttatttccttattttggcctttttccaaaaaacccttattagaacggtccccatcaactaattttgctttttttgaccactaaagaccgaaaaaattttcaaaaaacatttttaagcaaaattttgtcgaaaataatgattaaatttaattcttttgctaaaattggttaatttatgtaatttagcgaatttgaagaaactttgagaaattatacccctcatatcgtaaaatttatgtccatattttttgcaattttatgtccatatttcgcgatttttagtccatttaattttacaccctagatatgagcgttcaaacaaacatttttcttttaactcccaaaaaatggctggattattgaatgcattatatttttctctatcgatatgcaaaatttaaagaaagaaagtgaattcaatttttctcttaacagagataaagaaacaggacgccaaatttgtagccacttttaaattggaatttttcattaggaaagttccctggcccactgttggagcaattcaacaagttcaagtatttaaacgagagcgcgcaaaatctcccgccacttgacaacgacgccgcaaaatttgcgctcatgggaatggttgccagtggcgacaccctcgagtcttacctcaaaaaggaggtaaaaattgaccatgcttggacttttctggcacaaaaggccattttttataaataagcagaaaattttcggtccttcaaagggggtgaggttttttgtcccgcttagtgatcaaataaattttcgttgataatttttaaatatttttttttcaaaactgatcacttttttttatcagttttgggagtcaggaccaaaatgcaaaaaaaaaaacccaatcacaaatcggctatgctctacacaataaaagtttcacctattctcaacatgaaaggtgatttagaccatattgtgtagagcatagtcgatttgctattgtaatttttttattttttgtcttgcccctaaactgatcaaaaaatgatcaaattcaaaatacagcaaaaatggtatatataaaatttttcatttttagaagaccaaaaatgaacaacggtactccattttccttcaaatcgcctttgccctggcggttgctgaaaaaaaatatgattttgaacatcgagatctccataccggaaacgtacttgtggagcactgtcgggacaatgagaacattcggtaagctgaaaataggctcctagctaaacaaattttgggagggagaaacctgaagaaaaaatcatttaaattgttgttcctaggatccacaattttctgcacaattgaagcattattttacaccaaaataaatagttgttaaacgaattctaagcttttctccagaaaaatacatcacttggaaaaaagttccaactcttgttcgaattcgggcccagttgacagaattgagtaaatccgagttcaatttcataatcagcacccttgaaacctccttaaaactggtttcagcacaaaaaaaagaagttgaaattagggattgcaattatttacgattgccaaattttcaaaacttatgtaattttagtttcttgtacggaaatcagcaatttgatgtggcctcaaaaggggtgcgtgtgacgatcattgatttttcgttgtcgcattttcgaatcggtaaggccttaaatttttgacagtaattttgtgtgttcaaacaagatggacatttgttcttcgacgacctatccaaggatccggatcttttcacaggcaacggcgtcagctgcgaaaatggcgactaccaattcaacatatacaggatgatgcaggagaaagtcgggtagagagaaaagttttttttttcacacaaatattttttagccaaaattgggctcgtttttggccccaaacgaactgtttttggatgagctatttggctgtgaagctctttgacaacaccgtcaaggagaagaaagaaaagaaggcgatcaaaaaattgtttaagtttcacatacattttaaaaaaatcgaagattttatttttgaccctgattttaaaaatttatttgcttcaaaataaaataaaattttatttattttttgttgatattttaagtagtaatgtatttttgaaaaagcataattaataattgatatttatttatcgtaatatttgctgatttcaattccaaataaaattttattttttctttgtttctatttaagtttaatgcatttaattaaccgaaatttcctttcttcccccttcactacgcaaaaaatgcaaattttttgaggcgggacgattagctattgccaattttcggcttttattgcgataaattgatttattcccgaaaaagcgattaattgaccagttttgtaagaaattttcaaatggaattgggagccacagactttttttaatactaattttaattccttttattcagaaatgatgcacagcaacaacacattggcaaatggctgttctacgccctgttggtgctgttgttgctcttttccggctacacattgtacggcgaccggtgctttcggtttgccggcaacaaatggtggaggaagtggtgccacaaatccatggaaagaaatgcaatgggaaaagagaatggaaccaaattaa

SEQ ID NO: 75178 - DNA, 153 bp, Heterodera glycines
attttccttttcagccctttgactttctgtgtccctccctattccattttctgtgccgtcggctgtcagtgctgccaattcaaccacgcggatgaccacctcttctcaatgccagtgctcgagtttctgctatgaaaattggtatcgagcgca

SEQ ID NO: 75179 - DNA, 3153 bp, Heterodera glycines
  unsure (1)..(3153): unsure at all n locations
atgtgcaatgccgtaaacggaagcgacactcgcgcactgctgatgaccgcaacgtcaacggtcttcaatccagcacagccgcatctcagcatgactgcggcaattttcatcgatccaggcagccacagatcattcatttcggcaaaggcagcacagctactggacctcccggtggtccacaccgaagaatgccatttgaccagcttcggagaacgcgaaccgaagagatacatcagcgatctggtcaagctcggatttctctgcacaagcggggaaaagctcatcttcaacctcaacgccatgaaattcttggtcaacgacatgccaatgattcaactgtcagagttggacaagacagaattgagacaacaaaagctcaatcctccacatgagcaacgtcaaccagacatcatgctcggaattgatgtctggcacgaactgcaggttcaaccaatcgaaaagctgccaagcggcttcacactgtgccgttccaaaatcggcaaaatcctcagtggatcaggacgcatcgaaatgcaccaagcatcaaacgtcacatttgtcctgtcagtccacggcactgaacaagaagaagccaatcaatccgtcacgttcgaatcaaccaaagaagataaggaagtcttcacatccgaagatgatgtcaaaaaggacgagcagctcaacaacttcttcggattaaacctgatcggcatggatgacacatcaacaccaactgatcaagatcaagtgatggtctacttcaaaaagaacctcacattcgtcaacaaccgataccaagtcgccttgccttggaacgacagagtcgatgctcttccaagcaacatacatcaagccaaggccagactcgtttcattgatcaaaaagctgcgcagcctcaacctgattgacgaatatcagacaattttggacgagcaagttcgacagtcggtcatcgaatacatcggcccacctgagtcaccatcaagtgcatggccactgcattttttgccacacagagcagtcatcagagcggataaagcaacaaccaagatccgaatcgtcatggatgcgtcagcaaaaccaaagaattgcccatcagcaccatccttgaacgactgcttgcacaccggaccacaactgctgaaggatctcaccggcatcctcctgcgcttccgacgcatggaacatgtaatcctggcagacatcgaaaaggcatttctgcaacttggcatccgatacgtggacagagatgcctgcagattcatttggctcaacaaccccgagacagctgagctcaatccaatcgaccactccgaactgcgcatctaccgattctgccgtgtcagtttcggcctgacggtgtctccatttctactcaatgccacactacgggagcaccttgcgctattcgactccgacctagcaaggcggatcgaagagaatctgtacgtcgacaacatcatgttcgacgccaagccaacggaaaagcttcaagatttggtgacgcaagccaagactatcttcgaagcagcgggcatgaaactccgagaattctacggaagcaacatcgaagagctaaaaaagctgcaaccagacgacttggcaaaggacctcgaagacaacaaggtgctcggcattcgatggaaaccaaagcaaaatcggctcatcttcaagttgccgatcttcgaaggcaaaatcacaaagcggacaatcctatcgcaaattgccaaagtctacgacccgctcggactcatgtcaccggtcctactgccagccaagctcattcttcaagaagtgcaaaacatgaatccaaaatgggacgacgaattgccagcgaacatcagcaaagactggctcaaattgatggcacagtggctcgacagaggcgaagcaatcacaattgaatttccacggcacatccaagccatcgactcagtggaattccactgcttctgcgacgccagcaaatacggcatgggaattgccgtgtaccaaaaggcaaaaacgacgattatgaaggatgaatgcaacctcatctacgcaaaaagccttgtcaaaccaatcaaagtagccgcacacgacggcacaattccaaagctggaacttcaagcactgactctcggagtcaaggcagtcaaattcatccaagcgcaaatcaaatttgccgatcatcaagtcatcatgtggacagacagtcaatgctcagtcgaacgacttcgagaaaacaagcgccaagatcgatttgtggcaaatcgattacaaaaaatccgagaagcgaacttccaagtccgacacgtcagaaccgactcaaatccagcggacatggcatcaagaggagcggatcctcaatgccttcgatcatcactgctttggcgctttggccccgtttggctttcgaaagcagacaaatggccaaaatcaaacgtcatctaccggcccggagatgaattcaaagaagtagaagagccaccaatcatcgaactgacaacaacacctgttcatgtcgaagaacagttcaaaccatcaatccacttcgaacgattttcgaattggaacaggctgaaagccaccgcagcacacgctatgcgcttcatcaaaaagcttcgcacaatcgaaaacggcacaattagtgaaccgcatcaaaacaacaaaccactgaccatggcacaactgcaacaggccgaaaattggatcttgagagaagcacagcggcttcatccaccatccaacgaccaaatccgagaattgcaactcttccgacaagaaggaatttggagatgcggtggacgactcgaggaagcaccggatctgccatacgacagtaaacacccaatctttctgccgccacacgcatggataaccaagctcatcatccggcattatgacaaacagctcaaacattgcggtccgagaatactcctgtcaacattaagagagaaagtctggataccacgcggacgcaaaacagttcagcaactgctcaactccccgcaacacggatgtcttgaatgtcgtcgagaacgagtcaagccgtacacatatcctgaggcatcggatttgccaagggngaagagtcagcgaagcacgaccatcgacaaaaacggggagtggactactttcgtccactcaaggtcaaacaaagcaatgacgtggtga

SEQ ID NO: 75180 - DNA, 123 bp, Heterodera glycines
ggtaacctacacaccgtttcaaaaacgagaaatgaaccaataaatagagagtgcagagaaaaaaacatctctcattttggcgtactattttttttatctctgttaatagagaaaaactgaatt

SEQ ID NO: 75181 - DNA, 846 bp, Heterodera glycines
atggatattattacacattgtcatgtatgttccggttaagcatcgattaaataaaaagcaagctaattgatttaatgatttcataaaaacaaagcaccccctacatatttgctctcatgcatcttaaacgcccacaaaccaaaaacatcagccaaaatttgtccatttataaggcagtgtgtgatttgacaaaaaatattattcaaacccaacatagattataaaattcacatgaattccaaattattagttgaataggaaggtaatcaaattttgttaaatgatttaataagacaaattttcttcgaatttttgtgactttgtctaatcttaatttaaaagaaattaaaaaaacctcggtattctggaaccctgactttaaaggttgtttttttctgaaatagttcattttagggggtattcttcgtatttttaatcaaaagttggcgtgatttcaaatagggttggccgggtccgggacccgaccgggtttcagatccggatacccggttttttcaagacccggacccggttttttgaaaatccaatacccggtacccgacccggtaggtccgggtccaaaagtacactggtaagaatgggtctgggtcaaattgttaagcaaatttggtaaaaaaaaattttaaaaaatgcgattaatatttatttaaaaacgggactatcaagtgcacctgtggcgtagtggttaatcttttggattcgcttctttctttcactggttcaatgctgtctcatagcaatctctttaaacattttttaaagatttttgttgaaaacttttattttatcattaagttaaaaaatgctcaaaatttttttaataaa

SEQ ID NO: 75182 - DNA, 1437 bp, Heterodera glycines
atgtacataattaaacgattcgcacaccacgtaaaagtacctttttggttgagttatttctattcggcaagtgttccctccgggggttttgaagtcgttgatcacgattatggtctcagatcgtgatcagaaattccgaaaactcaaggacacgttttaccgaatcaaaatgccattcatttttaattttgtgtttcaattgctgtacacaaatccaactcttgtcagtttaaactagagtgccacgggaccgggaattttgggcaaacccgggaccgggaccttttcgggttgaaaaatcgggaatttttggctgggaaaaccgggaaaaagccgggactagtcccggtcccggtcaaaaccgggaccttggtactcagttgtccgctaccaggtcccggtcccgtggcactctaatatttactacgcaattttgtttttttcaaaaattcatttatttgtgacaaaacccgaacaatttgttgtgatcacaaatgttaaaattttgttgtcaccattgattagtaaagcaaaaataaacaaaaaaatttaacctccgtttgaaccgacaaatttggcataaatttcgctctagagtttttaattgtggattgcatatttcggaaatttttggttttatttcgggtttctacggttgaggatttttttccccctctgctgattaaggcatctttttgaaatatttctagccaacattaacggcgacggaacatgctcgacaacaacaagggaagccattatcagcggatcggcaacaacatgacattgatcagcaaaaggattttgatcagtgccaaaatggcgagattgaggaccagaatacaacgccggatattttggacctcagccttggtcaacttgatgcgatgaatgatcaacaaaaccttaaatttactggtctgaatcggtcgcaatccgatgctttctattaccacgatgatcagctgtgttttgctcaaaacaactgccaaaatacagcgcatcgatccggaaagcctaacggcgttgggcaggcgtcgatcacttgtgctgatcagcagcgcagtcgtgccaacactgtgaccgctgctgatcagcaaattttcatgcactacaaaaatcagtgcgaagaagctgaatgggcagactgtgagaccactttaccattgtcaacaaccgcagagaatgattgatgaatagcagaattaaaccgttaaatcaacaagaacacgataaaaaaagatcaattcataaatgagagacacacatctacaaaagcgtaattacagtaacaccagttgttggcggtgccaccccccttaattcttctgctgatcagcagaggatgacccgttcaagttcacggacgggaatgaaacaactaattaccatagttaatcaaatatttattttgacacttagggggtggaaaataaa

SEQ ID NO: 75183 - DNA, 960 bp, Heterodera glycines
gccagcaaagagttcaaggagttccaccgcagtgcacaggcgcgggtgcaaaagttgcgcaacgagaaaattcgcatgatgaaactgatggaggaggacgacgtcggctaccgacagctgctggacgagaagaaggacaagcggctggtccacctgctcaagcaggtggaggaccaatttttaaaaaaaaaattttttacaaaaaatggaagaatgagttgtggagagtttgaccggcctggtgcgccagcatcagcagacggagaagaagcggaagcaggacgagcgcaaggaggccaagctggcggcgctcaggcagcaaatgcaccaaacagcacaatgccggcggcgatggtggcgccaacggaggcggcgatgactcattgcacatcattgttcggaacagtgccaccggcgaaacgctcaaaggcatgtgccggggggaccgggcggggaaggccagggacaaatgattgtacatgcgccaggagtggcttagggcaagggccatacaacggacgactgaacggtggggggggggtgtatctcgggaccaaaattttgaatgaaactccaaaaaaaataatttttttttttgcggcctgaggtactgatagccgtccccagataaaatttttttgaaaccaacgaggctcgtccgtatctgcaaaaaaccccgccggggaaaatttaaaaattttgattaattttgttaagaaaattgagaaaatttaggggaaaaagttgcccatttttatacatcccagcaaataaatgcctttaaaaaatttggacgaaaaaataaatttggttttttgccctttcacagatttggacgaggagcaacggaatcggcgcatcattgagaaggcgcgcaatgatgaggacgaatacgacaacaaaaatgcactggcccaaatggagtcgtattacgcgacggcacacagagtcaaagaaaag

SEQ ID NO: 75184 - DNA, 917 bp, Heterodera glycines
atgcccgtgtacatcacatcctccagaaaaagcacattgattttgtgagtttgggctaagatagccttgacagtttctggggttgccatataaccgccaccgatcacaaatggcgggaacattttcggcgcgtacatttcacgggagacgtacctgtggcaaagtgccagattttaattcaatgaaatttcaaaaattcttttgggatttatccgctaggaccgtataaagagctaaacaaatagtttttgaccgttatgatggattacgcggattaaagatttttaaaagaatccttcctaattacagattacgcagttaggtcccggccccagccgggtgaagtaattgaaaatctccgtaattacggggttttcgtaattcaaaacccagtaaggcacagctctaacattaaggcctccattaactgaccatttcttgtaagggccatttgggtctcgtacaggatcacgacgtcctccaacgccgacaaatagaagcggatgttttgtggcaatttgccgaaatttgttttcaatccaatgggccatccgggatagatggaccaccgtgtcgtcgtccatcttcagcatccacttggcattggcacagtgccgttttgtaataggattatccttatgaacaattaattaattaggaacatatttatataattaaggcggtcatttatttacctgttcaataccaattgtgaatgctcttttcactttaaaattgacgaaagtgtccaaatgagtgccacgttgaagcaatgccgggtaacagatcagcagtttaaaatggcaattaaagtatttattttgccagaaattataattggtaccggtaattgattgaaccgacactgatttaaaaagcattcatacaattggtttaatttttttacggaaactgaa

SEQ ID NO: 75185 - DNA, 290 bp, Heterodera glycines
atgcatcttttcatccttagcaattttatctcatttttcattgtgctttttcatttgttgtcctatggccaattgtcacccatcaaaccgtaaaaaataaatttggatttttatttgttaattaccgtaatttcaagtttttatttgacaaatggcaccgacggagtgaaacgcatcaaagttgaagcaccgtcttaatgtaagcccgaaaatgggacggaaaacccatatggaattgaatttcgacttccaaaagatggcggaaattgcgacgaagggttggaaataaa

SEQ ID NO: 75186 - DNA, 1000 bp, Heterodera glycines
atgaaagtgaataacaacaaacaacgaaaagcactccctcaggagcttgtctacgaattggtcaatgctctgccgttttgtgtccggtgggcggcggttcgggtggcatcaaattttgaccaatttgtcatggaacggcaacttgactggatcaagacagtcaatgttcgtggtagtggtggtggttgtggtgtgccactcatttgtcagggatgtcggcgattccgaatgcaaatttctcaaaatttagggccccacaaccccgatttatgaattttggcttaagaaattccgatttacagttttttttgcatcggttgacatttccgattgcttttaaaatttaatttaaaatgaattttttaaggcttgttacgctacttatctgacattcaaggaatcattggtaggtgtgttactatttagagctgtctggtagactctgggatttattttctttgaaaaatcgtgacaaaaattaccaaggattccgtaaatatcgggcttttttgggctgggggtagtctcgaaggtgggaatttcggccttttaacatcactataatctccatgccaatcattttactcacatattggaacagaatgcctacaaaaaatcaatatctgttcattacgacgagtggaccgcgtaccaagaaaagtggacaatttatcagcaaaaatggacaatatatcaacaccaccagcagcagcagcaggatggaagccaaggagaagaagtggatgaacaaaaaatggacgaatttatccaagaaatgaaaggcgtttttgaaaaaatcaaaaaaacatcgcaacaaatgaaagttgtgtttggcttaggatggaaagtttttcagaaaaacaaggaaatttttggtctcttattgaaggcctacccaaaaataaacaccgaattttggagtggaggagaaaatgatgacgaagatgaagatgttgaagaagaagaagagcattgaaaatgcattttatgattttttgta

SEQ ID NO: 75187 - DNA, 1702 bp, Heterodera glycines
atggcgaaattccgtaccaaatggtacactaaacaagctatggttctgtactttttgagtcaggggtacaagaaatcaggaatttttggtcatccgggccaagatctgcggcgcatttacttataccgtcaagttacactcactcgtaagtctcgcgcattgcaagcagagccatgtgtatcgcgtccaccttctcaatgtcttcattgtaccgcttctccaacaatttcttggccaattggtcgtttttgccgatcgccgtgcttttccacccaaaataggaaccctgtggaatgaaggggaaaatattgcaaaattttaaattttcatgaaaaatgggaaagaaaataaatgcctaggaatttcggggtaatttttttttcattttgggcatttatttattatagaaaagacacttaacatgtaattttttaacgggggatacaaacagaaagtttcttttgaaaaattaccgccggatcggcttgaaaaagaagcgcccccttttcactgtcccatccgccaatgagcaatgaaacgccaaacggacgaacaccactaaaaaaatttaaattcctttttttaagttttttacaaatagaaatattttcaaattgtaggttagtttttctgaaaaatttctgttttatttttttttaaattcggggaaaaatgatacgagggggtggggtaaacgagcagcccccataaaaacagaactttaccccgactgtgtgtattcctgcatgaccgcagccacccgggaaacgagttgaggcacgggaatttcatagccgtacagcacttggtaatccatcgcaattttccgcgctttcttcacgagaagtctgtcgaggtgcaagaaatggattaattataacaattaatgattctttttttatgctcttgtgtagaattgttttaaattcaaacacccaaaaaaatttctatactttttatttattttttgaaaatcgaacccctgacgaaaaaatgacagacccattaacaaaaaactgtcatcaaccaggccatggaaatttttccttttttttttggtttcaatttctgaaaaaattgatgtaaattataggctagcggtgccaaaatatgcgcccttgagaacattttttgcttttcttggcaattatcaaattttaaaaaaccccagataattcctcccgtttaccccctctaaataattgagaagaaaataaacaggctggacggattaatgataaatccggatccaaattggcttttagaattaaaaaaaaaccaaaacgcactgtgcatccgggcccatcccactgtacacgcatgcaatatggtcggacaacttggagattttgctgacgggctgtgtgaggacggagtgtttgttttcggtggcgaacacaacgcaatcttttgctgcaaaaatgaaagaatttgttgggttaaaaatatgctgttttcaggagtatcgaagtcattgaacaggaaaatggcatcacttttcggcaaaactcttgaacccgaactcaatttggaaccaaaagttgtgttgaaaactcaacccgcgacataaaaaggaggtaaaattgaaaaaaatcatcatttgttttccggatgtcagataaacaattgtatattccaccagttgcggtttatgtttatttttgaaaaaagggatttgaaacttcaaaattggccgatttaa

SEQ ID NO: 75188 - DNA, 2210 bp, Heterodera glycines
aattcaggacattttgaggtctctgaccacgaatatggcgtctgttttgtcctatttcggcttgaatataacataaaataaatctaacgctctaaaaatatggcgctttatttaaatcggccaattttgaagtttcaaatcccttttttcaaaaataaacataaaccgcaactggtggaatatacaattgtttatctgacatccggaaaacaaatgatgatttttttcaattttacctcctttttatgtcgcgggttgagttttcaacacaacttttggttccaaattgagttcgggttcaagagttttgccgaaaagtgatgccattttcctgttcaatgacttcgatactcctgaaaacagcatatttttaacccaacaaattctttcatttttgcagcaaaagattgcgttgtgttcgccaccgaaaacaaacactccgtcctcacacagcccgtcagcaaaatctccaagttgtccgaccatattgcatgcgtgtacagtgggatgggcccggatgcacagtgcgttttggtttttttttaattctaaaagccaatttggatccggatttatcattaatccgtccagcctgtttattttcttctcaattatttagagggggtaaacgggaggaattatctggggttttttaaaatttgataattgccaagaaaagcaaaaaatgttctcaagggcgcatattttggcaccgctagcctataatttacatcaattttttcagaaattgaaaccaaaaaaaaaaggaaaaatttccatggcctggttgatgacagttttttgttaatgggtctgtcattttttcgtcaggggttcgattttcaaaaaataaataaaaagtatagaaatttttttgggtgtttgaatttaaaacaattctacacaagagcataaaaaaagaatcattaattgttataattaatccatttcttgcacctcgacagacttctcgtgaagaaagcgcggaaaattgcgatggattaccaagtgctgtacggctatgaaattcccgtgcctcaactcgtttcccgggtggctgcggtcatgcaggaatacacacagtcggggtaaagttctgtttttatgggggctgctcgtttaccccaccccctcgtatcatttttccccgaatttaaaaaaaaataaaacagaaatttttcagaaaaactaacctacaatttgaaaatatttctatttgtaaaaaacttaaaaaaaggaatttaaatttttttagtggtgttcgtccgtttggcgtttcattgctcattggcggatgggacagtgaaaagggggcgcttctttttcaagccgatccggcggtaatttttcaaaagaaactttctgtttgtatcccccgttaaaaaattacatgttaagtgtcttttctataataaataaatgcccaaaatgaaaaaaaaattaccccgaaattcctaggcatttattttctttcccatttttcatgaaaatttaaaattttgcaatattttccccttcattccacagggttcctattttgggtggaaaagcacggcgatcggcaaaaacgaccaattggccaagaaattgttggagaagcggtacaatgaagacattgagaaggtggacgcgatacacatggctctgcttgcaatgcgcgagacttacgagtgagtgtaacttgacggtataagtaaatgcgccgcagatcttggcccggatgaccaaaaattcctgatttcttgtacccctgactcaaaaagtacagaaccatagcttgtttagtgtaccatttggtacggaatttcgccatttttatggactcggaaaccaccatttgggagtcacggaattacaccatttttgttggagtctctaattcgccattttttgggggcccatcttttccaaactgtctaaaatctcttataattatcacaaaaaaacgattaaaaactcggtccatttttatgccgcctcctcaaaacggtaagccaaaatcctgttaccttcatcattccacctggcttttctttttcagaattatgcgaaaaattccaggaacttttgctttcaaattcggtttactacgaattcccattatttgtagcgttgccatgactgaggacaatgttgagttggtcgtgtgcacaaaggacggctttgaacggatgaccaaagaagcgctccgtgagcagatccaagccctc

SEQ ID NO: 75189 - DNA, 806 bp, Heterodera glycines
atgtcaaagattaaaaaaccccaagcgatcctggaaatggcctgtgtttgtgaaaacccatcaatgcccaaagcgaaaagcaaaaaaaaaacaaaagaaaaattgaatcatcaaaatttaaatttagccctgaaagacaaaatgccaaaaatattcagctgctttttttcaaaccaaagaaaatctaaagcccagaattttggaaaactcgggatcgcgattcgagattggaatcacagttttgctggcattcgaatcctgaactcaatatccaaatccgattttgtattctgttttgtatttgatgaaaaattttgcgaaaattttctgctatttgaagataaacagaatttccacactgaaattgttccgaaaaaggatgcacaaacgaaaaattggtacgacgagggccgaaattgaaattgaagattgcaatgtgcccattcccgaacttgttcaaagtcatctgaaacttattcgacaaatacgcgagaatgtggtcgcccccgtggacacaattggctgccatgcgttggccgacaaatgcgcagacccaaaaacgtatcgtttccagattttggtggcacttatgctctccagtcaaaccaaagaccaagtgacggcagaggcgatggaggcaagtaaagtgccagctaataaatcgtataaaaatgaaaataaagacatttttgacaaaaaatttacacatttttcagttttttcctggaaaaattcggtgccaaaaaggatttttggtttcaaatccaaaggagatatgttgccaacaattcttgacattttcatga

SEQ ID NO: 75190 - DNA, 136 bp, Heterodera glycines
atggctaaattagctgcttttttcaaacagcatattaattttttccctctctcccacagtccctcggggaagttgatgcaaattgagtatgcgttgaatgccgtcaagggcagtgcgccatctgttggcacccgag

SEQ ID NO: 75191 - DNA, 71 bp, Heterodera glycines
atgaacaaaacttttatttcattacattctattttcctacagtatattttacccttacattataaattaca

SEQ ID NO: 75192 - DNA, 2599 bp, Heterodera glycines
gttagtacaaatccatcaggcaaaccaatcagttttgaggaggcaaacaaagagtgccaacaacataatccaaatgccaaacttgcatcaattcacagtccgatggaagaagattttgtggccggtgagtggtcaatttttgctgattttttcccattttatgtgccccaattagcagaaattgtttacaaatagcgccaatttcggattaaattttttgaaatgccaaaaattaataaaatttaaaatccggaaaattcataaaaaatttttaaaagcaataaatgaagaagtcaaataaaagccgaaaaatcaaaacaaaattaaagcaaaaaaaaaaaattataaaaatttatctgtgtttttttatgtttttattttaaacttactgtacaataataattcataaaaattttttttgacttgttgaacacttacaaaatcgtaagtgatacagtacattttttgaaaacgagatacggtagtaaggccatctgaattattgcaattttttttgaatatttttaatttattttaaataaaattcacagtttttatgtaatgatatactcatagaaagagtgaattagggaggttttttgtaatttattttaataatttaaaattaattagcataattaaaaattaattgctttttagcttttaccaaaaatcgtcctttccgtagccaaaaacaaggacaatcattgtattggctggcacaaatcaaaagtgccgtggaacacgtaagcaaaacaatactgtagtcattcattatcatacaataattacaataattaatataataaaaatgaaaaagaaataattttaatattttcaaatttaaaatattaattataccaaaattaaatcttctttttttatttgtgaaaatttttttgtcaaaaaaccccacaaccgaacgaaacaatacagtcattcattatcatacaataattacaatttaatataataatgaaaaggaaaattgaacaaaaaatgatttaaaagaggtcaattaatgattttaacatttaaatatattaaaactctttaatttgcacattttcgatatttaaaattatatcactcaaattttaaagatttttttgtaacagttttgtcaaaaaaatgccataattaatttttttaatattttttatttctgaaataagggcaaaacttcaaaaatgaaatgctataatgtttgtaagttcttttctagaatttgcatttcttcttaaaaatatgaatttaaaaaaaaattgctacagttatgaatacagtatgttttacattacagccaaacaacgatatggatgggaactacgataatgagggtggcagcaacagcaacggaccttttgtatggtctgacggtactaatgtcggctacggtaatcccactgacaagaagtcgggcaaaaactttccatggtacacaaaaccaagcacaaaatatttggaaaaacatccgggtgtggtgatgtacggtaaaaaaaaggatggggaaaacaatccatggatggacgagaaacataccggcacgtggtcggccatctcaacacagagcgccacgcatggcgaatcggtgccagatgtgcatggctatgtgtgcaaaatgccgaccatgaaagcgacgaatacggtagggaatgcgaaaaaaaacgaaaatggacggtaattgtttacgatagttgttgcaattagtcatcatctgttttgtagctaagtattgtggtaaattttgtaagaattaaaaaaaattagggaaatttttgggtttgtatttaaaattatgaaaattttccaacaaatttaataaaaattttctcccattgaactcattggcgcttatctttgctattgtgccattaattcatttttacattgtttattgttcaaattttgccaaaaccattcaaatttggttatttttagtccaaatctgtaacaaaaaggcaaatttctttggagacacaaaaaatactttttattataaaataagaaaaaatttctgtatgaaaaataaaattagcaacaaaaaacttaatttaagaatattagcggagttcgatttgttcatttcttcatcaagaatgttaaaattgataagaagaggcaaaaacataatattgatatatttttgattgcataaattataaaataacaccagtaaaacgtctgtattttgacccaaaaaaactgattttttttttggcatttattttccggtttttgaaaaatttttttgataaaaaccctggattaggcgggagaaaatgtcacaaaaaacaacatttagaaagaaatcatttttgtattcgaagaaaatattcacaaaaacattaatattatgttgtttttgtttaaattttaatttaaacaaaaattctaattttagcaccatttgaacccccgggcgccacccaatgccgacgaacagcaacaattctcaacaaaaatggcacaaaatttcaattcgcccaaccccacggaaaacattgatgaaaaggatgaagagccacacttcagcagaaacaacggaaaccaatatggtcttgggtcggatgatgagcacagaagaagatggccataa

SEQ ID NO: 75193 - DNA, 806 bp, Heterodera glycines
atggccttactaccgtatctcgttttcaaaaaatgtactgtatcacttacgattttgtaagtgttcaacaagtcaaaaaaaatttttatgaattattattgtacagtaagtttaaaataaaaacataaaaaaacacagataaatttttataattttttttttttgctttaattttgttttgatttttcggcttttatttgacttcttcatttattgcttttaaaaattttttatgaattttccggattttaaattttattaatttttggcatttcaaaaaatttaatccgaaattggcgctatttgtaaacaatttctgctaattggggcacataaaatgggaaaaaatcagcaaaaattgaccactcaccggccacaaaatcttcttccatcggactgtgaattgatgcaagtttggcatttggattatgttgttggcactctttgtttgcctcctcaaaactgattggtttgcctgatggatttgtactaaccttaaaatgggtggaggggggcttaaattggaaaatttcttaaattttaaataaactaaatttcggcttgtgtaaaaattttagtgaatttttaactttttagtatttgccatgggattaattaaaagtagacggagggaaggggtgaagtgaaaaatagaaaattccaaattttaaataaattaaaatttccaaattgtcggaagaattttaatacatatttttaggtttttgaattttcacttttctgaaatggaataatttacaggaaacgcggaagaaaattggaaaatttcttaaaatttaaataaa

SEQ ID NO: 75194 - DNA, 483 bp, Heterodera glycines
atgggggtaagagtcaaaaattaatgggggatttaaagaaaaatgaatcatttttcctctatgtatattaaatattattgggtttagttaaaggagagaaaattataggttttattgtttttttggagtttatttatttatgcaaaagagaaaaaattccacaaaagggagtaatccacttactctgcggacatgtcatagattaagtcgtcctcgagtaatatggatcaacaattaaacaaaattaaggaatcacaacaaaattaaataaaagaatgaggtcaatcgatcaataaaaccaaatcacatataaaattataaatagctttaattaattaatcaaaagagacaattcacttttcaggtcatttattcgttaaggagtttaattttagttttaaattgatttaaagaatttattttaatgatttctttatcaagttgattccacaattttgtagccctccccgcaaagggaataaa

SEQ ID NO: 75195 - DNA, 3867 bp, Heterodera glycines
attaaatttccgcaatttttcttctttttcatcgcagttgttgctgcatggattttgtaaatattaaattgcatttaatatatttaatataatatttatttttaatataaaaaaaatttcacagttttcaatatcaccaaaaaaagcattggcaccgtttggacgtgccagggccaaatgtgaacattttctttggcaacacaataaagcaaattcgcaatggcagcattgatgtgcgaagcattaataagaaaatggaaatattattatttatttaaaatttttttttttaatttgcaggttgaccgagaaaatttctcaaaatatggaaattcatttgggtaaaattttgttattaattaatataaaatatttgtttaagttcttttttgtttgatcgtcgcgaattttgcaccaaagacccggatatgatccgacaaattttcatcaaagaatttgcgcacttccaaaatcgctttgtgagttttttcggggattgacttaattaatggatatgtgagtaattgttgtttcgagactcaaactcgatagccaaaaggcgagaaatcagtaataatttgggagagaattttgatttgaattttattttgatagaccataccttttctgaaaaacaattaaatatttaattaattaattaattatccaaaaggatttcatccccgggcgaaaagaggacgcgcccaaatcattgacgcgtaacatgatcaacatgttgcgcgacgatgattggaagcgggtgcgcaaccgcgtaacgcccgcattcaccacgggaaaactgaagaaagtgagtcatccagagcgcaacggcgagtgacacataaatagggaaaacaaatattttgatttttttttaaattaattttcaaaaaaaccataaaaaggtggaaggaatacacaaaacaaagacgaatcattaaagggattttagccagtggctaattagttaattaattattttgccattcgaatttagctcattccaattttatgcgaatgcactgaaagactttgcaaggtatttgaagatgaatatgcgtcgaaaaagaaggaaattctcttaaaagagtgagttaattattttttttattgagtaattaaagtcagcattaacggcgcaaaaaataattaaaaaattaaatgccaaaataaaattaataaatcaaaaagaaaagcataaagaaatgtatttattttttaattgcccagtctttacggccgatttctgttggatgtgatcggtcgctgtggattttcgttggatttgaacacttatgaggaggaaaatgtttttttagaacaatcaagattagtgttcaattttggccgtaaagcgcaacgcatcagaacgatactttgcggtaaatgtcgtgaaaaatggcacaatattaaaaaaaactgctcaaagggattgattatataaaaatcaaaaaatatttttcttctttaattacgaattacaaaaatatattagtaagtcactttatatggtttaatcaaaattttaatttgccccctaatggatttataattaaaattatatttttttaaaacttacagtaaaaaaaattaattaaagcagaacaaattttaaaaacagtacatctgttgaacctataattttgcatcaaatcgcaaataaaagcacaattttttcgtttattttttccactcactatgtttaaagaaaagagaaaatcatttaataaattttaatttccaatttcgcaatgtttaagtgttttttccacttactgctaagctaattgagaattttacgggcaaatcgctcgcttttgccgtggatgaacaatttttcaaggaaatgatgggggaattgtacgagaaacgccgcgccgacccggcggcaaaagaagtgcgattaattaattttaattgcttataaataatgagaaaaagggaacacgtcacaaattagtcaattgtaaaatttaaaccaaattattattgaaatttgtttgccagaagtactcggacatctttcaacttttgatgaatgccgttgaagaagacgacgaagaaattgtggctgaaaacagtgccatctcagcggaggatgcccaaataattcacagcgaaatgcgaagcgacgaaaagcagcaaaagcagggaaagcatttgaccaaaattgaactgttcgcgcagggattcatcattttggtggccgggtaattcttggcaaaattatttttaagagggatttcaggatttttgtgttttgtttaaatggatttgggataagatggaaagtagaagcaaagccaaaattaaaaaagaaaaaattaccgaatcttcaaaaagtgtacgatatgatttatttttgtaataatctgttcaaattattagctgattattgccatcaattttttgttgttatatagccaacgtaaagcaatttgtaactaacctttaaaattcacattttaacacaaaatgccttaaaattcaaatttatatcctagtcaaaaatatgatgacaaatataattttggctttcaaaatttgtaaattatcgtccctattttttaataaatataaaaacaattacaattgttcaattttgattttgattttgattttatggaaaaataattcacttaaattttcttaaatattcccgatttgacaccaccggcacgacattgaccttcgccacttatatgctggcaattgagtcagaagttcaagaaaaattacgaaaagaagtaaatgaagtgttaggggagaaagtaagtgaaaatggacaaatttaataaattaaagtttaattggcaaattaaaattttattttattattattattattaatttttaaatcatttactttaattatttaaggaagtgattacttacgaacatttgaaacaaatgcattatctttgtgctgttgttcaagaaacactgcgaatgttcccagtggcaccaaagtgaataatttgaaattattaagaaaatgaatcagtttaaaaaattggatttactttttggataaaggataaggatgctgcttaaatcatttcataaaatgcaaaaattgtccaatggctgcattttttcatattttatatgggatttgccattatttttgaaatggcaaaaataatttttgtacatttgcctcccgatttaccggtcggtttccagatctttgtttttttgtgcatgcgttttcctgtattttgttcagaaaaagtctaacagatcaattcgaaaaaacatagctgtaaggttccaatcactaactatattttgagctcccagtcactcactggttttatgcaatttttaaaatatggcaaatcccataatgataaaatggcattttgtttatttattattaatttttataattaagaaaattaaatgagctaattaaaaagcaaaataaaactcattatattaaattaaggaccaaccgcgaatgtaacactgactgcgttattaacggagttccgttccaaaagggcgacttggtcactctaccaatttatgtcattcagcatgatgaagcatattattcaaatccggacgcatttgacccggaaaggcattttaaaaccaaattattacatttcgcttcttttttaaagatttatgccagagcaaaaggcggcacttgacccattggcatttttgacttttggcattggtccccgaaattgcattggaatgcgttttgccgaatttcagatgtatgtgacattggcactgcttgtgcgacgcttccgcttctgtgccagctcaaacactccggtaaaacccaaaataaattcaaattagaaaaataagtttacgaatccgggcatcataggaaggaaattcgca

SEQ ID NO: 75196 - DNA, 543 bp, Heterodera glycines
atgtccgactgtggtcgcgactccgtggtgatggtctccgaggagttctacgacaaacgcgtgctgatccgatccgggtcaccggttcggcactcaactataatggaagagatggaaagcagtgacgaaggtgcgaagaaaacggaaaactggcgggtgacgaagaatgataatttgctaactccaatttgaatatccacgaacggcttaatgagagaggaagagagagagagagagagagactaattgccaaaatcaaaaagctttaattgctgtgattattttttaaaaagttatattttttataagcaaaaaaaaaacagaaaaattcgcccatttattattggatttcgcagatccttccaacgtttcccctgctcctttatttgtattgccgttgtgcttctttctcattttgtgttgtgcatttttaattttgtgtataaatattaatttttttaagccgcacaattcgcacttttagcactgctttaaaataataatttaaaatcagaacggaatttaattgataaaagcattata

SEQ ID NO: 75197 - DNA, 970 bp, Heterodera glycines
atgaaatttcatcaggcgatggtaaattcgaacatgtggtgaacagggcaaaacactatctgatcattcacaacgcacagccggaagactcaggtcattcctttgaaatgaattgaaatattattttattatttcttttttaataaaaatctaaggaaattaggggtccgcggagaatttaaatgcaaaaataattaattaataaaaataatgttcatttattaaatttcaaaagtagaagaaaaatgcattgaaaaattattaattcttggggattaaactatttgtgatgcaagaaaagtcaaagtgcttttccatcaggctcgtaacaagaaaacaatcgaatggggttaatcggtttttgccaaattctgaaaaaatctaaggcaattagggacaagtggaggaaatttatatgaaaaataattaatttgaaaaaaaatatttaattaaattgtaaaacataaagaattaaaaatagaattaaatattacatgtgataaaaatttgcaggcgtttattcggtgcgaattggagacacaatgttcaaagtggcacagatcagcatcggcactgagttgggccagcagaatttgtccggaagccgaattcgacgcatttcgagccaatcgctgaaccaatcgaatgaaagagacgcacgacagaatgccaaacgaaaggaaaaaacactgccaaaatgaaaaacaaagcgaaattaacaacaacagaaaatgtgatggaatgaagcaaaacaaatgaaaattgaatttattatatttacaaatgaaaatgaagttttttcattggttaattattttttaagaaaattattaattattttatcataaatttttgcactgaatattttaaatatatatttaatgtcaaatattttaatctttgtacaaaatcggaaatgccattcgcttcctgccaaattgaaaaacattttgccgaatgttttccaaca

SEQ ID NO: 75198 - DNA, 313 bp, Heterodera glycines
atggtgaaggaacaatggcaaaacgatgcggacgcattaattgatttcgaactttttttcagaaaatacggcgtgacaaaaagcgaagaaaaatgtaataattaaattggttaattttaaataatttttgggaattatgaaaattcagtgagtttgctgcaagaagtttcacagcgcgcaattggggcgaaaagtcattgtgatgagcaaatttatttgagggattatggcaccgttgaaaagattgggcactcatttttcagtgttgaccgaagcataattatagaagaaaaaaacataaaggtgtgaataa

SEQ ID NO: 75199 - DNA, 1317 bp, Heterodera glycines
atgaatggctaccaaccatctagaaatgaacacaccggagatgaaagtagtaaaaaaacgaggcacaatacaaattattttagatatgtaagtgaccggccaaatttaggttgacaatcgagcaaataattttattttgaatttaaatatcgaacgaattaaatttaagaaacattaaaacgttttttcgtaaaaaatgattattatcactgacgaaatcacatattaccaaatacaaaatgacaaattaaggcatttgttaaagtttcactttttaaatgacagatttataacggaaactccgaacagtttggcttatgtgtcgcaattacggagtttaatacagaaaatatgccaaattacataacggaaaaactgaaaaacgaattcaaaatttacagaaaattgtcaaaagacagcaagcacatgcttaaagtgtttgaaaggtcattgaaaccaaaaagattcttttttaacttcataatttaaataaaaatttgaaaattttgattttttttttgtcaaaattaacgaaatgaatttttagcgagaaaaatggaaaaatatttaaattggtaagcgaagtcgtaaagtacgacttttgggaactttttcaatatggcgcaaaaaatatcaacgaaactcgcaacattttatacaacgaaatgttgaaggcattggaagaatttcataaaagtaaaaaaaataataattaaattaattaatgaattaattaattaggaaatattctatttaccaattaattaaggtggaatgcatttgagcataaatttaaccaaattttatttggtggagaaaaacaatggaaatgcaaaaagttatgataaaaatgatgatgacaatgacaacaatgagatggaaattgaaggcgaaaaatggaaaatgaacacaaaattggccgattttggggcggcaattttattcaatgaaaagccaccaaaaataaatgtaaatggatgagcatttaaaacagggcttctatcgaaaagttttcaaatcagcacacaaagggattaaaaaagtggttcaaatcagttatttatacaatttattcgtaccaaaaaatatcaaaattatttttttttacctcccattaaggatttgaacaattttgaggagtaaattatattgtccaaattttgtgtattaagccaattttgaagaatataaaggattttaatggtcaggtggtgccgataggcgccgtcaaaaatttttttttttgaaatttgactattttttaacagctttttgtctaaaaatgaccaaattttgcgcaaactttaaaatttctaa

SEQ ID NO: 75200 - DNA, 225 bp, Heterodera glycines; identical to SEQ ID NO: 59154

SEQ ID NO: 75201 - DNA, 778 bp, Heterodera glycines
atgttggaaatgaattgcaattggtaccgggcaatgtgggcaaattggttcaagaaaagtttaacacggttttgcgaaacaatccgggatttgacagaattttggttggatttagaaaaagttttaaactcatattttttctaggaaattggtatggttttgcgcggcgaacacgttcaaacgcatttgccgccggacgttattgcaatgttcaaataagcgcccattcagtcgtgtgaagtggagcgttccttttcagcatacaaaaatattctggcagacaatcggatgagctttactccggaaaatctcgaaaaatttctgatttgtaacacgcataaaaagaaatgaccatttttactgccctaaaatcgttgataaaaattttttatgcttatttttgtacttgtttgatgttattttggcatttttttttaacatattttggtacatatttgaagatttttgtacatatttcttacatattttggcattttttaatacatatttatgtacatattttgcgatttttcttacatataaatctaagccctaattatttataagaatttctaaacattgaggaatgttttcggcttccgttccttcatgttcagcagcgaaagaaaatagtgacactacttttgaagacgacgaagttcagaccattttctcggaaaaacgtcctagacaaagcattgcagaagcgttgcgagccaaaagtttttttagtcattaatgacaaacgcccgacaaaatcagaggcgaactaaataaa

SEQ ID NO: 75202 - DNA, 91 bp, Heterodera glycines
ctgaaccgatcggcgatttcgacgcgcaggaacacgcttttcatgggcgatttcacaatgtgatcgcaggaagtgcatctcatttcgtcat

SEQ ID NO: 75203 - DNA, 777 bp, Heterodera glycines
  unsure (1)..(777): unsure at all n locations
atgaatacaattagcagcagagacaatcttttgcaatttgcttcaccgtctttaaacatgctgtcaattttgatgtactccatgcttttgtttgctgcccttgttctgttgataagtccagccacagttgtggccaacgaagatgtggttgggttggccatgcgcggcactcagcaattctttagacgaaatgccaaatggattaatttgccatcgggcggcggatcattggtaaattttatgctatatttttcatcatatcgccaacagtaaatcaatgtgttttgaatgaatcgtaataccgtacattctttaattatcccccaatctccaattatcacccaatctaatgaggagtttgaaaataatccctttatcttaatcccccagtctccaattaccncccccccccctttctgaggaggttgaaaaataattccccatgggggataaaaagagcatatacggtataccatgaatctgtttttattaaaaaaatagattcaaatgtcttataggttagtggccgtggaaattttcggcccggcttccattctttgcatcgatcacgtactcagctggcggaacctctgtttatcacttttaaagtgagtaccatatatggcaatatagtaatttaaaaaaaaatcaaaacattcagagatctcccacaaatctcgcttcaatgatggttcgtttgcagaaaaacccgagacacaatgatggcacaaactgagaatttaagtgatctggataactcgaaaaatgtggaataaa

SEQ ID NO: 75204 - DNA, 1906 bp, Heterodera glycines
gctttacgacgtgtcatcggcggtcgacagtccgttgattcaatttgatttcaatgcgttgttgccagaccgaacgcctgacgacagtgaggcgagtggagacgaatttggacgaggacgtgcccattccacgcttggtttcatcactcaactgggtacatttctgatcaaataatttgccatattcccagatttctctcaattagagccccctgaaatttttttttaattttcaaaaaaaatttcatgaaaattttttttgtgatttttagtaaatttttacctcaaattaattaattcatttttcagtttcttttgactttggaccccctcaatcggtggatggcaatcggacagtgctcggctctcttctcgcgttggattcgaatggccaactttacgccacacttttcccctttgatgggattgggttggaaatttatttttttaaattaaaaaatttttaaatttaaggccctgtgcacctccaaagggcccactgtctttgtttggatttccggcttcgtctcagcaccgtttgctctgttctgcgctcgatttgctgcacattcgtcatccgttcggtgttcaacacttttcgttgtgggctatggcatcggaggacggactgttgacccatttcatacttcccatggttagaagttggcatttttcggtttcggcacccattttttagcgattttttcaagattttatatgaattattaatttaaaaaggaaattcaaattgtaagattttccaacatcattaaaattttgttcagctgtcatccttcgacactttgtccattggatggacgaagtgctgtaaatgccaaatattttgtcgcctgccatttgaactttttgcgattgattgtgtggaccattggcaaaaacaatttgtcgtcaatacgccgcgtgattcaaaaatcaacaacaatcgatgctgaaggccatcgagccgactgcaaaaaaatgggcacaatttttaaatttcgatgaaaaaaaattttttgaaaacttgcttagccttaggcttaaatttaggctttttgaaattttttattgtaagagttgcttgtgtactacgagttgccattaacacaaaaaaatcgctgttaatttttgaatttttttttcttggaaattttctaagtttctataaagaaaatttcggcggcgaacttttggtggtgtaacccattaattttaattgcaatattcgtttaaaaaaacattttcttttttttacagaattttgcgaccattgcgcatatttggtggttggtcaacgggacgtgttccgagtggagttgactgctttggcggaccatttgtggcatcagtgcacaatgaaatcaaatgccaacccaacaaaagcaatggacgaagtgaacaggagcagcagcaatgtgcaccaactgttgatgtttgcggacagtggagaagtgtgttttgcatgttaatttattggttataaatgttttacaaataattagtgatcggaaaatgggagattttccgggaaagggaaattttttatcggtttttttcaaatttgaccggctatggatgggaggtggaaattccccggggtcttccaatggtaattttttcacattcaaaacttttacttggcgttgtcaaaagactgaaacacaccaccaccagagaaaaatttaaaaatttacgcgaatttttttgtaaaatcttcctttctttagagcccttcaatcgggtcggttgtgtgcgttcaggcgccaattggaacggatgttgacgaagacgacgacggcggcacggatgagaatcggcaacaaagacgagatttattgattgctgcagaatgctcatttagcatcaaaatgggaagaaaaagcgctttcttggccaacgtggccag

SEQ ID NO: 75205 - DNA, 692 bp, Heterodera glycines
atgccaacttctaaccatgggaagtatgaaatgggtcaacagtccgtcctccgatgccatagcccacaacgaaaagtgttgaacaccgaacggatgacgaatgtgcagcaaatcgagcgcagaacagagcaaacggtgctgagacgaagccggaaatccaaacaaagacagtgggccctttggaggtgcacagggccttaaatttaaaaattttttaatttaaaaaaataaatttccaacccaatcccatcaaaggggaaaagtgtggcgtaaagttggccattcgaatccaacgcgagaagagagccgagcactgtccgattgccatccaccgattgagggggtccaaagtcaaaagaaactgaaaaatgaattaattaatttgaggtaaaaatttactaaaaatcacaaaaaaaattttcatgaaattttttttgaaaattaaaaaaaaatttcagggggctctaattgagagaaatctgggaatatggcaaattatttgatcagaaatgtacccagttgagtgatgaaaccaagcgtggaatgggcacgtcctcgtccaaattcgtctccactcgcctcactgtcgtcaggcgttcggtctggcaacaacgcattgaaatcaaattgaatcaacggactgtcgaccgccgatgacacgtcgtaaagcctttaagacggaggatcgttta

SEQ ID NO: 75206 - DNA, 264 bp, Heterodera glycines
atggatttcttgcgcctttttccatcttcgtcatcttcaactttgtcggcaacaaatgaacagtcacaaattgcgccatcacaatcgttgctcttcagcgcttacagaaatttgggtcttctgtgttattcaaatggtgaaccgaacaaattgcacttggtcattagcgcatctgctggtccaccatcaacagcaaaaacattggaaaaatcatcgaattcatcgcaacccgtgaaaacttgtgtactcttcaaacgaataaca

SEQ ID NO: 75207 - DNA, 783 bp, Heterodera glycines
atgattgatgctatttgccaaaaaattgacactaaaacggcaccgatcagtcgggaggaatgtgcaaaatttgacaacaatctgttttcttccgctattcatatggttcttcaattgacaggagaggaagtcatgtgcaaactgattgctggaccttggttaattttcttttattcgattcggcttgattattgatatgaatttttttactagaactattcccatattaataatagttttttttctcaattgattccaaccttaaaacgtggaaaatttggttgtctcatcaaatagtatcttataaatttttattgaaggcaccaattaacaaacttatagaatcgaagggaaacaaagtttattcatatccattgtatattgattaatactttaaatatcttgtttagcaattcaacgaattcctcagcatcagccgggccagtgaaatgcgacttttgtctgctgttacacaaaaagtcggaaaacgtaaacccgatttatttttataaaaatcaaaaatagcaaattttaattaatttttcataaatattaaaacttttatcagataatcaacaatttcatcacactttttgaaagcttcaatatgatgtgcgaccgtttaagttctggagttgatgtgtgcaaaaaatatgttaaagccatgatgaatggcatatcgaacattgttggtattcacctcgaacagacccacgctcaatttttctgtaagaatattttcaaatgcacgtaatatcttcttgtacaattgaccatatttta

SEQ ID NO: 75208 - DNA, 1053 bp, Heterodera glycines
atgtctctgctgaatggaaagaatgccactggccattgtcaatctgacggcggtaattttggtgtttacaacacattttggaatcgttttcagattcatcgatcgctgtgaagcggggcgccgaagaattcgacttcggtgggagcgaagccgacggggcaattggccaagggtggtcaattgaattgagcatattaaattatttatgcaattttccagtggaaacgcaccgccggcagccaaatttcaaagggttcagcagttctcgtgctatgccgtttatagcagatcggcccagcccaaatcgaacgccattcgagggcaaattcagggtcagaaattataactacaatttattatacgtatttttctcaattcagattttaaacatgaattgcattacgttttgacgaccattttcgatgaaaaggctgctgaaaacttgaaaagtctcaggtaaaagggtcttttgttcctggtatgtaatgcctttttccagcttggtccaactcatcaaaaaggctattattccccaattccgcaactttttacgcacaaaaagtgtccaacttgaaaaactctttggcgtcttaaacgaactgtcctcgaactcgtcggtactcttttttcgataatgttccctttttattgcatttgattgttaggtcttttctctgtcctcctcctgccttttgtatttgttggctcgcgaccaaaagagtattccgccctctgaagtaacttcggcttctacttttgccctcttggtgcttttccctgctgttctctctctttcagaattgttttcgactcatttctgaacttctccggcaagactctcagcgtgccaaaatggacgaggaacacaaaaagcacacggaaacggtgccataatcattagggggaaaatgtgtacggggaaggaaatggaaaacatttttttgtgccgtcatttcagtgttttttcactaaattggcatttgtttttgtgttaagatttggctcataatgaaggattggcacgtcaattgccaaacactctcctctaagcaa

SEQ ID NO: 75209 - DNA, 1578 bp, Heterodera glycines
ccaatcggtgtaaatccgaatgtgaatgaagtcaccaaggtactactctttcttgttccaacttttcctttccttggactctcttttcagctttggtgtcccaaaggcacttacagtgccgttgccaatttgttcttccaaaacccggaagagagtgtgaagagtctgttccattctccgtcctcctctttccgtccttttactcttttcgttttcgctgtcgaatatttcgtccttactttgtggacctacggactttcagttcccagtggagtgcgtttttgccgtcctttccatgccaattgttgttcattgtcccttaggtgttcattccgtcattgctcaccggcgccgcttggggtcgtctgtttggcatttgtgttcaaagtctttttccacaattggtttgtgcttttttgtgattgttttacgaaaataatttattttaattagggtcaaattgaccccgggaagtacgctttggttggtgcggctgcgcaactcggcggaattgttcggtaatttattcacgaccgactagtacatttgattcgaccttttattccgtcgttccctctttttacaggatgaccatttctttaaccgccatcattgtcgaagcgactaaaaacataaccttcggtcttccgattatgctcgttctgatgatcgccaaatgggtcggcgattggttcaccggagtcagtgtttctgttttccaatttggttggtttgtcaggtttttgctttaggggttgtatgacgaacacatcgatttggccgaagtgccccttctcggatgggaccctccaaaactttctcggaacattttggccaagaaagtgatgcgacgggatgtcgttgcactggagagagtggaaaatgttggccgaattgtggaaattctgcgctcgacgcgtcaccatgggtttccggtcgtaaatcgaatcgacgcgagcattggcgactcccaattccccaactacggaaatctgttgggcattgtgttcaggtcgcaactcattgtcatactgcagaaaaaggttagacggatgcattgagagataaacgtcaaagactaatcatcatttagcattttacgttggattacgagggaaagtatcccgcaaatggacatactccgataagtctcgaggatttcagtgagttctatccaaggtgggtgtgtttttctttttggcatttgagtaaacaactcccacactttgtttagggttgagtccaaaatatcccaactcggactgactgtggccgatgaacgctcttgggttgatcttaagccgtttatgcatccttcgccctatcgtgtgcccctcgactcttcccttgactccatccatcgtgtttttcggggacttggacttcgctttttgctcgtcgttgatcgggaaaatcgggtttttccttctttttatttactctaattctaagtgaattggattttgttttcagctgagagggatcataacgcgaaaagacattgcgcgcttcaaagaacggcgggtgaaaggtgcttatcttgtgcatgagattcacatctccccttacaacaattga

SEQ ID NO: 75210 - DNA, 690 bp, Heterodera glycines
atggcatcaatttgtgacgaattgcgcaatttgaggggaaagagtggggaaaaggccggtgatttcatgggaaaggaatggaaaagagattgccaatttaaaggtattttaatcaaaattattggattaacatacaaaatggtgaatgaggaggaggagggcaaaaaagggagtataaaaggcacggatgcaaaacaaaacttacgcgcccaataaccacgcccccagttaaaatattcttggtattgtacgagagctctttttgttttctaaaaaaatctatggccaaaatggccagaaaaaaatcatttttttgagtgttttgatcttgactttttttacagtgccccaaaaaagtcttggcccaagctgatcaaattttcaaaaattaaaatttcgactgaaaattttaatttattattttttgtttgtgtgtttttatttactccaatatatgtgcttttcatgcaccacaaaattattttgattcattcattcattctcagggatgagtcgcttgatcacactttacccagaaatacagtgcaaaaaaaaagtcttggcccaaacatgaaaacccatcttgtatttcatctaaaaatctgaaataattcaggcgtttgcttaacttttgatgctgatcaaaaaggccttttacaccaacttgatcagatcactccttcatggtga

SEQ ID NO: 75211 - DNA, 1518 bp, Heterodera glycines
atggacattgggcactgcccaaactactcgtggctttgtaatgtgtgcagtaagtgaatttttctgttttgcattcaatttcgttcaaacatttcttttaagtctgtgcctaatttatttaatttactatcaaaaaccacaaaacggtcaaatttttctctattttttctgttatcaatttaatcaatgtttttgggctgatattccactaattaattcaatttactaccaaacaacaaaataatggtcaaaattttttttcttctcctctattttttcgtcaaaaaaacattgccgccaaaagttcaattctctatcgaaactaatacagtacaacaatgtgcggtgcggaaaacattgcactaatgggaaaagcgtcgctattaacaatctccattttcactaaaaagcatttcccactcattcatcaattcattcttcatccaaagcacatagtgctctcatctcaatcgtcaaacgctccgcaattcagagccttaagcttaagcaagcaaccgcgcgaaccctatcgcctattccctcatttgtttccaaatttaattgttacatctaattattctaattttatttccccgtttcattttgcttattatttgcctcatatttgaattttttaactcgcgctctcatttcaatcaatagaatagtcgtaagactaagagcaaaccaaaatttttttcttttcaaattgtccaccccaattttaaattgaactatcctttggatagtaagtcctgtcgaagttttactcaatatttttttccatcgaatgataggtcagaaataaataataatcagattttcggcattttatgtcttgtttgaattcgttaagttgagatcgactttatataataagttcatttgatttaatcaattgattttttctaaaattgaattcatttttaaaatatttatcttccatttccttatgttttattagtttatgaaaatattttaaaaaacgctttttaattatgtatacctttaaaaataattatttcgccattataatattattttcagagcatttaaattcactggaggaaaaagttttgtttctaggttattagttataacaattaaatttttagagaatttttttttgaattcgcagtgcttcgccctttttcaaccatccttataggtccatttaactttctatttttccgcattccttctttttttgcacaccattgttgactatatccactttttttatcgttttcctgttctgcataatgccacgaatttcagttggcaatgcaccatcactggcattcgctgtgttgggtccttgcgaggatatttctaaattatatagttttatatctttttaattgataacttatcaaccatcatttgtgttaccctatatcaattcactttgccagtttaaattaatcgaattttaaacattaaaaaaaattttggctttttaatgcccttctcttatttaaatatttattatattttcactcatattcttccagttaa

SEQ ID NO: 75212 - DNA, 637 bp, Heterodera glycines
atggaccggttgaagccgtacgaggacgaaattgtggatggacgaacttgtgccgaaatcattgcgggccgtgaaaacgcgaacggcaccagtcaaagcaggacaaacgccgccggggacggatggtcagttgtgatcaaccaatactgatcagaaattgatcaggatgatgatactttagggatgttcaaaaattactgggtgtgtgggaataggaattagtttgatgataaagaatgaagaaaggatcaatgatcattgatcaggccttatgatataaattttgatcgggcgcgcgaaaaacccaaatgttgacagagggatcaatcaatcaattttaagtgcttcctcttccactccgatcacgtccggctcttcatccgtcattgatgcggtgatcgacgcagtgatcgatgcatcgtcgtcaaattcagcaaatgcccaaggaacgacagtcacgaagctaagcacagcgaagcgtggaagccgtgccaagctgaccattgtgggcaaagaaactggtgctgatcagccgaagaagccgccggcatcgacaacaaagcgatcggagccaaaagaggaggtgggaaatggaaaagaaaagagagaaagattggcatcgagaattggaatctga

SEQ ID NO: 75213 - DNA, 754 bp, Heterodera glycines
atggaaaagtgattcttcattttccatttcgcctgctcgggggtgagagaaactcacgccattcccccacaattgctaatgtcccctcccttgggcgggggggggggggggaattaatttttgaatgcttcgcttatgttatgaataattaattaattgatcagtgttctagttcaatttagaagaattaatctgacgaattagtaaggaacagcttccaaataaaaatatatgcaataaataaaattaattaatttccaccactatccttcggaaatttaattttaaaaattcatttaaatattattattccagggttattaaatgccaatcagatcgcatgaatatggcattcattttcataattccaaaacccgaaaaacgaacacaaaaactgaaagctcaaattgttgaatgacatttttccccattatttcacctaaattattccaacaatcatttttaatacttagaacaatttccaattgatcactttctctgatcaccttaagaaatttgtcggaaaattccgatcactcactttggtaagcctccaaatttggcacaaatggttgcccaatgcgcggattccaccgcttcttcgtcacccatggaaaattcaccttccttggacgtaatcattgacgatgaccacaaccaccatcaccaccagcagcagcaaccatttgttttcggtcagtttttttttactaattttaaattggcaaaatatcattttgccaaaaaaaataaa

SEQ ID NO: 75214 - DNA, 63 bp, Heterodera glycines
atgatgatgattgattgggttgtcacctcaacaacaacaaacagcaggtcggagttggaaaat

SEQ ID NO: 75215 - DNA, 1489 bp, Heterodera glycines
  unsure (1)..(1489): unsure at all n locations
atggagcagtgcagaatggacgtggatttcagcttgatggaccggctcagccctttgctctgtgtacagccctttttcaccaccaaaaatgccgtccaaaacaaattgtcgcccccgccggcgctgtttctgtcctcctccgagtcggtgtttgtcggcggactgaaggacgactttgaaatgggtggaggcggttgctgcggtcagggcggtgagcagccaatgccaaaaacattccatgccaagtgctacttcaacaaattgttgctgaacttgaggtgtgatttggggagagccaatgtgtttgggttgtgtggggaaaatgtataataattattagaagttttagcgtaattctgaatttattgaaatttattttcctgcgatcggcaccatcagtacccttaaattttcaaaattttgacccaaaaattatcaatttcaatgaaaaagggtgtctgggttattttgtaaaaactgccaacatgggcggtttgaaaactgccaattttacgagaaaaactgttcaaaaacttattaaatggaacctaatttaataattttcgtatcatacaatagctatttgatcattgttagcatgaaaaatgccagaaaatttcattcagttttcagaatatggcaatatttttgaacattttaaattacaattttttttttttgtaaattcaataaaaaaatttccggaatttttcatgctaatagattaatttttcagaattccaattgccaacccatcttcctccgtctcatcccctgccgatggcactgccgattatcggaagcgatgccttcatccggaatatttgcacctcgcattggacagtgccaacttggaattgcccaaattttcgctggccgatttgtccctgttttggacgctcagtttggagtgcaaaacggcaaaaggtttttataataattggcacagcaaatttattaaattntcccaacggcatttaaaaattaaattaatttttaggcacttttgtcggcgatccgacggtgctccaatgccccagggaagcgatgacatttttcttcgcggacacttcaaatgcggaaaaaacatttggaaacaaagggatgaagtgagtttttttaaacgagttggaatgaatgaatatggttgaaattattgtatatttactgctaatttttgtgggtttttttttgtctacgtgtattttgttgattgaaataggtaaatttaaaaagtctaatcaaatttttcaaaacataaaaattttttatgtttttacatcaaaaattcccaggaaatttagaaaactaaaaaatttcagtttttttttaaatttctttgaaagtgaaacaaactgctctccaaatcgtttgccttttaaaaaaaattgtgccaatagtcagtggattttttggtggaaacctcgaaaatcaatgtgttagtgtgtccttttattcccggaaaatttttcagaaatctgaaaataaa

SEQ ID NO: 75216 - DNA, 1843 bp, Heterodera glycines
gcacttcaattgcaacgcttgtcgaacgtcgtcccgacattttcgccgtctccgtccgtgcgcccgcgttggtcgccgtcatcactcatgacgacccgttgagtgccgatgccatccttcaacaacaacaaatcaacggtgacgaggagagactgtccttttcgtcctcctcgtcgtcggtgttgtcgcctcatcctcctcatccgtccccattgctcgtcgcttccgttgtccaacaaatgaatgagcgggcgcagaaattctttgccgccgccaaatgcattaaaattggcaaacagcgacggctggaggagcagcgagaacagtttggcgagctgtgcgacggcgactgtttgcggtccgtccgtccatttgcttttttattgttgccatgaaaaatgtggcagaaaaaatttccaaacggcaatagacaaaaacaggccaaaaaatagtattttcggctgtttttccaacaaaaaatgaccaattatgaacatttttttgttaattttcgaaaaaactaatggaactttcccgataggccccattggggaaaattttgtaaaattttaatacaaattgttattttctatttcgtgcccagcattttctttacatactttcttttgagcattattatgtcaaaatttttggacaatttaaatgcatttatttgttccgtgtggaaaatttagcaaattttaacaaaatgaaaaatcaaaaaattttcaagcaaaaatgggcaaattttctgaaaattttgcacattttcttatcatattgcatttaattttccaaaaatttttcccggcggcgcctatcggcatcgccgggccccaagtagaccattattttttgaaaatttgagcccaaaatggaaaattatgatttttcggcgcaaaatccgcgctgaagattttgaaaataacactagtacaaaaaaaaatttttggtccgaagagcaaaaaaaaatgccctccccgaaatttttttctggatacgggcatatgccctatggtctcggtgtgggtaaaataatcaacaattggaacacaattttcatacaaattgccatgggacggacttctccagaatttcctccatttttcttggtttatctttgcttttctaatttaagtcagcatttttcagtttcgtggccaacgatttcttcacatccttcacttttacgaccgatttgcagcgtgtgttgttcgagtcgaagagtcacctgaaagagtgtgacttcatcgagtgcttacagtcggcacaaaacggggtaaaataaaaccggagcaggacataactcagccgccgaaactcagccgagacataattcagccgtgaataaatttttaaaaaattttcaaacctagaaatttttcaagaaaaaattcttagaaaattctacgaaaaaaaaattcaggcgatttttcaaaatttaatgactaattctaagaaatttcaaaaaattttcaaaaaaatcgcggaaaattctttaaaattttttttctcatagaattttctaagaaaaaattttctaagatttttttcttgaaaaatttataggtttgaaaatttttaaaaaatttattcacggctgcattatgtctcggctgagttttgtcctgctcccaaaataaaacacccaaaaataaatttgtattacctaattgaaattggtttataatttaccaagatttatattatttttatgcaattttttcagatgccaccccaatgcattgacattttgaacattgctgcgcccgacgaacgacggacggtgctcaaaaatgacattttgaccttccaaatcaacaattcattcgagaaacaaaat

SEQ ID NO: 75217 - DNA, 178 bp, Heterodera glycines
catgcttagttaatattagatcactttacaacaaaattgatgaaatagctttaaatttggtaaataaaaacatagacatttttctgttaactgaaacatggacaaaggaggaaaacccaatcctctttagtccatggataatcgaaaattataactttattttttgtcatagaaaatc

SEQ ID NO: 75218 - DNA, 1592 bp, Heterodera glycines
atgtatttacataaaattagcatccctagccatgacactctctcctattacgaagatttatacccatatgaccctagaaagctggatttttgctggggtcctgattcttgtgtcgaggcgagctgctcatttggtaagaccaataattagcaatataaatgatattttatcatttttcatcattaattatttaatcagttaatttgaacagaaattgctggaaaaagttggacaaaagtgtcaaaaggttgcactttcaacggcactaatctatgcgtttggcttaaacaaaaatgtttgtcattaattcaaatttgtcatgtttggaaagcgtccttcttcccatctttctcctctctcagacaacgcatcaaaaaagtccacctctgactacccatacaccgctcttagtgatcaacttgcggcaatttcccaacaaatggacaacaacagtgtcgaccccatcaccaaacaacttttgaaaatttgtgtcgaacttttacagcaggtccagcaacaacaggccgtcatctccgaacaagaccttcaactccaacatctcaaacaacagaaaatgatggaagaagccattcaagaccatgagcgtcggcgaagcgtcgtcgtaatgggtctccctgaatcgcagaaacaaaagccgtccgagcgagtcgctgaggaccgaactgccatctcaggcgttctcgatgagcttggcatcgagagcccaatcactgtgtacagaatgggttccccagaccaagcaaagacaggtcaaaaccgcccgaggttgatgaaagtaattttcgggtgctccaaacatcagaaacaaaccttggcacagtggaacaaagggcgcgcgcaaatcaatcagaaattggggatgagcaacatccgaattcgcccttcactcagccaagaggaactcaaggcccgacgtgtgctgcaagaagagtgtagcaggaaaagaaaggaagatggcggcgagtgggtggtgtacgcggacaaagtgatgctgaggtcagacattgcggcatttaaaaataacaccaattgacttgctgttttaccaaatcacactcacaaaacatttataaattcgcacttttccggtcttaagcatgttaagcccaataaccccaaaaccaaaataggggaagttaaagcatgcttagttaatattagatcactttacaacaaaattgatgaaatatctttaaatttagtaaataataacatagaaatttgtctgttaactgaaacgtggacaaaggagggaaacccaatcctctttagtccatggataatcgaaaattataactttgttttttgtcatagaaaatctcaaaaattaacacgtgggggtggttgcggtgttttaattaagaaagaaattgagttttttgttaaattttctgaaacaaaatataattgcgaaatcttggtttttcaattacaaaaactaaaatcaattagatttgtgcttgtttatcgaccacccaagacaacatatagacaaaccaaggaactttttaaatttttagaaacattctatagccataattgtgttgggtgattttaattttccgaataaa

SEQ ID NO: 75219 - DNA, 337 bp, Heterodera glycines
atgatgagtgccaaattttttacgcatttgattaattcggcatcggtacgacccatctccacctcatgctgcagaaaggagttgcgtgaattgtggaaattggacaaacggaacccttttcaagaaattcccgaggcatgggtcacttctctggatgatgttgagcagaaaaattgtggactcattcaactccatccaggcatggcctcaatttggagcgaaaatggcaccatgataggacattggcaaaaaatttattccaaacacttcttaaatgttcataagcaacacaaacattgcctgatttctgtggatgagaagcgctaaattttctcta

SEQ ID NO: 75220 - DNA, 670 bp, Heterodera glycines
cgttttgccgaagttgagttggaaccgtgctgacaaaaggttggattgttgtttttggaaaacagagaatattcgctccacatccctttgtttaaggttttcgtataatttttgtttcaatcaaaagcttcaactcatagacattttcaacagacaaaacaaagttcgaaaaactcagttttcatacttttacgggttaggaattcaaaattgggcaaaatgggtatggtattcgtgatcagcgacccctaaaacaactgaaaacaaattttcaagttttttggtcaaaaaaattattatttttttttttgcaaaaagagggttcccctttgattttgaaaaaactcaaaaaatgcaactttttcttttctccattggggtattccagggttttttttctacaaattgctgatttcgggctttcccgtgattggctctggaggcgttcatttttaatttacttcttttagcaaagcctccggcggtggctgacattgacgtttgtttgttggttgttttttgccgctcaatgtgatctcctccgacttttggacttcaaaatttttgccccgttttgtgggaaattggattatttacattgttttttctttgttgctttgccagtgactttttttgtttgatgcgcaaacgaccacattattttgcacaa

SEQ ID NO: 75221 - DNA, 158 bp, Heterodera glycines
cagtccctgtgactgccatcgttttcggcagggatttgctgttggtgctctgcagcattgtgctccgtttcaaaatggtcgatgctccgctgactgtgcggcgcttttttgaccccaccgtttcgcccatgcgaattcagcccacctcgctgagcaaa

SEQ ID NO: 75222 - DNA, 3041 bp, Heterodera glycines
tgcccgtccaatgcgaattggcaggcggtgatgggctggatattatgaatttggtcgctggattcccactcattttcacggtaaatgaaatttaattcagctgctaatggaagaaccccaaaatatcgacgcagaaattaaaatttttgaaacagtaatttaccataaaatttcaaaaatatagctgattgtgcgatttttcagatttgtttgctttaaatctcagtttcaaaatttttagaaaaaattctgcgtcgagattatgtctcggcgagatttttccgataatttgaacccatttgtttccctacaggtttatatcggggctgtagtatacgagttgcattacatagtgccaagcgttaaaaatccattggaaaccatccgaatgaaaggcaaaacgaacgccaatttggaattggttggacatacacctttataatttaacaataagtataaattgaaataaattttttttaagtgccttggtttgaattggagcaccgaattattacgtacaaatttgatgctttacgcgccgtattggatggtcaacgagactggcaaacaactcgcttattatgtgagacatggcaaacaaaaaatacattcatttagatttaaatttcctcaagttttaattcgagagtttttttatagtaataagctggttagcatttctgataataatcagtctttttccccgtcattcatttgtttcccccttctcttttagagtcttccgtcagtgaaatgtctttgttgttctgattgtttgtcatgtaaagctcaggtcagggacgtttttatgtaatatttggcggggatgaatgatacgaaagaacggagtgtcctatttatgtcaatcgctttgtatttatttataaaacaacggatttcgtgataaaaataagtttaacccggaaacccggttttggccattttaattcaaatcggttcaagaatatttttcttgtcttttgaaagttgctaaaaaaattttgatgccattgtgtagaggaaagaccagacttttaaaaagacctaaagcagcctttttctcatgccaagttttatagaatttttccaatttatccaaaaacgacaatgttttgcgacaacccaattgcctaatttcttttgcttgggcttgtgttggtctttgtctttgtgtgtgtttgcgtgtccttaattatatttaaacaccgacaacattaccctcaacttttttaccattttcagagcaaatccgtccaaatttcgcaccctcccggcaccaatccgatgattctgccgttgaaggaaagtgaatttatgtcggagaaaaaggcaaaggtgaaaatcgtggacgagtccaattggtctgccgaattccctttggacatggccggcagcagtgagcgtgtcacttgcaaaggcatcgccaaaaagaagcgcgcatttgaggcattgaaattaaaaacatttatttgttttactataaatgcctttctccgttcagatgactgtcgatgtccaattgggtcagtccggcctcacaaaagtggtgaccattttgcccttctttttgctccaaaatgacagcaaagttgacatcgaagtgcgcgagccgcacttgacgaaatggattgtggtgccggcggaatcagtcagtgactttttgaagaaagaaaaacctatttcaaccatttgcaggtaattggtttttggccagcggagaaaaagaaacacaaaaaattagtggcacgttatgccaagacgaaagaggaatcggtgcaattcccaatcacagaggcattcgaaggcttttgtcaaatccggaataatgtatatgtcttcgtcattccagtttcatttgtccctacttttagctgatcggcctttacgtgatcgtatctctgctggatgaatcgtccgtcattcacatggagatttttgtgcccggaatggtgccggcgattctgatgaacgacaccaaatacccaattcgctaccgacagacgggccacagacagtggcaaattgtcaagcccaaccaaatggcaccatttgcgtggaccgactcgctgaatggtgctgtttctgtcctttaaatggctttttatttttcatataatcctttagccctttttcagattgtaaattggaatgggagtcgggcgatgctgaaaattcggatgaattgttgcgcaaccgcgacatttcttatctgccagccaacaatgatggttaccattattgtgtgtcctttttggacgggcgccagcgcgttttgctcgtaatcatttttaatatttacgataattccttatttctttttgtttagttcactgctgacaaaaaagtttctttcattgctcaccaagcgtatgaagtgagtggacagaggggcagaaccatttatcttgttttcacattccatcggtttttcaatcattaaaatttcacagatggaacagccggacatcgaattggagctgcacttgcacgggttgggcatctccctggtcaacaacttgaaaagcattgaagtcctttatatggtcattgagattcaatttgcctgtttttaaatatgaaccactatttaggccatttctccaggaaaacagaagaaaagtgacgaaaagtcgcttaaaatggccaccggtttctggtgtcaatatcgtcagaccactcatcagcagacgcttcacgtgaaattgcacaatttccaaatggacaaccaattgccagcgtccaccttcccctcattactcgccatggtaccacagccgaaatatatggttaaaaatggttgtttatttaaaagtttttggcataaatgttacaagttttttatttcagatccaaagccattcctggagtgtgcatttgtgatgagtcaatcggaacatacgaacattgtccaaatcaaactgctggaggcgttggtgcaagaatttgcgattcgcattgaccgaacattgctcaacgaactattggacataataccgaaagggatcattcagacgggatacactgtgaacaaagatgactga

SEQ ID NO: 75223 - DNA, 84 bp, Heterodera glycines
gctttcaacatctccaccaaaccgtcgctgcccgttttggagaaccgaagacagaaattggaaaatggacccgattcgagcctc

SEQ ID NO: 75224 - DNA, 2483 bp, Heterodera glycines
aatccaattaaggcgtattcgaatttcactgaacgattgaccaaatctctgaatcttagccaaagtccgtgcgacaatttctatgaatacgcatgcggcaacttcaaagggccgatcagtttcgaccaattgacagtgcaaaacgtaaaaacatttgtgggattggtcgaagatgaacgttacagtaaaaacccaaaggtaattaacccaaagagataaatatttaaattcgctaagttttagttgccactgcccgtcaaacagtcgattcaattctatcaaaaatgcgtcggagcaatgagcgattggagtgccgaagttggcgatgggagccgactgagaaagaaaatgataatgttggagaatctgttggatggagtgccattccccgcggtgtcggccaaaacccaactgaacgtgagcactgattgaagtgattggtccaattaattgagctgatcgcttaagatgatggaacggccatccgtcgacactttgtccatcgctttgggctatttgagcaacgacgaaggcgttaatacgtttgtgtctgttggagtgtccaccaattggcttgagccgcacggagagcatccgtacacgctgcactttgaccaagtactgcttggaaagtgacagcaccgtctgggccaatccgtccttttcacaggctcgccttctgttgcccaccaattattatttaaaagcgtgggaaaatgttcgcgcaatgcttcacgcaaatttggtctcctcgctgaaggcttataccaaatttgcgggtgccaatgtgacaaatgagcaaatcgacgcggacgcgagggaagtgatggacatggagctgaccatcgccacaaatttgctgaaagcaccggacgaaagacgcaaattcgccccccaaagcaacagttatcccaagggggggggaagtggccaatgggcaaaaaagaaacaattctaatgcccgttgaagcgtacacattcgagaaagcggacaaagagatgggcgagtatttggactttggactgttcgccttttgggctttgaaagtgccggagggcgtcgacccggcgcacattgagcctttttacatccacgagcccaaagtgatcaaaagcacaatgcaatttttggacacggcaagcattgatcactttttgtgaattatccattgttccatagatttccccgcgcactttgtacaattatttgtacatccgtttgctgtccgctaacctcaattatttgcccgtgtcccatcgacttggcaaaatcccgggccttctcagtgcccgtgggattggaattcccactctcgacgacggtggcattatcgaaaacccgtggccatatgaccaggatggcatcaattttggtggccccgaggggcgaaatcgcgcaatgtgtgcgtcgattaatgcccaatattttacgtatgcaaacgcacggatatttttggatgcgcagttacccgagaaggaacagcgaacgaagctgagggaaaatttgcggacgatggtggcgggggtggtcgactcgtttagggtaaatggacaaaagacggaaaaaagcaacaaaagaatgaatagagccaaatgatggcctaattaagccaaatgatggttaatcgtttctctagggaatggtggcacagttggattggatgagcagcgaggcaaaaagggcgtctttcctgaaaatggacaatttggtgaccaacttggcatggcccgacttcgtcgaagacgacgccgcactttcggaattttattcgctgttggcattcagagaagaggacacattcacgcaaatggtgaaatagcgagttaagcaatacaaaagttgcgaaatgacttcagaaagacaaactgcgcgacttttggacgaattcgcaggccgaaaggcttttctttgccaacgacaccgaccgattggactttggcattccgtccattgtcaatgcgtggtattcggtacgtttttaaccccctctcctttctccgatcagggctctgtttaagtcttcgcgcaattcgatcactttccccctgggcattctctccaagcccttctacgacccaaactttcccgcctccgtcaattacggcgccctcggcgtcatcgctggccatgagctgtcccatggctttggtttgctctttttttgtccgtccgttttccgatgctcccatcaattacaaaatagcttctgctgatcctttcattccatctttcatgctcatttctcatcagatgacgaaggtatccaatgggatggcacgggaactctccgcggatggatggacgccgcttcggaggcaaatttcgagcagatggcccaatgcgttgtggatgaatatgcccagttcgagcctttgtccggcatgcacatcgacgggacgatgacccaaggcgaaaatattgccgacaatggaggtcatcggtgggtaaaaacgagcaaatttcgcaaaattttcccgtttta

SEQ ID NO: 75225 - DNA, 1542 bp, Heterodera glycines
atgacagcaacaattcctctgatccaaaatttggatttttacagcaattcagagtgggaaaagcggaacccggatgttttggaaaatcgtaaatttcgatttaaaaatgtgccaatttttattgtattacttactgcagttccttgtacttcaaatacctgcactgattttggtacatccacttcttcgtcatcgacccaccatgaccataatcaacaaatttgttgttcatcatcgtccttacgttgctcttcaacatccagcgggtaggcacttgaattgcaaggaatctcattcaacccatgatattacgataaaagacgacactttgtttttttacagttttggctcattcatcgatgacttggatgacttgccgttaagcccggcaaatagttcatgcactttgttggcctgcgacgacgaatacaaaaataataccgatgctgatgaccatctgaattttgccgacaaagcatcatcatccgctgcaagggatgagacggcttccacaacttcgactgtttcacattcgtacagaatggaaaaattagtgccaatgccatcatcgtcggcaacagcggcgagcagttcaaaacgaagacgaaaaatggtgcacagcaacagtcaacggcagcagaaaaagaaacagaatttgacgaagcaacaaatgtcaaagatcaacaagaaggatacgaaatcttccaagttggactacgagttggagttgaagagacgccaagaggaggaagaagaactaattgccatcaggtattaaaaatggtgtaaattttttgaaaaaaataaatcgttttcaacaaatcaatttttttttcttttttagttccatttctggccccaccaccagcagtcaccagcatcaacaatttgattttacgaaagtcaaaggcaaacgtggacgtaaatccaaggacaattgtaagtcaaaatttcaatttattacctttgaattagacataaaatatgatttttgaattagctcttctcaacgagcacgagctgccttactccgcggaatggttgactgcaatgccctacagtgtgtactccgaactgatgaatgactttcggttgagcgcgcagcaaaaagcactgatcaaaaaaatccggcgaagaggtggaatatgttttttttaaaattttacgcgggaagaggagccgcgggggggggggggtttgcctcccgctggttacggacctgacctgaaaagacacaaatctgattatgcagcacaatttttgtctcgtctaacttgttttgctccaaccaacacaggtcgtaataaacttgctgcacaaaaatgccgcgagagacgggttaaccagaagcaggagtgggagagcgagggatggtccgtcgaagcggacgaggatgaaatattcttcatgaaagaggaggacgatgacgatgaactcggagaaggcattcacacatttgacgacgttagcacacaacaaacggcagcagaagataagcatttacactaccatccaaactattacgcattttgcaacaattaa

SEQ ID NO: 75226 - DNA, 1105 bp, Heterodera glycines
atgccctcagcgatttctgtcggtctcggaaggatcgctggcggtttcgtccccgcactttttggcggatcatttggaccggtttccgcttggctaactcgcggttggtacggccaacatgcggtccctttgggaaaaagatttgataggtatgtcctctctgtcgaaaaacattgagcctaccctattcggccttccatatgcctctttgccgggccgcccctctttcacttggtccatccgttcctcctttgtttgacgccgaaacttgccataaaaatgttcaatgtcgctaagccggggaaggccaccatgtccatgctgctcattgtcgcttctttgaacaaaataaaattgtggcaccgccaacttctccccccgcccattccaactcattctcatcagccgaagattcttcgccattggacgacgcttttcccgcttcagacaattcgtcatcatcattatccacgtccatttcattgttttcgtcagtagctttttcaggcctccctcggtctttgtgatgcaacagtttcggattgatggtacggaacagcatgatcagtgcatgggcagccaacgacacatttttgttgtgcgtttttttgtactatacgcaaaaaaaagaaattgtaataaataaagatagaagatttactgggaaaactttaccgccgctaaatcccgaaccatctcttcagtggctgcctcagggcaacccttgtaaatttcacgaattgtattcaggccgacagtgattgcctccggtgtgttgcggtcggaaacaaaattttgtgcaaccactcgaatctgaaagtttttgaaaacccattaaaaaaattaaagtaaaaaataagactaatcttccggtttttagataaaagataaaacccattttagttgacaaattgaatttttttagcctgcaaaattccaaaaaaatatcgttatgttcagaattatattaaattcattcaattcggacaactatgaagagttctaccaaaaagaaaattgggttgtcgctcagttgtcttccctttccggcacccttttcaccaaaatcacacttgaaggaaagatgttaccaattgttcaatga

SEQ ID NO: 75227 - DNA, 1333 bp, Heterodera glycines
atgccatccctgatagggaccgccggaccctctgttcctagttttttgaaaaattgcaccgcaaaaaaagtgggtttgaaaagaaaaaaatagtcaatttatgaaccgttaataatttgatttccgatcaactttttaccgtcggatccaatcgaaaaatcttagtcgacccatcagccccttttaatgcatcccgccagcccttaaaaatttatttttcagcattttttgatttttggaaattttttgaatttaattgaaattttttcgaattttccaaaatcccgcaatcccgcacgggatcccgcaaattttaaatgcgggattgcggaatttgcgggattaatcccgcgggatcccgtcccgcaaaaagttttgagttccagtcccgcagcgggatccgcaaatttgaaatttccgggctctagtaataatcataatttggcataatgtttttgaataatacaattttgaaatttttatttccgcttgtaaaataattaatttctttgataagtgatcgatagcattaagcatttgttgggagcttgggagtgcgtgcgactcatacttgtacattttttatttttgcccattctttaatatgacttttgccaattacctaaattaattaatagtgttttgggcgctatttgcaaagagtaaccttttgaaattatcaaaaagcaaaaacaaaaggggggacccttttgtttgcaaaattttttaatatttagtcatgaaaaattattccctggggttctttgggtccaagacctagaattacatgtcagattcgatgatcagcgacctctaaaaccctcggataacatatcttctaggatttatatcgcgacccttccttgacccggatgttttaaaccgaggtaaattaaaattagaaattaatttatcaaatttaaatgaaaaaaagtaattttcattttagatggtctaagcaatgcgtacacggacaatttgtacacttatgcgccaagaccatcatgctatggagccggtcaatgagcatcaccgtaaaaacaattatacattttaatcccattgaactgtattcccagcagtaggtggcttaattcttttttaacttggtactgtgctagattgattacagtcttagaactttacatgcactgatttgcaaaaaaaaactactgaatttcaccataaatattgttaacaacattacaattttcctaaaaaataactcattgaacaaaatttatgataaaacctaatttattggtcaaaatctataagttgaaaaattagcaaatttttgaaaaatcaactgggaaaactgttatttaataaa

SEQ ID NO: 75228 - DNA, 130 bp, Heterodera glycines
tatggcacggaaagacttccgatttccgacatttttggggtaggaattccgacttccgaaatttttgatgaaaagtcggaaatttttttaatttttcttttcaaaaaactagcaagttttgtacaatttc

SEQ ID NO: 75229 - DNA, 1830 bp, Heterodera glycines
atgggcgaatttttcgcctgcaacttttcgttggccttagaggtggtgatgtcgccgatgcgagaattcttcgactcttacgggcatgtcaatgtcaatgttaatcccgatatcatcagcgattatctcgttggtacattatctcaaatttatgaaatgtgcccgtaatgatttttcaatgtatgttttagtattaaattaaacatttttcgaaaaaaaatctgattagaatccatatggcacaaaatcagcttgccagactaaaacgacccctcagactaaaccggccagactaaaacggccagactaaaccgacccctcccgtaatttattcgccttaaattgttgccaatgggctcgaggggagagaaaggcaaaatcaacatcatttttaaaatttcgataatttttgaaattttaaagcaatttttttcaaatgacttttggcggaaaaataaaatggggaaagagataacagaactcattttttcgttatctctctaaataaaattataagcagggaacggatttatatgtttttacatgttttttttgcgcatatgctatcgcatgaaaagctcaaaaataacatattttggactttttgggaataaaaacatattttggggtttcggcagtttttgtcataaattttagcgatttttcgaaaaaatgtcttttttggcaccaaaattcttggccaaatgcccaaaaaattttcagaattttttcaattttttgacgcttttcatgactttttttactttaaggtaaaatttgatttttagcgaagaaaattccgaaaattagaaaaaatttacgccaaaaagcattatatagtttttttttctgtcctccttctctttctctctctttctctctttttcctcttgtatttcctttttctcttactcgccaaaaaaatgtctaaccaaattctcaattttgattttgttcttctattccttcacatgcctaattttcaacattgatgagaaatcaaaccgacctaaattttgaaaagaaagggactgacacctaaacaaaatgaaatgaatgaatagtcatttattttagagttgagcgggaccgggacctgaacacggacaactgagtaccaaggtcccggttttgaccgggactagtcccggttttcccagccaaaaattcctgggttttcaacccgaaaaggtcccggtcccgggtttgcccaaaattcccggtcccgctcaactctaatttattttatttgtctttttattccctgtcatttattcaacaacaacaaaattcttttgaggaaatttaaaatccaagcttgttttatcggtatcaaactcaaaaatttcaatttcgaccaattcaataaattgtggagatgatttcacagcaacagaaaatggaggtatgtaaatgaaatgggagaaaaattgagtttgaaaactgaaattaaatgaatatttcaaccaaaagattaaattatggtatttttagaagtgaatggcgctgcaattaatttggaaaatgatggacaatttgatggaaacaatgaattgattgctgacaaacaacagcttaaggtgggcgaatgacataaacaatttggataaatttgaattttatgtgggacaaaaaaattttttggtactatgtggtttataccagggatggcacagaattccgatttccgaaaatttttagtgcctcggaactccatccctggttagaccccataagaaaaaaattaagaaaaatttttttttgaggcataaagatgcctccagaggttttcggggtcgctaagcacgaatctgaactcatatcaataaa

SEQ ID NO: 75230 - DNA, 983 bp, Heterodera glycines
atggacgagacggccgtttggttcgattgcccggacaaccgatgtgtggacaataaaggcgcaaaggatgtaagttttttttagataaaatgaacctattctaacaaattaggtgacagttgtgaccacaggacatgacaaaatgcgggtgacggtgtgtcttacagcacggaataacggacaaaaactcaagccgtacgtgttggtcaacagaaagcgaccggtgccgcaaattgtcaaacaatttgctggaaaattggttatcaatttcgctgggccgatatggatgaacgatgacacaacggaggactacctgcacaaaataatcggggcaaagctgttcgttggcgaacgcctcttggtttgggatgcgtttggcagccacaagagcgagagaacgacgaaggtggtgaaaggattgggagtggaaacggtttttgtccctggcggttgcaccaaattcattcaggtggagtgtcatctttctcagtaaagttaattccttctctaggctcccgatgtctcgtggaacaagccgttcaaggagcgaattcggcatttctacaacacttggatgtccaatgatgcagaaaaagagttcacaccggcaggcaacccgaaggcaccagcgcttcacatggtacttgactggatccacagatcgtggcaggaaatttccaaagccgtgatcatcaaatcattcgagggtcagtttaaaaaataaaaatgcctacgaaagacgccgaaacttttaagtctgtgggttgactacgccattcgacggaacaggagacgaaaaaattgcttgcttcaagccggaaggagcaattggaccgatagggacaaaatttttgcgcgagtttagagaaaatgaaacggtgaaagatggacgaaacgatcacgaagaagccggcttatctgatgatgatggtgatgtagagctggatggagtcggagatgacgatgaatttttcatttgttag

SEQ ID NO: 75231 - DNA, 1155 bp, Heterodera glycines
atggttgcacagtccgagaaaagatggcatgccgaagcaattgcatttctttttgaaggagccaccaaatatggaatgggccaacactctcaaaaaggtgtggccatattttcgttagccaactgattttgattgcatttaattaatgtccgtccgttttcccattgtttagcattttctccgtgccaatgccatttcttcggtcagctaccaaattcaatttactgttcagcaaccgtcaacgcaaattgtgccatttgaattagcgaacgaacagaccaaggaaaagctgacactgatcaaagcaagcgcaaatgtttgggaggatcgctgggtaatgaaacggtgccaatattgggagacggcggcggttcaatgggcagcccaaaatttggacggatttagcactgtcgagtttcattattacgtcgaagctggcattgggtgagcaacaaaaaagcatttgattttgtttaaaaattgtgccgaatttttaggcctttgtcgccacgtcgcaaatggtgtccaattatttgaaagtgatttaatgcatttgggaaatggtcgatcattttgaattatggcgatgaataagaggtgatctgaccattttttatgctcgtttttactctctgatttgttgttgttttccgttaaaatataaattttctctctcgtctcgatgcatcccatgggtatgtaccagggatggcatggaattccgacatttttggggtcggaattccgatttttgaaaatttttagggcctcggaatgccatccctggtatgtatcaattaacacgaaaaattcagggtgtgaagtttttcatacgcaatttatagttccaataacagtacagtgcttgtcattaaaatcaggacaccccccattttcagaatttaaccgcttcccgtgaactggtcgaattgattattaattcaataagttatttgtagacacgactaaaaaggcaccaaaaaatcgcgaaaaaaggactatttacatataataggcatcaaaaattgaaaaaaggcacgaaaatggaccgatgggttagacaatgtgccaatgggagacgaaaaattattgccaaaaatggaagggatggaaacatttcgacacaactttgtttttaaaataagaaaattttaa

SEQ ID NO: 75232 - DNA, 1450 bp, Heterodera glycines
ctttttcctctttcgctctgttttttgctcctttttccgtcttcaattagtgccactttttccgtgacctttcggcaatttctccgtgaacgttacggtgacgcggtggacaaagaactttcccgagaagacgttggcggcggcggaagtttcgggggcggcactcatcaaaagggacaacagacgaagttagtcctaattgaaagaaagtgaattcaaaacaatgccattcattcggctgaaggcgtcggccggtgattttcgtccacggcatcacaaataatgcgggcactttcggctcaatacagcactttttcctggcaagtgatgcaaatgtatcatgaaaaaattgctgcacacagaacaacgggtacggtgacgaagaagtgtacggtaccacatacggtgactcgggacgaacaaacgttgtgagggaccgtgtggaaattgttgttcaatggttcaccaaatgttaaggcatttgttacgatgtcgtgccactacgtgaaagtggtcagttgacagagagggcacattgccaatgggaaaaatatccattttcaaaatggcggtgtttgacgcccagctgaaaccctccaattttgagtgccaaatagaaatcaatcgctcatttccgtagggcataattggcatgccagaaagccttttattgctaaccaatggcacactgtgaacactttcccctcaatagattcgaatgattattgtggcagtgtccgcgtacaccgacaacaaagtgaacatcgtcgccttttccatgggttcgccggttgctcggaaggtataaaaagcgggggggggggagtcatttactgaggacattttgccactcttaggccattttgggcggaatgtgcgttgacacaaacgaagtacggtgagggagggcaaaacagcacaaactgtgccgtgcctttgtgtgcgttggcctcccattccgccgtccttatttaaggacgttggtcccccattgaccaatttggtgcgcgctttcgtcggcgtggcgggtgccaattggggctcctttctctgtgtgttgccctttggcagttgcaatttgctcaacggaatgtcctgcggctcgcgttttttgaaggacatcaattcaaagtctgagctttcacattggcaaattaggcgggaaatgcccaaattaaggaagcgatacgaaggcgaattcatttacacaatttattcgacgggagacgaaaaagtcggctaccaaacgtgcggacgaattgccagtgccattgacggagagaatgcggcatttcaagtagaaacccgaaataaaaaaacaccgaaaggaaaacaatttcagaaggagggactcaaccacgacggggtcattttcggcacggcgaatttgcagtacaatttagtaacgtacaacagaccatagtgaacatttgaaagaaattaaatttaa

SEQ ID NO: 75233 - DNA, 1001 bp, Heterodera glycines
atggtccaaatgtggtgcatggagacctacccgtgtggtgatccgcgtctgtaagtgccgtctttttctgatcattcggtgccatcaatcaatcggtgcccccgcccccctccctttccccgctcagtccgcaccactgtttcccaccaaaattggtgaatccggacgaattgaccaaacggacgggcgccctctattataaggtaattgttgtccgtctgttgatcggttttttttttttgattgttcgatcactgatcagatgggtcttaaatctgtgcctttaattttgccttcgtcagttggatttggaagaccaagtggcattatcaaaacgaattgcaattatgaaattggagcgcaacttcaccaaggaggacacgtacacattggacgcacagacaacgaacgattttaaggaaaaggcaaagcccattttggaaatgggaagaaaagcattcaaatggcactctgtttgaagatcgcagaacttttcgaagagacggaaagtgacgaggatcaagcacggatggttttggaagggtcggcgtattacgacgtcgaagccaaagtgatttacacatggatttagctttattgaatgcccaaatttaggacggagtttggatacgcatcttttggtgagcattagcaaattcaatcggtcaattgactaatttgaaatgtgtcagtgagtatggcgacttactcatcatccctaagggcatcgcacatcgaatgaccacaacgccgaaggcaaaacgagggcaaagcgggcggggggggggagggcacggcagctttagctggaaattaggatttgaaaagaaatggcattttagaggaacaactgaccgacgaggggggggggcaaagtgattagcaattggaaaatgagaggggtgggtgaggctgtggatttggccataataatttaataataattgccttttaagaattatgtgaaagtgcgccgctttttcaagtcgagcgatagcgac

SEQ ID NO: 75234 - DNA, 421 bp, Heterodera glycines
atggctggtattaccatgtgagtgggggagagaaggccaaaaaacattaaattttataaataaaattaataaattaatgtgtaaaattaaacaaattcaaaaaatttgagacggaaaatgtttttattctttttttccatggttcaatttgtgccgatttccttttttattggtcataatcaggctaccattgaatttttcagaaatcggcatttggccaacaaaaaatcaacattttgaaaaattttatgaattgaaagattttctcaaaaattcattcctccaaaaaagaattatttttgcttaattggctgaaaattatgtcactatccgtcattatttcagactttttgtcactcttttggcattgttcctcactgttttagttaactatttcgagatttttcgtaacttaaagtag

SEQ ID NO: 75235 - DNA, 111 bp, Heterodera glycines
atgcagcagatgagcgtaaagttcgcgcaggaaatgcaacggatgttcagcgcgacttttccgttcggtccgcccgcggcgccgccgccgcaatttcatttaccaccgcaa

SEQ ID NO: 75236 - DNA, 483 bp, Heterodera glycines
atgtggctatatggtaaagcccatctacagtagccagttttattatgccaaatcacattcattttcctccatcatttatttcatccgatttgccttttctctaaactttgaacacgacgacgatgagcagaagcacggcacctaaacgaaaagagcttaaaacggcctaaaaaatttttacaaaagagagttggcataattttgccagtatttaattaaccaaaatgatttttatataaaaaaacaatgtaatccaaatctcagttgatatcattcgacttttagcgccggattaagccggtttaaaaattcccatttgatagactttttgggtgccaaatctatgaaaaaataagaaaaatatccgtgtttttcttaatcgaaggaggagacaggcagaagagttaaactttatttttggcttttaattccatgttttcagtgcaatggccaatgtgtcaatcccaacccacaaatgattaa

SEQ ID NO: 75237 - DNA, 438 bp, Heterodera glycines
atgtcgtcaattgtctacatattttattgtttttgtttttctgttcttttcaatctaacagtaagtgccgtttctgaggatctttttggtgatctttggaaaaatggcggacttttggaaaaagggaacggcactcaaaattggccgaaattagaagtaaaaaaaatgaatgttgaaccaaaaatgtaggaaaagaatcccattgaatatggggaagaagcaaaattaaaaattgaacaaaaaataattggcaaaaacattggaaattttgtcaaaaaagagacgaaaagtgaaaatattcaggaaaataacaggaaaaagataaaaatggaagaaaaagatgaagaaatgtcgcaaaaatttggtcggccacaaataaaatgggaggaaaaattttttaaaataaattgaaatgcaaattaattattattaaataaa

SEQ ID NO: 75238 - DNA, 655 bp, Heterodera glycines
atggcaaatagcgcaaagaaaataacaataaaagtaaaaatttatatgaattcaatccatttaatcttcttttcgttagtgagaatagatcctttttctcaaatttaatcagttaaaatattacatttttgacaaaataaatttgtaaatgaatgacaaaggctagcatttgtaattttgcaaatttggattaactgaaaacgtcattattttacagagcactggaaagaatggaaatccgaataattgaaaatttgaacaaaatcgttgaattataaaattttgtccaaaaatttggacctcagaaaattatcgatttttctgataccagctgaaaatgttggtaccggtgccggtttttgcagtgtcggtcagtaccggccggtaccgatgaaagcgaaatttaccgatacctttctactctcatttaaataattgaaattttaaaattattaaggggattcatttttctaaattttctatttttcatttaattttctcctgacttactaaaagcacggaaaaagaagcaaatttgtataatttttaaaccactaaaatattcatttattcattcattaatttttgattatatcacaatttattcaaatatttgttatgcaattatttcttatttcaatgtaatcatttccaa

SEQ ID NO: 75239 - DNA, 313 bp, Heterodera glycines
atgaaagcgatgcttcaaacgacacaaagacagaacaaaatgcgcaagaccgtggtaagaacaaatgaataaataaaaacatagttgataatttaaaaatatttaatttttatattaaaatttcttttttattttcagcagttttttcgctacaaaaaaaatctgaggacgaatttaccattagagctgccttttcctgaaaatgacgtgacgaaaaacgaaagatgaacgatcgaacgactgatggatcacagtgatcaacacattcttaagaaaattattggtgactttgaggaaactgataaaaatgtta

SEQ ID NO: 75240 - DNA, 489 bp, Heterodera glycines
atgaccactccagcaaacgcggcgagggcccggagtgccaaggcgaagctgcgcgatgccaagcggaggagggcggcagttggacgcgcaggatacgtaagttgaacaaaccccctccccaaaaaatggaattttcttaatttcagacaagaaaagcgcagcggggcgagcgatgtgccatctgcatgagaaacgtgggcgacatcacgcggacgacgctcggctgcacccatccgttccatcatcgctgcttgtaccgctggctccgctaccataccaattgccccgtgtgccgctacaacttcgtccgcaccataccgcgcagtgagcgtcgtcaaccgctgtaagatgccatgtgttgtgatcaccatacgatgtcatttgttgtgatcatatttgtatcccattgttcgattatgcgtatgtatttgtacaatggaatgtatgtttttatatgtacagtatgtataatattcgtcagtaaataaa

SEQ ID NO: 75241 - DNA, 472 bp, Heterodera glycines
atgctttcattgtacactatgctcgagttttccctgttggtgctgaacggcattgcaattataaaccgtgaacgagttttgaacaaggttaacaaacatattgctgttttttatccaatcgttttccccttatttgaagtatttgaagaatcggcagcacagtttcggagcagaaagtgagcaatcggttgtgtttaggctcgtcaatttaattcttgcagttcaaaccgtccttagaggttccgtttaattaacttttttgcttttttattaaaagtttgacccttttagtgcctctcatcgtcatgaatattattgttatcatcataaagctgttgtttggatgaaaatatgccttggccataatcacatatttatttccagtttatttgttccttctgttgtcattaaattttttcattttgcttatctgactgataaatctcttccgaattttcaacataccaacgaa

SEQ ID NO: 75242 - DNA, 543 bp, Heterodera glycines
atggtagctgattcaggtgcgaacaacgcaattgaccagctacagccaaattgggcgacaacaatttgatgaccggcattttgggcccaaaagaacatcaccatggttgagcttcatcgctttatgatgctgagacgaaacgaaatcagattaagcgcctgatcaaggagaagccaaaaaagaaaccatgtcaactccgcgcacaaaattcggactgacggtcttcgaattgctcggcaccatgaagcgctcgaccaaatggcgaattcgttggtggtgtcaactgttacccatacctatgttcttttctaattcagtttaattttagctgttgtcagtgctagaacagaatgtcctctacagtttccgatctcgttttggaatgtgcaccccagggctcaaatgatcacatccgtggaaataaagaaagtgatgaaggaactgatgatgccaatggaaattgaattttaccattttcaacattttatttttattttttctttggaatttaataaatatctatttgcttacatgtacttttag

SEQ ID NO: 75243 - DNA, 1576 bp, Heterodera glycines
atgcttctcatcattactgtcactaccatcatttatttttttattccgcctaatttttctattcaaatatgcgtaaggttattcaccaattgaatttgttaaccgccaaatgtctgaatttattaaagcctaaattctaaactgaatttgagtaatccccactataaatttaatttgtgggttccaaattagacaaaaaatatttggaaaaattccagtcaccgttgttaccctttcaaatttccagattccaaaattttcaatcttttttaaaattttttatactctaccgtagtccgaaaagacccgaaaaataaaaaatttccaaaaatttggagtccatattttttcaattgtcttaatttgcaaccaaaattgaatttagtttttcaagtttttttttaatttccattaaaaaaatgggcacgaaattattttcaaatctttatgcaattatttttttgtttgttttaaataatttaaaaaattgtggcaattaatttttcaaaaaaattcgagaattccgtgccaccctggtaagcaggtgttaaagaaaaaattattatttttaaaaaaagaacaataaggaaagaattggaatggagtcaaaatgtcgtgcaaatggcgcagttgttactgctgccgccctagttgagcgaatctttggttcgagtccgagtgcacgcaaaatttttttcttctttaaattgaaaaataaatcatcaaaagtgctccacaaatatttctttttgtgctcaaaagcagaaaataacaatttcattcaatcctacataataaagttgagtgtctgtatgtatgtacggatttttgaatttgtgtggcgttttgttattattttgcgttaaaaaatgatttgaaaatgaaaatgtttttgttttgttttgcgttaaaaaagcatttgaaaaatgaaaatgtttgtttttttttgcgttaaaaaatgatttgaaaaatggaaatgtttgatttttcattttgttttgcaaaaaacattcttagtcatttattcgcttttttgtgtatgttcaaatataacgccaaaatcgtccacacctccattcatcattttaattttttgtttttgtctttcattgtttaatttaaaggtttaatattgcttatttttttaaattcaaagtctgtttgtcgtaaaattttatggttatgtattggttagaaaaagtatttatttttgttgtatacacattatttcatatattactttaatttttgttttattttagaattgttaaacaattagagaattgtttttctgccgatggctcattttttctaccagtttggtcaaaaatctggtgactaaacaatttatcgttgtttttctgccgctacggctcattttttctaccggttaggctttttcaaatctggtgccagcctgttgccatgcttacgactctggaagagctcaaagccacaccatgtggcactcagcttgcgtaagtgcttgaattagtaatttgaaagcattagtggtttgttctgtgactttcgtgtgagacactaatgtgtgtcatgcttttgataaaacattaaa

SEQ ID NO: 75244 - DNA, 200 bp, Heterodera glycines
atgtgtggtttgctgagccaagttcttaatgattatggtgtgaacgctgaaaaagtgcaccttattgttcgtgacaacgaaagtgcaatgcaaaaagcgactcgtattgctggttttgaatcactgcattgcactgcccataattttaacttggttattttgattaatcaaaaatttcatgattatcttttcttaattta

SEQ ID NO: 75245 - DNA, 414 bp, Heterodera glycines
atgccaccacaaagcaaatatattaaatattttaaaatttctcatggaacagcgaaatgtttgagctgtagttattcttacggctcaaagtctacaacttttccgaagacgtgtctacgagaacatttgcagcgacatcatccggacaaatatgaagaattgttgaaggaagaggaaaaagcaaaagtgaaaccaaatggccaacaatcaattcaaagtcttttgttggcaagtacaagtactggtcgcttgtgcttgagcccaacacctgccaaaatgccaagaaatgagtcgccgttctcttcttcacagccaaaaatcgtcaaaagcttttgtaattatttggatattttaaaatttcaaagtcgattaagcacaatggagttcggatggagaaatgacaaaaagggttga

SEQ ID NO: 75246 - DNA, 1048 bp, Heterodera glycines
atgttaaaagtgattgctggaagatgtatgatagcatttgattgctaactgaaataaattttaagtgctttcagaaaaattaaaatttaacaaaaataaataaatttttattcttctttacatcttaattgatcaataaaaagtttatcgacacctaaaattatttatttaaaaacacattatttatttaagatttcatgtgttattataaataaataatgttaaagcaaatattaacaaagagataatccaaaagcaaaaaaatgaaataagagaatgctcctattgtacaatatattaatgtttctattgttaagatgataattgaaaataatacatagatcctttatataaggatttttatttatttttatagattttgttttggtaaagggaacataaaaacaaaaggactgggtagatttccgaacgggattcccgccttttttcgtttccctaaaatcacataaattttaacgagaatccagccggtaaacattaaaattgtacgaaagtttttttagtttgatttcaagcagatattataatattagacatctttaatttttcaatataatatctggtaaaaaattaattatttttatacttatttacaagcttgctcatatgcttcggccactttcgtagacagaaattatctaatattttaattttggcttttcttttttaattattatataaactgaatcattaacattttgttaaattaatttttgtatttctttttatatctttacagtttttattatggatatttttcgatttttttttatatttatttattttataatacatatgccatttattagagctatttcgaaagttcatttgacagatttgattttaatggatgttattataattaaacttttaagtataaatatttttgtttttttttgtatgtaattttaaatgaaatcactagtaaatatttctcacatcataatagtgtaataataggagttaattatttaattctttaatcaaaagttttttatatttttaatttggagttaataagatataa

SEQ ID NO: 75247 - DNA, 2997 bp, Heterodera glycines
atggctcgtgtggaggacgagttcgacgtggtcattgtgggcggtggccccgctggactgtccgccgccattcgcctcaaacaattggcggcggagaaggcaaaaggtgagtgaaaaggccaatttcaaatgtaattcgagtctatgtctcaaagaattgcgcgtttgcttggttgaaaaagcacccgaaatcggtgcccatacgctctccggtgccatcattgagaccggcggattggaccgtctttttcccaattggcgagaactcgactcgcccatcaaacagccggtgaaggtcggtttatcaagtgattaaaaattaaatttaaaaaaacagtcaattcgcagaaagacgcattcgcaattctcaccaaaaatggacgaattccggtcccattggtatttgttttgctgcatttaatttcattttgtaaaatgttacactaatttgtataaatgaaaggtccccggcgtcccgctgaacaaccatggcaattacattgtccgccttggtcatttggtgcggtggttgggcgaacgtgcggaggagcacggggtcgagctgtactcgggcattgctgcgcaggaagtgctttttgacgaggctgggaaaacggtgtgcggagttgcgacgggcgatgttggaattcacaaggacggaagcccaaaggttggtaagggaatcatcaaagtttaaaaagaaagtacaaacataaaacaaaacaggagagctttgaacgcggcatggaactcaaagcaaagtgacttttgttcatttactttattatttctaatgaaattccaccgaaagggaaggaagtggatgcattttttagatttcgaaaaaattagaactccgtaatcatcataaaaattttgaaaagcgcaaaaataatttttttttttttttttgggaggaacgaactgctccggaagaaagtattccattttctctccataaacataacttcgctttcaatactttcccattctcgacagatgcacaatttttgctgagggctgtcgtggccatctgacaaagtcagtcattgaaaaattcggcctcagtgagggcagagacccgatgacttttggaattgggctgaaagagctgtgggaaattgacccgtcaaagcatcggccgggctttgccgagcacaccgttggatggccattggtgggcaaacggagggcaaaaaatgagtgaataatcaaaagtgcccaattagccgagggatcagtacggcggatcattcctttaccatttggaggacaacggacagccgctggtctccgtcggatttattgtgcgtttaaaggcttacaattaaacgaatcccttccttttcttcaggttgctctcgactacaaaaaccctttccttaatcctttcaaggcattttcataattaattacaatttaaaaattttctcccattagaccttccaaatgttcaaaacgcatccgtccattcgaaaacaattggaggacgggcggaggatagggtacggggcccgggcactcaatgagggcggcttccaatcggtgccgaaagtggtcttccccgggggctgtctggtgggctgcagcgcgtctcttttggttttaattctttttttgtaattttatttgctttacttggttagaatgttgccaaaatcaaaggcacacacaacgcaatgctcagcggatgcattgcggctgaaagcattttcgaacaattgcaaacggagggcgaaaaagcgcaaagtgcataataaagccgaaatttttttaataatctataattttatttcagcaattactccgcttaattatgccaccgctttggatgactccccggtgatgaaagagttgcagatgtgccgcaatgttcggccgtcgttcaattcgcgcctcggcttttggggtggcatggcgtacactggcactttcttcgtcatgggtttgtgtataaacatttcattgttataatttggtttttcagggcgtggcattgagccatggacaatgcaccatggacacccggacaatgagaagacggagctgaaggagaagcactcagaaatcgaatatccgaagccggacggggcattgacattcgatttgctttcatcggtccatttgaccggtaaaatccatgacttttcaatacggtggttccttccattcttcgttctttccaggcaccaaccatgaagaggatcagcccgcccatttgacgttgaaagatgactccattccggagacggtcaatttggcactgtacgccggcccagagagtcgttactgtccagcggcagtgtacgaattcgtgccgaaggaggagggctcggcagtgagtgcgcagcaacggttgcaaatcaacgcacaggtggcaaaagcaaattggcaatgctaaacagctgacaaatgggtgccatccctctcttaagaattgcatccattgcaaaacgtgtgacatcaaagacccgctgcaaaacatcaattgggtggccccggagggcggcggagggccaaagtacgacggaatgtgaacagattgggcaaaagaagaaactggtggagggatttgatggaaagaggagattgtttgtgtgccacaaccaaccagcagattctgtgcattagtttttgtcctttcatgtaaatcctcaaaccaatcgtgatgttcttaaactttctccagggctgagccaaattcgaaaaataagcagaaaaaatttgcacagccctgccaccttctgtgtttcttccaatcctttcatggtatattagactaagtgtcatcattagggcttccatttttaggcacaaaaaatcgcactaggcattaaataggcacaaaaataggcaaatacaattttttattaacgctttttaggtaacaaagcacgttaaaactttaaatatttcaattgtaaatgaaattattaaatgttttaaagttttttcgaatatgaacaaatttttaaaccaaaagatttttattaagaa

SEQ ID NO: 75248 - DNA, 1123 bp, Heterodera glycines
atgaaaaatgcaatggatgacgacgataaaacaaaagtcacacactttcaaaatgtgaaaaaggaatttctcattttttgttatcaaaaatttgtaagtttggaatttcaaattttgaaattaaaaaaatttcaaataaaaatttgtgattttgaaactctcggcaaaatccaactatttttttttttgagggagtgaaaggaatttcacattttgttgtcaaagatttaaaattttggaattttttaaataaatttttaaatgaattagaaatttgaaaattttttgatggaaaaaaatattttttttttaattttgtgtcaaaagaaattttcagtacaaacatttcttgacaaaaaaaattaaattaattttctttcaattcatatttgacaccacaaaattggttaaattttattagtgttgttgtcaaatggaaaaagtcacaaaacataaaaagaaaaagaaaaaataataataataattgaaaataaaattaaataaataatagtgcaaaagcataaaaaacggaggaaaaacgaatcaaaagcagaggaaaagcatgtgaaatggagccaaaaattggaaatgtttcgaatttaaatcaaaaattattattttttgagcatttttatgacagaaatagtgacctaagaaaattggcgattatagctgatcggaactgaaataattgcattgatcaaattttttcagctttaaccggccaaatcaatcaaaagcagatggatttgatcgttctggtctgaccaatttagaaaagctaaatcatgatgacctgctgatctgatcagtttgcatggccgtttttttaccgagcccttaccaccaaaaattgaaacaattaactctcagataatgtgtaatctgatcaggttcacctactggatttttgatcagcgtgtcaaaatgctaagagcaaaaactctgatcagagatcattaagccacgcacaccaaaatgatcggtcgatcaccgatgacacaaaattttaaaaatgaattttttcttaaattttcggctccatttcaaaaatgccattccgatcaaacagcagagaaaacctactggtggcgtgccgtgtgtatgtattgttcataataaa

SEQ ID NO: 75249 - DNA, 2450 bp, Heterodera glycines
atggccaccaaacggacggcgttggcaactgcagccaaaacgacggtgcaagaccaaaatttggtgggcatttttgtaaaaatttattgtatttttaaattatttttattgaaaattacttttattgaaaattacttttattgtttttttttgagtaatttgctggtaatttctctgagttagaacaatatgatcaaatctgaacaaaatgtaatcatttccaaatagatttgattaggttaggtttaaaaagataaaggattgattaaatctatcaatgcgtcatgacgccatgcaataatttgatcaaacctaaaagaacagaacagacattgaattgatttgtgagtcattctttgatcaaaagagcagattagatcatcaaaacagcatgggtttatattattccgggcacaatttgatcaaatctaaaggacagaacggacaattttgaatatgatgagatttgaacaaattgggctgatcaagtgatgaaaatcgtcatgggtttatgtgatcggaatgtcctggcacaatttgatcaaatctcaaggacagaacagacaatttgaataagattagagggtctgtgattcactctgtttaatcatttgaacagctagctcaaatcagcaggagatggatgtccttatctatttttttgaatcaaggacaaaaaaaaaaccattgtccgaaatgaaggacatcatttttggaattattgaattatgaagaaaataaaaatacataaaaatattttaataattatttgaatttatttaatccagaaacaactcgtctacagaaagtgccttcaagcactgatctatccgatcagtgccacaacaccgcacaatttttgcacaacaaattttcaggtaagaatggcgccgagtggggtccaacttttggcatatatatatttttttttctaattttggcatatttttttttctaattttggcattaaatatttttatttttggcaattttttcagactcccacctggtgctatgagtgtgaaggccttttgtggggcttggccagacaaggtgggcaataaattttttcaatttgtacaataaaatcacactaccaaatgcctcggcaaaatttgttttcgttttggcattagattttttaatttttgtaaatttgtataaaaactacaaaatttcctcgagaaaagtgaggggagctaatgaatttttaagaaaacaaatcagatagaaaaatctatataccgtttttctagttagaattttctcggtttttgatttggttttggcattgcgttttttaatttttttttttgtttcgagctcatttctcgattctctttcagtaaaaatcatttctcacatatatttttttaaataaatgatttttttattttacattttgaggtaattaaatttaaaaaattcaaaaaatgtaagccatgcatagataatttttaatttaattgaatttatttaaaataagatattttttaccattttttgccaggccttcgctgttctgagtgcggcgtaaaagtgcatgaaaagtgccgagaattgctcagtgccgactgtctacaaagtgaaatatttttttaaagaactgatcggataacattaaaattttcaaggggctgccgagaaaagcaataagcatggggaaggtgatcgggcacagaatctgatcgcagtgatccgcgatcggatgaaggcccaggagcgcaacaagccggaagtgttccgccgcattgcggacgcgttcaccatggatgacagaacgcagcaggaggtggggccaaacgggggagggtcaaatagagtactggaaaagtactggaaaataaaaatttccgaaaattagacagttggaacttggaaaatcctgctaaataagccaatgttagcctggaaaatgttttcaaaaaaaaaaccaaaaaattgaaggaaattttgaagaaacatgcaccatttttttggctgaactaaatccagcaggaaagaatgccaattggcaatatatgtgtataataaatagggagcagcaggtcttgaaaaaaaaaactttgaaaatattattaatttaatttatttatttcataaataatttttaaaatattttttatttttcaggctcttcgtgtcgtcaaaaactcaattttggagggcagttcaaaatggagtgccaaaattcagctgacaggtggcatatttatgtgttaaatttggagggctgctcgtaatttcctttctcgattctcgagtcatgaaattccttgggtttttcattgtcttggcggtggcggcttcaaccggcttcaactggaaaccggcacggtacgggatcccgcgcgagattttgcgggatcccagtccgcaatccagcattttttttttttgaatttgcgggattaatcccgcggggtctcgtctcgcaaaaagcaatttga

SEQ ID NO: 75250 - DNA, 1326 bp, Heterodera glycines
atgtcttcaggacttctgtacgtttattatttctttttttttgacagttcgcatttaaagtttagcttaattagcctcaaaaattcccaaaaaagctaaaatttccctttggattccctcgctttgacctcctttcattggcttttcctttcccttcatttcccaatttatttttcagttggcgtgctgtgcttcttctgttggtcgattgtgcctccattcttttttggttctttttggacaatgtcaaaaagcgacgacgccctcacaaagaaatgtaaaaaaaataaacaaaaaatttagaaatcgaaaaagttcttcatttttttcagctttatctgcgccgattgttggcttttggtgttcgatttccttgcgccttctcaacttggcctcgaaattgcactgatcagccgtcgatttgacctccgagtggacgaacatttcaagacacgcaaatggacgttgaacaaacaattgctaatccaatgggacattgaagaaaatggcacgaagaaaatgcaaattgtcaaatctgatggaaatccattgccaatcccgcaaaaaccgttgccgaacaaagtgctcggattaagaggcattacgatcgcgtaaaattaaatgaaattggaatttgattcgtgtgatcatccacattttcagctacattgaccacaatgtcgtcacatttctccgtcgtttacagcgtcttttcgccgtttgttcaatatacttggacaataccacgggcaatgatcacattttggactttgttttgctccaaatttggccaatgttccgcgattccatgcatctgatgcttttggacaccatcacttttcgccgtttccgtcaattggccccgtcaatgctcagcaattgtctgtctcttcgctatgtcgctttcaatgacgacattgtgctcgcttttccgcccgatgacagtgccatggcgtcggatggccaagtagttgccaaatggttgttcacgtctcgtccggacggtgtgccgaagtggctcacttgccatattaattcttcactgatggaccaatggtcttcagctattgaacaactcaaaacggtggattattccccactttttaatggggtttttaatgatttttgttccatttttaggcattttccaatgcttcttcaccagtgacgttccgcatttattggaggctttcatccactttaattgactttgttatgccatttgatctgatcaacgaagtgactggggagcaattggtccttgatcaagatagcacaaacgatttttggctcacgcgttgtccaattgaatgggatgagaataaa

SEQ ID NO: 75251 - DNA, 972 bp, Heterodera glycines
aatggaagatgagcatttattcgacagctattcatttgtcggattgtcagaattaggtaaaacaaaacgtgtggtggtaaataaatgtctctgtttcagacgacgaattggagaaatgtgcggatgacccggatgagcaagtgcgtcttatcgagagtcgaatgcgcgaactgagtgaaatttttcacaaatacaaaggaaaattggcggatttggagaaagagcataagaaacgatcacggcaagagaagtaagaaaagcatttgcattagaaataaatataacgaaaaattaaggaaacggaaaatgatgacggataaataattgaataacgacgagaaatcattttcttttcaattttattcacatgaaaattaatacactttgactttgcaatttatttgtccatcactctttttaaaaataattaaataaaaaatgatttccttattgtcattaaattgttcattatatgctctataataaacgcatttggattgtttttatgattctccccgtattattgtcatttatatttgagtggatgccatttgaataagagccattggatgatgaggttgaggagattagagaactggttagataaaatggaaaaatattgcttaaaattcattgaatttacagatttacgagattctgaaggagtttccgacaggaataacttccacttttcttgagcaaaagtacatggaaaggttaataattgcatttgagatgctcagaattgaagcgagtttattgttcagatacgtgacaaaaaggctggccaaaccattaccaagaaattggctttcgttaatgcggtcaactgaagaattcgagctgaaggacgtgtccactttcaccatgctggtgggtcagacaaatcaaatgtcatccgttgaagaggattttcgcggcactttcgatccttcgggccgttttccatccaaatcaattctcgagcattga

SEQ ID NO: 75252 - DNA, 944 bp, Heterodera glycines
atggagtatgaatcgaacgaattgccgcctatatatttacctgttggtactgaggttagcgccaaattcaaaggcgctttttgtgaggcgcgaatcactaaactcgtaaaatcagtgaaaatcaaggttagtctcttttttatccattaactcttatttatttatttttaggttcagctcaagaactctaatattattgcagttgacgagtccgcaatccaaaatgggcgaatggagattaaccaaaatgtcgaagtcatttacatgaaacaaatacataaagggcaaataatctgtataaaggtgactctttcacataaaacctctactaatcataacaatgaattgaattaaaattaggactgttcttcttacaccgttatcttcaatgatggcgatgaacgtattttaaagcggactcaactttgtcaaaaaggcgcaaagcattttaaggatgcagaaacacttgacaaattgccggtatgactattaaaataatttgtgtgtgacgacagcttttagctgtatcacccggacaaaaggtcgaaaaagaagaaggaagaagctgaaaagaattcctcaacgtttaatagtccaagctctcaacgttcgcctcgctatttccgcagctcttctgttacgccgctgaaaggaattgcttctacgcgttcggccaccagagcaattgcacatcttcaatttgaagtgaagaattaaaaaattaaagagttggagccaaaagcttactaaaaattttacaccgtaaactaaaattcaacctatcaattgcataacctttgtttttctgtaaatttttaggaatttgattgtgaacgtagtgcatcagcagctgcagattgttcttctagtggaattatgttaaatttaccaacaaaatcaaattcattgagccctcctcggggtgcaatttcaggtaaaataaa

SEQ ID NO: 75253 - DNA, 3311 bp, Heterodera glycines
atgcgctctcaacttttggctctccttcacggcgcttcgcttcccctgaacacagtttcccacgcgttcgcttacggttcgggtgcaatccctcaacgagaagaggacccaaatacgaaaatggtaacaaaatgcacatttaaaatgatgccattttcgattggtacaggtggattttctcattgtgtgcaacgattcattgctttttcaccagcaaaatttgcttcagtatgtgagcattgcgttgttgggattgtcctcacttcacccaattcaatttgcaaagaaacccaagccattactctcttcccttccgatggttcgatgcgaattgggtaaaccaaatgcagcgactctccggtgcacggctttactacaacacacgaatatctacccaaggtgaagtttattcgtatccatttccaaatctaagtacctttattacgaccttttaattcaaattgtttcaggacgtttaatcaaatatggtattatccaagaggacgacttggagacggacttgctcgactggacatggctgtacgcggccggtcgactgcaaaaacccgtgttggaggtgtacaatgggaggggtgaaacttccgatgttcaaagaacgggacgaaacattggtagggcgctctttgacaattaccgagcggctgctcacgccgcactgctccaactcgacgggtggtttacgatggatgtgagttagttgcatttctctcccaatttattgtctttacttttgtccctatttcagcaatttctcaacaaagttgtgtcaatttcatatggtggagacgtgagacggtatttcggagcggaagacccgcagaaggaggaaaaattggtggccggcgcgagcagacaattgagggcgttgtacaaaccaatcctcgaggcgttcgtattcccgtgattttggataagaaaatgttttattatttttatagtgatcgcgaagtgcacctacacgcggatgacaaaattgaacaggactggtaaataataatggggacaattgggcgattaattaggggacacactgagaagggttgacctaattaaggggggtgcaccccaaattttggcgcgccgaaatttcgccggacggaatttcgccggccgaaatttcgccgggacataatttcgccaaaatttttttttaaaaaatttggaaattttcaagaaaaaattcttagaatttttttatatggaaattccaatgaaaaatttttgaaaaaattttttagtgattttttggaaaatttttcgaaaaaacttattaatttatcataaatttcaaaaaaaatcccgaaaattttttctaatttttttttgaaattttcttataagaaattctatgattttttcttaaaaaatttcaaagtctaattttttgattttatttttttgcggcgaaattttgtcccggcgaaatttcggccggcgaaattacggcggcgaaattccgtccggcgaaatttcggcggcgtaatttcggcggcgaaattttgtcccgtccccattaagggaggataagaatggagggaattgggcagtcattggcatttttcatcaaccaaaatgttttttgaagctcaactccaattgtgttcttccgactgacacaaatgccacgggcggtcctcgaaagaataagcaaaacttactaccctcagaggaaagcggccgacacggaggttcggtgcaccccaaaacgtcgtcggccgaaacgtcgtcggaagactttttgaaccataactttgttcactgtcaatcaaattaagaattgttggtgttgttcgatagctctatgtgtttattattaatttgcaaaatctcaaaaattttcgttaagtttcaaaaaagttatgaccagaaggaactcaaaaacccagtaattcgaactttttttgctctgatttttttgtgcataaataaaaatttttgaaaatttgcaggctaatagcattttttgaatgctttcgaataataccaagaatggttaatttggttgagaaagaaaaaagttatggtcgaaaaattcgttcgacgacgtttcggctgacgacgttttgtcctactccgacggaggttattgcgtaatctgacgtacaatatttttctcctccagggacgggcctaggattcggcttggggtccccccccgggcgacgatctttaaatgacaaattttgcatatttttagcagactttcatcaaaattaataatgtttacggaaaaaagcgaatgacgaggtaggtcttggagatgtaacaacaaatcggtgtcgaattgaaataatattttgattttttggttataaactttttctggttatgggctaggtaccaagaagcactaccaaatagtaactttcatccatctgagttatcgaaattaacttgctaaaattttttgtacacaacagatagttttgttcctgtagtgtcccagttttccggaagtctcgaatttcctaccccctccacaaaaagactggtcctgctaattaaccccgtcctcccaacttaaggaattgctctaccccatcgcacatcgtcatgatctcaaccagcgtttctcgggtgttcttcaaagcatcgtttacgaagccagtttgcgccaaagtgccaaaaattttttgaccgcggggataacaaagtcgctacaatacgttgggcctaaactcaggaaaggattattgagaagattctgaacagccatttgcagatttgttttttgtttgtttttgcaaaaattatgccgcaaaataaaaaattatccgtgtctttcatttgcgattcccttttttaagttccgattcggttgtgattgaacgcctgggaaaagtgtcttccgcttggccatttactttttctgttggtgaatttgccaatttacttttggttcgctgtgatcaaatgcgaaattgtttcaccctttctgtccgaatcgaacggcgacgacagcagcagcaacggatggtcagccaaacattcggcgactgtcgtcggtcgctttcgttggcattttcgcagcatcggccctcagcaacagaacaattgctgcatgggcattcattctgctgatcagcgccgcagcagcaacattttttaggggaaggacaattaaagccggcggaacttttgtcgcagtcgcaacgactggcggcggtgctttgtgatttttgtgggcattgcccgcagggcattgggccgactgtcgctgttttcgttctcgtgccaatttcaaaagagtcgatcactgctaattttggaactgtcgtcgagaagacatt

SEQ ID NO: 75254 - DNA, 386 bp, Heterodera glycines
tcggagtaggacaaaacgtcgtcagccgaaacgtcgtcgaacgaatttttcgaccataacttttttctttctcaaccaaattaaccattcttggtattattcgaaagcattcaaaaaatgctattagcctgcaaattttcaaaaatttttatttatgcacaaaaaaatcagagcaaaaaaagttcgaattactgggtttttgagttccttctggtcataacttttttgaaacttaacgaaaatttttgagattttgcaaattaataataaacacatagagctatcgaacaacaccaacaattcttaatttgattgacagtgaacaaagttatggttcaaaaagtcttccgacgacgtttcggccgacgacgttttggggtgcaccg

SEQ ID NO: 75255 - DNA, 490 bp, Heterodera glycines
atgtgcctgtttagggagagccatgtgcgtgaccatttgcgcaaggtttacggcactttggcactgacaatgctttccgcaatccttggcattgtggtcaacgcggtgatggacttctcgtcgttgctgcccgtcttctcgctgatggaactcggcttcttgatcggtattccatttttcggttctactgtttacgtttctaaccaagttttacgcgtcgaataaatgactatccgcggttttttaggccatacattttttcttggttcgtaaatgccttagttcatggtatcaaattgaaagcttaaagtctagaagtttatgggattttctttagaaaaaaaggcatgccctaagaaactgagtatgggcatttattggacaagtaagttgtgccttggtaaacttactaagatgtcaaactattatttaagttggaggtatttccgagctaaaaatgtgtttttcatgcatttctcgtcgaaataaa

SEQ ID NO: 75256 - DNA, 341 bp, Heterodera glycines
atgcccacggtccgaattagttcgccaataggttttaaatcgactttttaatcatgaaaacctgagcccttcataaaaacgtttcaattattagtaaaatgatttaagtatatcgtggacaaaaaacattgaaagaatatgaaaaaacaataactttgggctacgaaaaaatgattggggtgtggttctctttgacaaaacgaatcttagcggaatatgtaacctgttatggcgacaaaatgggtgaagaaatattttttgaaatgactcttataaaaaaggcgtttgtttggcagagaaacattttgtgtgtaatatgtacaatcaccgtgtgatgaaaa

SEQ ID NO: 75257 - DNA, 804 bp, Heterodera glycines
atgctcttcgtccgtccaacttttctcctccttttgctcttcttctgttccaccaatttctttccgattatttcggcttctgccgaccaaaatgtcgaaaattcggaggccgaacaaagtgaaaatattcttctccaaaggccgttgaacatcatagaagtgagaacaaagcagatcaaaaattgcacaaaatttcaatgttttaaaaaagtgaagttggctgacacggacggcgacggacggatcagtttggacggggaattgaagcagttcctggagtcgacaaagttcgaacgaatgttcaaggcgctgttcgaccaccagtctcggggcgaattgcgcctggagggcttcagaaagacactgacgaagcattttgagggacgaaagtacgcgccgaagttgccaactttggtgaacgaagttaacgtgaacaaaaacggtggcatcgactggcacgagttcaagctgttcatgtacgagctgggaaaacaggtggctgataaagggaggaaatttgatcattttgaaaagggttttcgaaaacaataaaactgaaacgcatttagttggtggatgccgaccatgatgggttcatcaccctcacagaatcacaagccttctattcctgggagtacacactggtggaaatgaatgaatctcaccaaaaggtttcataaaaagcatcgaatatttgttttaatttttattgtaatttaattattattttagtggttttccaccaacatattaccccaattttattattcattcgcttttcatttgtaaagtttattcaaaaga

SEQ ID NO: 75258 - DNA, 154 bp, Heterodera glycines
atgattgcacgtattgccgaaaaaattcgagaccaatttccgaatgttgaccgactaattgcaaaacgaaagccgtctttgtcaaagcgccttaccgagtcaaaaaatttggaaatgtatctcatatgcaatttcaaccaacaaatttgaagaa

SEQ ID NO: 75259 - DNA, 392 bp, Heterodera glycines
atggccataaaatatggaccaaaaatcgcaaaatatggacataaaatggcaaaaatctcaaaatatggaaataaatggcaaaaatgtcaaaatatggacataaatttttcaaaattgagtgcaaaatttcttcaaatttgttggttgaaattgcatatgagatacatttccaaattttttgactcggtaaggcgctttgacaaagacggctttcgttttgcaattagtcggtcaacattcggaaattggtctcgaattttttcggcaatacgtgcaatcattttaaaagaaaaaaaacataaaagccaaaatttattaattttttttagcgcaaaatcaacaacaaaagcgaaattttcgcttttttgcttatttttgacataatttattaa

SEQ ID NO: 75260 - DNA, 236 bp, Heterodera glycines
atgaaggtggacgagctgttcattattgtaatgcgcagcctggtgcgtgagtgtttggattggggaccgaagggcgaagccgttcccttgatgtgtttactcacttttttcaaagggaactctaagaattctgatatgccttcaaatctatcaaaagagttgcatactttctttttatcatttctctttattctctattttacacttgtatttttcatttgaatgtttattcagaa

SEQ ID NO: 75261 - DNA, 623 bp, Heterodera glycines
aagttgatcaatttcatcctgaattgactgttttttctgttcatcagttaaaaattgttgttgctctcttaattcgcgaatttttttgtaatcgtcttgaagcccttcatattttttatgaatatgttcccagtaatctgttggatgactatcaaaaaatggctcaacgtaatccttattttgttcatagctcgtcctctcatattcttcagctgatatttgtaaatcttttttcaatacagccttgttaaaagcattcaaattttttcttctgtgtttcattgctgttctcattcttaatgcttcctcattcagagcctgaattgttctaccatctgttactccttggtattttttcatatggtcttgaatgttgaataaatctcttattaattctaatcgaacttcatttaatttctccctataattaacagaatacatttcgaggaattcttgaccagttctctcctccttttcctccttcccgtcatctctttgccttgctgcttcttcaagcgcctctattcttgctttcttagtcaatgattgattttggagagggtcaatttcctcatcctctatttttctcttcctatgcgtgtccgtctcatcatcacgttctc

SEQ ID NO: 75262 - DNA, 3825 bp, Heterodera glycines
  unsure (1)..(3825): unsure at all n locations
atgggtgtacatgtgcacaaaggacctcctagggatgaattgctgagctctctaaagaagcctctcttattaattctagatgaccttttaacaataattgatgagaaaagcctatctgaattattcattaaaaaagctcatcatcttaatatgggagtgattttcataacccaaaatttatttgaaaaaaaggtgaaggtagcccgaattaattcacaatatattgttttaatgtctgctccgaatgctgcacttcaaatacgtaatttgggcgttcaactgtttccaaaaaatcttgcatttttcctaagtgcttataaagatgccactttatcaccgtatggatatttatttttggatttacacccagcatcaaatccattgctgagaatacggacaaaaatatttaaagaagatgaagaaaaagcattgtatattcaaaatgattagtttacctaaaaatgttattcaaaacttggattttttaaagaaattgacaaaaacaaaagcttttaaaaagagacaacaaatatttaaagaggctactagtgaacaaattgcattattaattgaaattagttataatatattanaggggtacttcccgctcacgaagagacaaaaatatagacttttaccatacgcaaattttgtaagaaaattagcaagagttagaactgagaagggtgcaaagaaagtttttcaacaaaacggtggtgattttttcgttaatttggctccattattattgccagtattaattgccgcgctaaaatatggagaataaattattcttgttccttccgacttgtacaaaaatttattaaaacctgagtctggcgagattaacgttgaaaatgctaaaaataaattgtcatcacttttgaagcagagaaaattagacgctacttcaaaaaatttactttataaccaggaattgaggcgtttcttgaaacttaggaaggaagttgaagataaaccggtaaaagttgagctttcagatggatctttgatggtgtttaaaccaaagcagcgtgaaagagatagcaaaattcctactcaaattgttaatgacgaaggattggatgaaacaggctctattccaacacttgaagacccttacactactgctgaagagagtgatgctgagccaacaacatcaacaccaaagacgagaccattgataagaccaatgcgtgtaggaacaactaaatttcgtcaaaagcaaaagtcttttgtagtcaagaaacaacaaaaaattatgtcaattataaataatgaccctgagaaatttggggttggttctagaggacatatactgagagctgatggaacggcatatttaaaaagtaatgttaatcaagcattagagcgaatattgagacggtcacccgagaatgctccatcacccataggtacaaaagctttagagcaacgactgagaaacgacccgaggactagtggaatattaaaacaaaaatttaatgaacaatcgggatcgggcgttaaaagtaaacaacgaaaatttataattaaaaaatggaaaagttactgaacaaattgtataatgaccctaattcacctgcgtgttatgctggacaggaaagactttacgaagaggcaataaaacatgactcttcgatcacaagaaaagatgttgaacactttctcgagggagacagaacatatactttacataaacctaggcgtgttcgatttaagaggtcacgaacagtgccctctggattcatgactgatgttcaggttgacttggcagatttccaaaaattatcacgaaaaaataaaggattcaattatatattgttgggtattgatgtgttgagtaagcgggtctttgctgcacccgtaaagtcgaagaatttcaaacacatgagagaagcgtttgacaaattgataagtcaaatgcctatggttcctcatagaatattttcagatagaggaacagaatttgaaaatagagaaatacataaatatttccaagagaagaacatacaaaagcacaaggctcatactagtacggttaaggctgcgctagccgaacggtgcataagaacgcttaaacaacgactatatcgttattttagtcaaaaacatacaatcaaatgggttgacgttttgccaaaaattgtaaatgctttgaataactcaaaatcacgtattacaggtatgaaaccagttgatattaacccgggtaatgctcaaaaaatttggaaaagagtctatggagatgaattttcacgaaaagcatatagaaagccaaggttcaaggagggtgaccatgttagacttgcaaagtataagtccagttttgaaaagtcataccttcccaattactcggatgaaattttccaagtttacgatattaaaaaggctaaacctcatcggtatggaataaaggacgacaaagaagagccctttgatacacgtttttatgctgaagacttggccaaaaccagaaaggacgcggagacgacatatcgaattgagagagtgttgaagactaggacaaggagtggacagaaggaacatttggtaaaattttacgggtacaaagaaccggagtggattaaagacaatgctattgagagatgaatgtatttaagtatttattatttatgcttttaataaaaaataaaatgtcaaatttgttttacgttcttttacctagtgactctcctggttatgacaataagcctaataaatttagggttcatttgcctaggaccctaacttttggaggtcattggttgtgtgggttgcacagtataatttatacaaattcttggcccgccattggtaccacagagaaccaatggattaaggtgcatttaaaaaatggtgataaaataaaaattgatattcccgctgggtcataccaaaatgagcaagaattggaaaatgctataaatgagtcgataaaaaatggtataaaacaaccggctacaagagttaaaagacaattggaagatggagtggatttgttttttcattataatccagatgattactgggaaaaaattgaggaagaaaggcaaagatataaagaattgttaaaattgatagatacaaagtcaagagaacgtgatgatgagacggacacgcataggaagagaaaaatagaggatgaggaaattgaccctctccaaaatcaatcattgactaagaaagcaagaatagaggcgcttgaagaagcagcaaggcaaagagatgacgggaaggaggaaaaggaggagagaactggtcaagaattcctcgaaatgtattctgttaattatagggagaaattaaatgaagttcgattagaattaataagagatttattcaacattcaagaccatatgaaaaaataccaaggagtaacagatggtagaacaattcaggctctgaatgaggaagcattaagaatgagaacagcaatgaaacacagaagaaaaaatttgaatgcttttaacaaggctgtattgaaaaaagatttacaaatatcagctgaagaatatgagaggacgagctatgaacaaaataaggattacgttgagccattttttgatagtcatccaacagattactgggaacatattcataaaaaatatgaagggcttcaagacgattacaaaaaaattcgcgaattaagagagcaacaacaatttttaactgatgaacagaaaaaacagtcaattcaggatgaaattgatcaacttcgtcgtcttgtcgattataggaaaaaaagatttgcagcgttagagtatgaagctaaaaagagggacgcactccaacaacaaccaatggctttagccttgactcatg

SEQ ID NO: 75263 - DNA, 1233 bp, Heterodera glycines
atgatcagaatttctcggagggtttgtcgtgccaaaatcggccaagaaagtgaataaaatttgtgcacaaaacagacaaattatttccatttttgggcttgaaattcaaattttaagctgatgtaagacggcatcgggattaaaccacattaattttaattaaaaatttgccaattttttgatttatagcatttttttttggtcgaaataatttttaatggattgataaagctttatttttggtgaattaaaaatttggttttatctttaagccgtcatcaatttttacaatttattttccatggaatttcctaattcgatttttttttaaattaaaattttattagaaccaatcggctgcgaaattcgaccaaaaaagtgccaacaaattcactgctgccaattcaacggccaaagcgcaaaaaatcgagtgaaaaggagcgccaacgaaatttgcagatcaaacaatacatgaggacattgacaacactttgtgagcctaattaattagccttaattagttggccaatcaattaattaattccataattaattaattaagtgcccggcgtaaagtcggaaattccgcgcattcgaacgctgcgattggccaaccgatacattgtgcatttgggccgcattttgcgagaagagcaagtgggaaaaattatacttttttaattattttaatgagaattttatttcgcatttaaattaattatttaattgatttatttaattagaaattttttttaatactaattaaatgggaatgggaatttttctatgctttttttgtacattttgaaattaatttttaacatttttggggatttttatgcgaaatgaaattaattaaattttcttaaatttgtttaattaaattttaaatacatttttatatatttaattactttttatataattattaataatatttttaaagattttctgcgagcaaagccaaacgtggcgccgtttaaccattgaaggtgactttttggcaaaatttaaattttccaaaaaaaataattaaaattaaatcaattttaaaatttatttttcctattcctaaaattaccttttatgttttttcagattttgagcgcactgttagcgaagaaatgcaaacatcaaattcgtacaaagaacgtgccgagatggaaatgatcagcagcggtgccgaaatgacaacaacagcatgtgaatatgagaaaaataattaaaaataaa

SEQ ID NO: 75264 - DNA, 297 bp, Heterodera glycines
atggaaaattatgacaattttttgcttggtcaatttgtccatgacggtaaaaacaatgaattttcaatgttaaataaattttatttaatattttgctaattttagacgtcaaattttggtccgcttctcgagttccctcctcctcctcttcttcttctcagggtcattaaaaaaattaatttaatttaattaattaaatttaattttaattttgtcttttccaggcttttccgagtgccatgatcagaatttgtcggagggtttgtcgtgccaaaatcggccaagaaagtgaataaa

SEQ ID NO: 75265 - DNA, 1567 bp, Heterodera glycines
atgttggttgcccattggttggtctgtggacgagccgagcaacgggctgacgaactgatcaggcgtagacaggtgggtcagttttagccgtggtttgtgcacaggattctgatcagacacatagacagacgcacctgagactgtttgaatagccgaacaaagaaacataacggggtaaagctgatcaatcgtctaaagttagacacgcgatcaacttgaaggggtctgcctgcatggtggcataagattactgatctggtgttgattgcattgcgcacaacaatgtgctcagatagtggggtctgctctgatcagtttcatatttgatatcgttaatcaagtgtccttgtcttgtaaataagcaaaatttgagttcaggaaaagaaaagtgtgcgccgaatgttgcatggtatgatgggcgatgtgagcaaagtttacggtgagaatggacaaaaaaaaaagctcgagatctcgaggatgttatgtcattatcacactttgcttgtcataaatatgctgccctgttctgtgtgcaggtgttgatccaactgcacagcatcgccgtgaactgcccgcacttgacatccctccgggcctttcctgcgccctattgctgctcgcttcggtcaccgccgtgctggcactgctcaattggttcgtcggtctctactttgccatcaagtgagaaacatgcaacaacaacaaacaaataactataattaccgtaactttctgaaattgagccccccgggggctttgtttctcaacccccctcaaaaggggggctctaattcaggggcggctatattataggtaaaaaaaaaacaaattctttctgtgttgcagttatgatttgatgatgccgtccgtgttggatgattttgtcgaatgtgttgcctctggctgtcagctgattttattcggaacggtcggtaaaaaaaaaaaaaaattttttttcgactaataggtatatgtgttacaaagagttgtccaagagtcatgaatggcattctcactgaagtgcctgttcccctgatctttttcttcacagcaaatctaaatttaaataaaatccaagtttttttacaagaaagtttttcaagaacaaaataaattggaaatcaatagttttttagaaaatttttgaaaaaatttagtaattcatcttaaaatttgactccttctgtgttttcagctttggtggtggacccgacgagtgatcactttcaagcgatgggacccgcaccacaaggccgagtcccggggcgatttggtgctgatcggcggcagtgccgcctttatgactgtcaaactttttctccaagtaaaaaaaaaagaagctatatccaattctttcctcccccccccattttttcaggtgcttgagctgaattttcaacgcattgacggctttttgccattgtctgaggccatcttgcgcactgcctccctggtgctcatccaatccgctgaatggctccaattttgcagtctacaacgtgtgatggcactccatttcgagtacagcttcggggaccagcagcagggctgcccatcacttaattag

SEQ ID NO: 75266 - DNA, 1162 bp, Heterodera glycines
atgccatttaactttgccctcctccttccactgatcagtgtcatcctttttcaatttgtgcaccactcctcatcctcctcctcctcctcttcttcccagataccgacgacaattcccgatcaatttgagctaaatccggccaaaattgatatttttcttcgtcgtactgcactgatggctttgttgagggtaattaaagtacagtgttataaaattgttaggggccagtgagggattttttgtcgatacaaatttgacaaagtcggcttgtgggtctaatacctgaaatttttacggtgccaaaattccgcggcgaaaattttgcgccttaatttttaacgcaatttaaaaatcccaacagttcaataaagcattgatttttaaaggccaaggcaaatactctcatggacactgttccattggttgaacaagtgttgttcaagcagtgtgtggccgagtcaaaggaggcaatatgtccggtgaagttggccaaatgcttggccaaattgatacggtccagccgggaccaacaacagcttcacagacaaaacaaatgggcggaaagtgagttttatttagttgctggatgtggttaagaaaatagccaaaagcctttgtcggagcatgaccaaaaggaatcggaaaattttttaataataatttaattgccccaataattttatttattttttagtttttgaatttgctttctagtttcataaattttatttaatttaccatttcagttgttttattgaattccatcaaaaagtaaaaattatttatttacaatatatataaattttctctttttgatgtaaaattcgattcagtcacgggtcaaaattttggattttttttttgtataataaataattttttattagaaaaatttataggaaatgagtcgacaaaagcagcagaaaaagccagacaaatgttcatttctcaacattcgtcaaaggacaacaatagaaaactgaggcgaattcggcacttttttgccctgtggagacgaagggaaggacgaagaaaacggaaggaactgatggggatgaaacaacggaggcggaagagagcgatggaacgacggacgacggaatggagccggaaaatgaagcggatgggacgaatgggtgaagcagttcggacagcagcaggg

SEQ ID NO: 75267 - DNA, 589 bp, Heterodera glycines
atggtctttatgatgtgtcggaatttgtttttgtttttagccattccgtacgatgaaacgccgccgcccaaatttgtgtacacattccaaggccctggccgcggtcggtggaccttctcgtgccaattcacttctgccgacgcgttggacctgttcaggaaggggcacggaatgtaccagacaaagaaggacggatgccgctatttcttctgctcagtgaagcgatgcccgtacaaaatgatcggcattgaaaatggttggtttattgtttttttcttttttgcaatttcaatttgctaattagtatttaataatcagcaagcaaagagcgtttcgtttacccttgggaatttaaaaaaatcagaaacataaaattttcagaaattttcgtataaattttaaggaaaaaaaattttgtacattttttttttgttgaaaagcctagtaattttttttacaaaaattttctaaaattttcctcaattttttcttgattttttcatgttttaaaaaaaaattctgttgtgtgaatagtgtcgaagaggtcaaaacattgtggatgttgcttggaccattttttctcaccaaa

SEQ ID NO: 75268 - DNA, 545 bp, Heterodera glycines
atgtgccgtgacgctttctcaaagtgcccccctactgacgccctcccaccaatttcggataaaatgcagaccaaatcgtcgtcgtcatcgcccaaaaagcaacaaaattcgcccaaggccaatcgtccgcgcattgtgctcaaacttcggtggaatgccggcggttttttgcccgaccattcgccgaacgattcaacagcagcgagttcttcgtcgtgtactgctactgcagatgattgtgccaacatgaaagtgccaaaaagcgaaacgcaaccgccgctgccgctgccccaggcaaaattgttcgagttggccatgtgtgtgcaggaaatgaggcaaattgcggccggatggaacctgttgttcagggagaagcggtaagatttttgaaaaactcaagaaataatatcagaaaattcaaaaaaaaattttcaactctttttgttttttttctggaaattcagcaaattgggttttcagtaacgggtgtacttacattttcccccgccggtcccccccccccgcatcgtttccgcaccggaaaa

SEQ ID NO: 75269 - DNA, 2325 bp, Heterodera glycines
atgttttgttacaccggtgcgacgatgaagctttgttgtgaacgctttgagaacgaaaagtcgcaacccattcagtcccatttaacaacgcaagtgagcggcgaagtgaccatttcaaacagcggggaaaagcagcgaaccgaaaagagcacaaaaagcggacaaaagggcgacggacaaagggtcaaaccgcagaaggaattggcaagaaaaagcagtgcacaaatacaatcagtcggaacggtgaaaaaggagtccaaaagcaattacccagcactgactcacaaaacaacagcagacccaaatgaaacagacattcctgtaagtagtggaaagatactgtaaaatatactgtagtgctctgagcttgaggggagaggggaatttttgttcaaaacgaaaggagtgctgtatccaagtggacttatctcaagggaaagcacttggggtgaaaccgcaatagcacaccaacaattcggttgtacagcagcaggaagaatccgtttctgccttttccgttgatgtaccaccgtcacaaataccgtcgactcaacaaatggtcaaaatggagaatataatggccaaaaatgagagggcgccaggaaaagattatgcggaaggaaaagcattgaaagaaacgattgagaaagagagggaagacgcggaagagagacgaagccaaaaggcctttcagcagtacttcctcgagaagatcaacgacggatggccatatgacgacaagttttatcgaccaacgaataatgagggtgggataatgtgacatgatgatggaacaaataaacaccaatttagacattttcgttgtaaagaaaagaaatcgcccaatggccattgtccattttccgaactgatctcatgtttttttgccattttaattttttatttgctgttttatttttcaatgcaattgtacatattactttttggttttatggagacagcgcgttactttgtccgattggctttggttttcgcacgcgaaaatattattaattggttaattatgtcaaaaataaaagtgtaaaatttcgatttaggttcttttttcgttaaaaataatttagaaaaattttgactgtattttgcagttcatatccatattcgaattaattcaaaacatcgatgaaaacattgtttggcgttccgaaaacctcgactaaaaagtaaatcttaaaaaacttatattgttgccatttcttcttatttctaagaatctgattaggtccttgaaataagagccaacgcctccataatttttaatattttatttgtttttttagaagcgtccaattaaaagttatatttacgaacaacaaacaacaatggggaacaccgaaacttcattgggtatgttgtggtatacaattattgttcaacaaatgcttcttcggaatttaaggagaatttggcaaaaccgtcgtcgaactaaccacgaagagttcgaccaccggagaggaattagactgggaaaaattgcttccaattaacacggcgaaggacctttttatggcgctacaaccctccggtattcgtgatctgcgagacggacaaccaaatgtctgttagatttattaatcaaaagattttgtaatactactaatcacccctacttatttttcgaaaatatttaaaaaaagatttatttttttcataaagtggagttttttggaatttaaatttactttttattcgaatccgttcagagttcccaatgaaataaattgggtgtcagggttattaccacaattttaatttaatttttgattttcaggcactttctattttgtgttataaagccgtgaaacttttggtccgagccactcagacgaatcccccgcaaaaagagcacagaaaagtcgtacttttcattaaaaattagggactgttaaatatgagtttcttcagatgctcaattgtattcggcttctcacccgtctgatgccatttttctttgagcaaaatgagtggcgcgaattcttttggacaaatcttccccaagatgaaaaagccggtctaaacgacagccaaaaagagttacctctttcgaaactgctcctcacggctctctccgaccttttgttttgtccaaattttaccattggtattttggacaaaaacattgtaagtgtcctcaagttgcaagtttcgttctcttcgccgattttgcattgtttagcacttggaaaacatctccaaagtcgacagttgtgagaacatttggcagtccggcgtcggatttgcaaataaaacaccgcaaagtgctgtttacgatgcgaacagaacggaaattctgaaattgctgct

SEQ ID NO: 75270 - DNA, 172 bp, Heterodera glycines
aaaatggaaaatgctcgacggatgggaaaatgaacacgaagcaatgcaaggtggggacagaagggtgggaaagggcacatttattggccaaattttatgtaaaaaaagaattttaggaattttcatggcaagaggaccgggtaaaattgccaataataatcagttggaattg

SEQ ID NO: 75271 - DNA, 1895 bp, Heterodera glycines
atgtctgtttcatttgggtctgctgttgttttgtgagtcagtgctgggtaattgcttttggactcctttttcaccgttccgactgattgtatttgtgcactgctttttcttgccaattccttctgcggtttgaccctttgtccgtcgcccttttgtccgctttttgtgctcttttcggttcgctgcttttccccgctgtttgaaatggtcacttcgccgctcacttgcgttgttaaatgggactgaatgggttgcgacttttcgttctcaaagcgttcacaacaaagcttcatcgtcgcaccggtgtaacaaaacattttcggcttaattggacaaattagccatttaaattaactcaaattaaacatttctttgtgcgggttgattggcttgccttacttcaaaacattcccttttggtgcccaattggccacaacccatcgccgtcccctcggagttcaacacactgaaagaaccctccgggcactcctcctcaatcatttggccttcttcactttccgtttctcgctttccgtcttcgtcgtcaattaattgttttatcatattatcaccgtcatcttcttcatcatccgatagacttggacagcactgataattaaagccggaaaagaaacacgcgtggccaaagccacaaatcgcagaagatgaacggcgtcctgcgcaagagaaggcaattcgacaaatgaattaccagatgaaattagttagtctgctatttgattcattaatttgcgagtctaaagagtcgccagcagggcattccccgccgaaagaattaatgaataaattaatgacccaattgacccggcaaacactgcaacggtttcccggtccgttcgtccatttttggctctcctccatttggacaattaaattggcctccgaattctgtgtaattaatgagtttttaatctgtttgcatgttcttttgtgattctcacccgccgaagaaattgtgaaagaaatgaaaggcaaaagaaaggcgaagaaaatgcaaagggataaaagggaaaaacgcatcgaaaaaagggacggggaaaggcaattagggataatttatcagcaattaaaatgtagcggctttttgaattcctcgcaatcatcagaaagcaacatacgaaagttgcttaaatatgctttcaatcagttaagttttgttccaaagaaatgtccgatcccttttaattgaagcgacggaagggcgggcttttgctgggatttgaccgcccaaaaagagaaacaatgcgcggcgcgcccaaattagagcagccaccaacggattagaagaagcaaagcttaaaaaagtgaaggcgaccgacggacgctcccgctgttatttcttttcacggaggttcaaatttggggggggggggcaaatgaagaaaatggttggattaacggaggaaccgaccgaatggaaagcggcgcctttgaaatataaaagggatttgtaaagcaaaaaaacattcagtgatgaaagtctatgggcaaaaggcaaaaagcggcgagagaaagtgaaacgaatgaaagcggacgaaaatgcctgagggcaaagctttggggctcatatcgccggtcctcccatccctcgctgagcacttccgccactctctcccaacttccgttgctttggtgggtcggctcaacgccaagaatgttcaggacgagctgaagcacaaatggaaaagcgatcatccgaccaaaggagggagggagggacctggtaaatgtccaccacctcaatcggttcgcttttgtagtccgctttgaatgcttaattaattagcaattccaactgattattattggcaattttacccggtcctcttgccatgaaaattcctaaaattctttttttacataaaatttggcca

SEQ ID NO: 75272 - DNA, 543 bp, Heterodera glycines
cttgtccttctacgatacaatggattggacaaggtaaatggcaaaaaaacaaaaattgaattctggcaaatatttttactcattggcattttcccaaaggcacttcgctcgggcggtcagtcgtcaagtcaaacacgacaagcactttccacggtcgacaattacctgcgaaagatccaagtgatttggcgaactcaactaatccaagcactcatcccccaaaaggaggagttggacacgatggaccttcaccagtcgaccaatttggtggtgctgtcagaccacggactgatggcggtggaggaggaggaccagttttacatcgacgagtgtttggcggacccctccatggtcagacgagtggccaattcgttggcatttgccatggtttggcccatcgacggggaagaggtccttcgtccaatgtccctttattgtataagtgccaccccttccttcaggacacaactttcttcgaacttaaagtgtgcgatcagtgggctttcgtcggcgattacgaaaatgaagagacggcacctttag

SEQ ID NO: 75273 - DNA, 58 bp, Heterodera glycines; identical to SEQ ID NO: 50987

SEQ ID NO: 75274 - DNA, 2056 bp, Heterodera glycines
atgttttttatgcaaaaactcgttctgattgaaaagaaattggtaaaaaaagaagctatttttgagcttttcatgtgataaaatatttgcaaaaaaaaaaagttttaagaaatatgaatcagggccctaaatgattttttaattattaaattcattcattatgcataaatttccgaaatcgcgcagttgggcgcgcacggttgggcggcgccaccatgcttttccactataacttttttatttgtcaaccaaatccaacaatcttggtatcattcgaaagctcttcatatgctctatcagggcttacaaaaaaacaaaacaaaaaattccttgcatataaaaagtttttaagaaaaaatttcaaaatttttgatttttttttgtaattttcgaatataacttttttggtaattgtcaaatcacgaagcaatattttagaaaaatttttaaacatgataagctttcaaatgataccaactatgttggatttggatgacaatgaaaaaagttatagaaagttatagcgaaaaaaacatgctggagccaaaccgtgagcgcctaacttaggtaaatcgtaaatttcgcgttttaaatgcatattttagtgaattttttggcattttttcaaaaaatcctctattaaagcggcaactctaaagaccgaaaatttttcaaaaagcttgatttttatgtgcatctatgtagaacataaaaggtaactcgcccggtgggactcgaacccacgaccccagcaatccgtgccgtgctctaaccaactgagctacgggcgcctcttttagaggttctctcaggtcctttatcccactttctcccacactccgttccttctggcatcacatctaatatttattaccagccctaattaccagtttaaatatgtaatttttaaaaatatttttattttatttaaagattttcgacaaaaaccaacagtgctcatccccaaaaagtgctgatctaatgggcaccggtgaaaaagctgctgacgtaaaatgggtgggatctgattctgttgaaaaaaggaaacggactttgcacagacgaagcaaaagcattgtaaataagattttaaaaaaataataataataattgtgccaagtattactgtaatcacagtactctattagcactgtatgtcagaatatcttctcttccagccctttttatgaaaattttgaaaaaaatgcactaaaaaataaaatttgatcggactcttaaatttttaggccgaattattaaaattttgatttggacccttaaaattttacggactcttaaaatttgatttggacccttaaaattttacggactcttaaaatttgatttggacccttaaaattttacggactcttaaaatttgatttggacccttaaaattttacggactcttaaaatttgatttggacccttaaaattttggtcggactcttcgaatttttgattggactcattaagttaattgcactcattaagttgtaatagagttccaaaatttctattttgtgtatttagttagtgcatcagttaagcagtaaagaattcgaagccattcaagacctccattacatccaagaaaatcttccagcacttaaaattacggaggtctgctgtttttttatgggaaattttttattttatttttttcagaaaaatctcagcgatgaaaataagccgcaccttccacaaacgctacagacccaggaacgttatgtaattaaaagaatgccatttaatttattaattataccattaaaaattaattaattaattatgacattaaaagttatgaatttatttatttataaattatgccattaaaaattaattaattggtgccttttttaagcgtgccgaaattagtcgtcaaatggcggaggagcattgagaatttatttgcatgtcgttgagatatagtagaaagaaaacgatagagatggtgtttagtcatgtgttatgtttatattttatttatgagggggataaattatggctgtttttttttgtaaaaattgaaaattttctccgttggaataaa

SEQ ID NO: 75275 - DNA, 315 bp, Heterodera glycines
atgatgcccaatattttagaagcacaactgccaaatgactattttttctatattttacgtctttttgccgttaaacttgaccaaaatgcgaaagaaaggcatgaattgaaaaccagaaatttgcttattaatgaaattttagtctcaagactagtcgccctgggtgcaaaattatcacagaggcaggaacttctttcctgaatgcctataatgaaagtgggtttttttaacaatgaataataattttaaattttaataattaattttaaaagaactgggattttatgttgcggtttttacttgttcaatttcaaa

SEQ ID NO: 75276 - DNA, 1703 bp, Heterodera glycines
atgtcattcattcatccattcttcctccctgaaagatggtttatgaatgtccatgccagcgacaaaatttccttagaccgttcgctgcccgactttcgcttgtccgagtgcaaaggcattgcctatgagctgagtttactcccccggtaaatatatttagggtatttgcactccccaattcatttaattgaagtgcttcggtggtgatcatcttcaccgacgaagcctggtcaccgctgatgagaacggtgcactccgtcgtcaatcggtcgccgcccgaactgctcgaggaagtgctattggttgacgacgcaagtcaaaggggcgagttgcaggaccaacacgcaaatggacacgctttgagttctcttcagacgaactcaaggacaatttggacgcgtacatccgacgatttggaggcaaagtaaagcttttgcgcaagacggaacgccagggactgatccgcgcgaaattgtttggcgctttgcattccaaaggcgaagttgtggtttttttggactcgcattgcgaagcaaccgacggatggtgcgcttttcatttaatatgccaaatttgacgaattctgctcaaattcaccctttccctgtgccatcatttgccattcgcaggttggagccgttgttggcccgaataaaggaaaagcggtcggccattgtctgtccgtcaatcgatcacatcgatgccgaaacactttccttcagcggctcgtccgaactcggctccattgggggcttttggtacgttgtgcactttctgtttgcctcatttgccccccccccttttcaggtggagtttgcattttcggtgggatcgaatccccggccgaattctcagcgtgcgaaagtcgagaaccgatcccattccgttggccaacttctgtctgtttgcttttatcatcttttcttcacttttagctcaccgacaatggccggcggactattggcagccgatcgcaattatttcctggaaattggcggatacgacccgggaatggacatttggggaggcgagaacttggaaatctcatttcgagtaaattcccgtcctttggctataaacagttgcatatcgttcttacaattagaataattctggtcatatgcaaaatacaaaatcaatgttttcaacataatcggaattatttatattgaaagatatgagaggaaattggcaaggcctccattcttcgttcacatctttttacttcccctgccatctctttccatctaaattttcaattcacaatcagcatcatacttaatgcaaatgagccaatttacaaaaaataaaattaaaaatgcacaaaaattaaatgaaataaattaaatataataaaaataaatatttttgaggtgtggatgtgcggtgggtccatcgaattcgtcccctgctcccacgtcgggcacattttccgtgccggccacccgtacaacatgacgggccctggcggcaacaaggacgtgcacggcaccaactccaagcgactggccgaagtttggatggacgactacaaacggttgtactatttgcaccggagcgacctcaagcacaaagacgtgggcaacctcgagggacgaaaagcgttgagggacaaattgcgatgcaaaagcttcaaatggtacctggacaatgtgatccccgagaaattcgtacccgacgaaaatgtgaaggaatacggagcg

SEQ ID NO: 75277 - DNA, 170 bp, Heterodera glycines
acaaccgtttgtagtcgtccatccaaacttcggccagtcgcttggagttggtgccgtgcacgtccttgttgccgccagggcccgtcatgttgtacgggtggccggcacggaaaatgtgcccgacgtgggagcaggggacgaattcgatggacccaccgcacatccacacc

SEQ ID NO: 75278 - DNA, 436 bp, Heterodera glycines
  unsure (1)..(436): unsure at all n locations
gcaaaaacaaagcggtgaccgtcgttaaagncctcaccacttgcggtcagtcgcccgggcgaacaaatcgatggacaattacaacaacggttttgattgacaaaaggtgtcgacttgaaaaccgcctccaaattcttcgcaaatcgtttcgcctgcggctgttccgtcaccgttggctcagccgacgaattggtcattcagggcgactttaaggtgaaagtgtgcagcccttcccacacattgccattttgttgattgaaggacaaactcttcgtagaaatcccgaagaaatggggcgtcgatgaggaagtcattgaggatttggacgaccaaaagaagtgaccactcccctttcacactgcttgtttttactttaatttatatactaattcattgctttgttgtcgtgccgaaaagataaattttaattcattta

SEQ ID NO: 75279 - DNA, 1788 bp, Heterodera glycines
cgacaacgccgccggcggaaaagcgaaaggtgccgatggcttctcgctttgttcctttccgtcgtattttttgccatttacgtccttttctatgcctttctgagtgggcggcagcattttggcactgattatttttccgatgggtaatcgtaaattcaaattttgttgagtctttggcataatgttccttctcttttcccctaagtcaccctttgcctgccgaatttgccctcatcgcttttcctgttgacgaacattctctggttggccccgatggcgagtcgcctctgttcacccaccgaatcggcaaatcggcgccggagggccaaccgggcgaaaatggcgcggcagtgacactgacgggggaggaggcggctgaagggcggcgccaaatgagctactggttcatgaacgtcaaggcaagcgacaaaatgtcgctggaccgcgcagtgccggacgtgcggccgtaagttgacggagtcgtgccaaaaacgcaattttcggcaattttgaagtttaggtggccggtaaaaagccaaaaaagtgaaccattttaattttataatttttttgtaaaaaaacatagttgattaaaataaataacacgtcattgttcaacgactctaaaaatagcaagttgaaagggttcctctttgggttttcactgggccacatgaactgaaaaagtgccgaattctcttttcggccaatacgattatagcaatgcccctgatcagcagcagttgatcacttctctttttccaattcccccccccccccaaaggaacgcctgtcgctcgctttcctacgatttggccaatctcccttccgcctcggtggtcattgtgttcactgatgagcccacttccgtccttttgcgcaccgtccattcggtaaggtccccattattttgtccaaatttcttttccattttaggttttcaatcgttcgccaatgtctctgctgcgcgaagttgtcctcgtggacgacttcagtcagagaggtctcccaaatttgattcttttcagaaactcattctttctttcttccagaggagctcaaagctccgcttgtcgcccatttgcgtcgcttcggttcgcgcgttcggctctttcgagcgaacgaacgtttgggattgataagggcgaagatagtgggagcgaaatacgcccgcggtgatgtcgtcgtatttttggactcgcattgtgaaacatcgccgggatggtcagttgggggagatggagaaagaagagataatgaaaccacagagacaccagcgagagaaaatgacgacagttagagagtgagacagacaaaggggaggacagagtggagtgggagacaaaggggaggacagagtggagagagagagataaagaggaagacacagtggagagagagagagttgagggaggagaggtgtatgggagagagagagagggaggggagcgacagatgcgtatgggagagcgcaaaaggaaaaagtgaccaaaattaaaaaaaggctcgagcctctcctccatcggatcaaagacaaacggtcggctgtcgtttgccccgtcatcgacatgatttctgactcttcgatgcaatactcgggcggatcagccgctggcattggcactttttggtcagtgtcaaaaagatgggccagggagcattttctatagtaacaatcttcaggtggagtttgcatttcaaaatggaccccatcccggagagagtggcaaagatgcggaaacacgcggaccatttggacagcccgacaatggccggcggactgtttgc

SEQ ID NO: 75280 - DNA, 2606 bp, Heterodera glycines
  unsure (1)..(2606): unsure at all n locations
atggcggcccccgaatgttacgagaaattcttcgaatgtttacaagtcagaattggtcaactgaacgaagcgaacgacaaagaagtggggaaaatgatttgcacttttcctgaaattttcgctttaagcgatgatgactggaagcagacaaatttagtcgaacaccaaataaataccgcggaaaattcgccagtaaaaatgaaaatgcgcctggtcccatacgcttatcgcgaaaaaatagcagaaatgctccaaaattatttggcaagaggcatcattcgtccgtctatgtctccatgggcaagtcccattgtgattgtcccaaaacgtgatggaacgttacgtttttgtgtggactaccggggcttaaattcaatcacccgcaaagatagttttccactcccaaacatcgacaatactcttttaatgcttggaggacaaaaattcttcagcactttagactttatgtctggatattggcagataagaatggatgaaaattccattgaaaaaactgccttttcgactgagtacggtctttacgaatttacagtaatgccatttggtctaaccaatgcagtggcaactttccagcgatttatgtcgcgtctctttgagggaatgattaatgactttctgttcgtttacattgacgatattttaatcgcatctaaatcctttgatgagcatctgaaacaccttgaagcggtcttttctcgagttaaagcagcagaattaaaactaaaatttgaaaagtgtaatttttgcacaaccgaattaccatttttgggccacatcctcacaagggaagggattaaaatggatgcggataagctaaagcctgtgatggatttgcctatgccaacgaccaaaaaacaactccattctctgcttggttttctgacttattatagaaaatttatccattcattcggcacgattgctgctccgcttttcaaattgataagcgaaaaagctgaattcaaaatcggagaacaggaaaaacaagcaatcgaagaattaaagtcaaaaatcattcgagatgttgtgcttcattttccggatttcgatgcagcacagaatgacctaactaggcagtttataatcatgactgatgcgtgtaagaccggcattgcagcaattttatgtcagcctgatccggagaaacagattaggccaatttattttgcctcaagacaatgcaatgtccatgagtcacgctacagtgctaccgaattagaggctttagccgtcagatttggtgtaaaaaagttcgcacaattcatcactatgattccgactcgggtcattactgaccataaagcactaatttggatgttccggagtaaaaatgagacaggaaattcacgtgttgaccgttggcttcttgagttaagctctcgtttcatcctaaaggtggaattccaaccaggaaagaaaaacataattgctgatgttctatctcgttcgggaaaatcaaatgagagcgtcactgaatccttacaggaggaagacattgcctttattgggaaagttcgagtttttgaactcagtaataatgtcgaagatttcaatgaacaccgggaaaaatggatcgaggagaccaaaaacagcgaaatgcggccaatttatgagtttttggagaaaaaaattatgcctgctgatccgcgaattcgacagagcacaatggacaaatgccatagatttgtgttaattgagaagtttttgcatctttgtgaaaatgacggaaaacttagactctttgttccattatcatttcgtgaaaatttggttaaagaacggcatgaaggaaagtgttcgggccacatgagcgccaaaaaattgtataaacaattggcagagttatatttttggccaaacatgttttctgattgcattcatgcacataatgcatgcagaatttgtgcacatacccgaaatgcacgttcaaatgaacctcccttaaaagtagttcactcatcagaaccattggaattggtctgtatggacattttggacgttgggccaagtcagtcaaacttcaaatatatttgtgttatcatcgatcatttcaccaagtacttggtcgctgaaccaatcccgaataaatcagcagattctgtagcaaaagtatttgtcgaaaaatttttgttaatctttggaacgccgaaaaaaattcattccgacaaaggaaaggaatttatgaacactatttttaaaaaaataagtgaaattcttgggtttgagagatcctttacggctggatatgacccacaggcaaacggtttggcggaaagagtaaatggagttttgattcaaatattaaaaaagtctacagcaagtaattggacgtgggacgaacgattaccatactcagtttttgcttacaatataacgccatccgagtcaacgggtttttcaccatttcttttaatgtttggcacatcagcgnacattccgatggataagatcaccgaaatgaaatttaaccccttatacacaattgattatgaaaattattttcaatttgtttttggaaacctccttaatattcaaaatganggccaacaaaatttggatgagtatcggaaaagaagtaaagattg

SEQ ID NO: 75281 - DNA, 981 bp, Heterodera glycines
aagaagtattcacggccaaccaggacgggcagggcccgtgcggctacagcaccagccaagtggcactggagacggcgggtgccgcgtcgtccacgccccagcagcaagtgccaaccgccgggggcccgcctggcgctgctggttcaccgtaccctccaaacaccgtcggctgcccgcccgtcggcccgggcaaccaattccccccatacacaaagacgccccagcattcgttgtttccacactatttcggcaacggcgccagcagcacactgccaagaccgctgttctcctcctcattgtggggcgcaagcacgtaaggccggtggcagtgcagaaaacccattacacttaacttagcatgggttgatgggagttcaccagggcttgacaaaattttggattttgctttttaagggtttcgaaaatctttttaggttccattttcgggcttttgttcataattttggctggcatttattctttgtttaatttgcctacctcaatcatcatttacagtttctacgtttgcttgctgatcagtctttttgtgccacaaattccgaactctctgatgctccgtatgtcgcccaaatcaaattttatttttatataaattttttttcaatttatttttaaaattgaatttatccacgctaaatttcagatcacaatgatcaaattgtggaaattgactccaaatatttgtcctgtgatccgatcaacaataaagtgccagtcgaagatgatgaacaagaagaagaggaagacgaagaagaagaggaagagcaaggcgggtactactgtaaatttagtgtatgcctggagcagcaggaggggaacaaatgtgtcagcaaagcgctggattttggagaaatgggaggagcacgagataaagacaaaagcggaccgattgatgagcgaaacgataatgccaaaaagagaatcactgatcaggagtacagtggactcactgatcagtga

SEQ ID NO: 75282 - DNA, 1072 bp, Heterodera glycines
  unsure (1)..(1072): unsure at all n locations
atggttgcagaattggaaaagaagtcgaacaatgaatgcaaaggcaagcccatttattgcgcatgtgatccactgcattttgatcacattatgactgggatgtgctgtgacaaaacaacaagctgcgaatgctgttccaaagtatattaagtgaataaatagttaggatttattaattaccgtgcaggaaaacatatttcgggattttatacatttttggtaaatattttggacattttagtaatttttcctacattttttgaggagttaaggaaattttttattaaatgccccaaaaaatcaaaattttgaatttttctttatttattttcataggagaatttctaagaatttgtagaaatttcacgtgaaaattaagttttttattgaaaatctacccctaaaaatttgttttttttcttcaaaaaagagttaccaaaaattctttttaaatactaaaatgtgattctaacaataaggcaaaaaaataaaataaaattttcatctaaaatatttaattataaaataaacattttactatttattatatgcttcaaaattttcatcttctcacccgacaattaatatttcacattagcagtaaatgttcatatgcatnntnaattgaatcaatttaaattactgcaaattatattgcccctcattccaggacattttttgatccatttatttaaaaacagcctataaactagagatcggatcgggcaggggggactaggtcgggtcgttttggcgccgacgttttggtgccagcctcagtttattgatttaaatattcaaatctttgtcttatagtttttttcaaaaacaattcattgattcgctattgaatataatgaaaaatacttttatttaagaaattctaatttaatttcttacgaatataattttggtttttataatgcatttattaatcattaaatttttcagctttttctcgatacaacaactaaaacgaggaaaacggtaaagcatatgtatgtaaattaaaatttacaaatttaaagctggtgctcaacccagcgtcgggaacaaaatgtcaaaaaataaa

SEQ ID NO: 75283 - DNA, 906 bp, Heterodera glycines
atgaacagagaaatgtttgcacgggtaacagaatttattcatcttacggtgaatatcagtgttattgtgatatcatggcggactcaatggtgcgtgatacatgctgcgaatatttctaccgaagcactgggtcgaaagaacatccatgcaactgttgcacaacggtggttttttacataaaaacagaaacttaaattttaatacattttaattttttagaacaagagaattgcaaaattaccagaggtataaaattgaaattcatttaatataaaactatttttattttgacaattttagcttttcaaatttacaaaatggagtgaagacgacgagtgcaaattggagaccacaaagcataatactgaaagaaatggtaaattttttttttcagtttatctatgtttgaattttcaaaaaataaattaactaaaggaaatcttaaaaaattaaaaaagaaatttattggttaaagattaacgatgtttttttttcaaaatcagaaaaaatttgatgagataaatttaattttttcataaagtataatacaaaagaaattgtttttttaaacagaagactataacctcgcatgctatttcaaagaaggagaaaaggcgtcaaaatgttgcgatgaaaattatgcgctttcaactattaaatccattatctggagaaaagcaagcccgctggaatatgttggttctgctgtaagttacacaggcaaattatttattagggcaggccgagttttcataaaataattaatttaaactgtaatttaaaattatttaaaaatatatattcaatagattcgcagcaaatcgaaaattttgtaaaaaacttcaaaaataccgaaaatttcaataattaaatttttattaaatataaaatatttgcagattataa

SEQ ID NO: 75284 - DNA, 1174 bp, Heterodera glycines
atgattggctttttacggcttatcatttcattgtgcgctatgcgcaacgttttgtccattaagcggatatctgctgtgggcaaagtaatgaatttaatttaaaatatagctattataaaataattcatttgtttcttatttgtatttcttttgtgatagaatttttaaattttttaaaattattttttcgttaatcaaaaataattttttttttaatttgtaggaaatattctagtatatgaatttatttatttatttttaattcaaaaaagatctaattcatcgataaaaaaagaatttttgggattttcgacgcgctaaagacaacaattaattataaatttttcacactgtagccgatgccttggcatttgtttgtgagccaagaatgcaaagaagaagcgcaagttgtgtgcacggaatgtggctgggcaaattgtgtgccaagtgaatataataatgagccaaatgatgtcacttgctgcccacatgttcgaaagagaccgggctcaattaataggcacggtaaagtaaaaaccgtgaataaattctcatccaaagtatttatgtttttcaagaaactaaacaaaaaaattttctgctttgaatgcataatgaaaaaatactatcattgttgaattcgcatttcttgttttaagctaaccttagcatttttagaatatcttcagccttttttttatccgcctgatttggaattgagagatcaaagtgatcttgggttttgctgcccgactaactacgttttcaagtgctgcacattggtacatattaaaacagtatttgcctatgaaagatgattttttattttaagttatctgaacagaaatatacatggcgcggggagcacatggtgagaattcaataggtttttttattaatgaagcagggaaattgttgaaaagccgggacctgcactaccatggactagaaaaagtccgggtctcagttttcaattggaatctggaaaaaagcgacattttttcgtggaaaattttaattttatttttcaaatttaaaattgatattcaaaatgagcattttcttcttttttgcaatagagatttatttataaaaagggtttgaaatatcgaaaattttaaaggattatctgagaaattttgatcaaaaacaatatcaaaaaccctaaaataaa

SEQ ID NO: 75285 - DNA, 638 bp, Heterodera glycines
atggccaaaatcggaaaggcgtacggaaatgacattagccgagagattacgacagcggaggaattcgcagtgcgaatcgccaaggacaggcgggatcagctgtgctttcggaggggaatccaattgaaaatggaagcggaggaatcgaaggcgggagacggtgggtctaattaccccccccccccgctcaattaacctcaatttgtatttattaggccccaaatcaacgagcaaaaatgcgttttctatgttggcctggtggtttaacgatcagaagttcactttcggttactttggcttcaaattggccaatttggccgttgtcctccttcagctccatttgttgaattcggtgaatttaatggaatttccattttgaatgacctcatatttagtattttgggcccgacgatggccaattgtcgtccccttgggcactgaatgccctagccaatctttcggccgggcgcgagtcgccacattttccgagagtgattttatttgctcagtttcgcccaaatgcgttggcttttcaggtgactttctgcgatttgctcgtccgtcctccccagcgcgacttaaagccgcttcgcctcactttccaatgtttgctgaacatgaacactctcaacgagaag

SEQ ID NO: 75286 - DNA, 790 bp, Heterodera glycines
atgaaagggacccatctaagaagaaaaaaggtcagcggaaaagcgattaatggcccactggtaaaaatgcaattggcgatggtcgcggtcgacccgacggatgggaaagcgttcgttgaagccgacgaagtaagtgttctccacgaagcaaaagccgtggatgtaattcagccaatgctcacgcgccatctccgccgggggccaacacttaacaaatcaatcaatgccattattgggtcattggtttttaatggtctcagtgattaatctccccgccgccccttttcttttgcccgatcacctccaccggtcggccgaagtactgcttgagcccgtgaagcccggccatggacagaagcacagccggtgccaaaaggtaatggagacggtcggcacaatcgtcgtcatttcgggaaaggatgcgcaattggagcgcactaagcacttttaaagcggtggaagcgggcatttgggaggaatgaaaataaccaaattaaatgaaaaagattaagcatccaactcaaattaatatcgtatggttattttgtgcgtttttattcatagaaatgtcccttcattcccttacaaaatcagacaaaaatgggttgaaaatgacaataatttgaagaattaatataattgttttttataattaccaacattttaatttacttttgcatgtatttaaaatcattaataataaattaaataattttaatattatttaaaaatattttagccttttccctttaaataaccgaaaatttttttttgtgtaaaaattgaatga

SEQ ID NO: 75287 - DNA, 885 bp, Heterodera glycines
atgcaacaaatgatgcaatctgccacaacgccggtcctttcgaccggaggcggaggtttgggcaatacgcagtttctttatgagcgccaaagtgcgttggggagtggcacgatgggaagagggacgggcggagaggtagcagtagcgagccaattcaccactacactacaacagccgcaacagcagcgctcactcgtccaaccccaacaacagcagcagctgcaacaagcagtcacaagcggtacaccgctgcaaggtgtgaccgaatgcaattcggacaaaaaatgaaacggaagcaagacgattagccttgggccaacatttacattgttaaaaagcaattcttatccacttttttcaagggtcccaattccaatgccctcgtcgacccaatcacggcactgaggggagagcaatacttttacgtgcaaatcatttcaaagtcaaaattcccggtggatttattcattactacaatgttgacattcagtgagttttgttgttgtttaaatgccattttaacatttttagacctgacaaatgcccaaggaaggtaaacaggtaaatacaatataaatgaacttcatttaaaagctaattttagagaaattgtgaatcggatggtggagtcgttcggtaaaatattcaacggaatcaatccagtttttgacggaaagaaaagtatgtactcgaaggatccgcttcctattggccacgacagagtcgaattggagggtaaactatttttcatctttgattatccctcatgaacaaatttcagttgtcatgcccggtgattcggcggttgataggaaattcaaagtcgctatcaaggtcatcatcattcattatggctgctctatttatttattatgcgcttgctag

SEQ ID NO: 75288 - DNA, 937 bp, Heterodera glycines
atgaagcgaaccaacgcatcaaacatcactccacctcgcgccaaacgtgcaatgccacctgcactggacctggaccaaaacactgccacactcgaagagcaagaacgccaacgcaccctggtcttcattggcctcccggaaagcaatgccatccgcccatcggagcgtgttcaggaagacagggaagccatcacaaaaatcctggaccatcttgaagttgaggcccaaccaacggccgtctttcgactcggacgatacgacccgcagcgaacaacaccacgcccgctcaaggtggtcatgccaacgcccacacaccaacatgtggtactcggaggatggaagcgcgagcgtgctcggctccgttcccaacagaacctgaaccgtctgttcgtccgtccggcgctgtccaaagaacaactcaaagaggaatacgaagcgcgtctccgaaaacgtcaacaaaacccagctccaccggcacctccaacccagctcccaaaaacgacaaatgaccagacacccgatgttgctaaaggaccaaaccagaacgaggccagtgaagacgtttccaaaccaccggatgtttttgaccaaacaatcctcgcatgttatgaagcattaatatcattgccacccaccgacaaaattattcaccaaattcaatcgctcaaaaaacaataccctcatctttttaataaatagttctgtcagacctccaaaatatttcctctaatcaaaaaaaaacattttcttccagtacttccaatttctcaacaaaattttttcctcaaaaaaaatttttttttttctaactggaagtctgactatatgcttctcgaaattcaattgtattttttcatctatgcatttatctttcctcattttcatcaaaagtgtaagtgcatatgcctttcttttggttattttatttttgaataaa

SEQ ID NO: 75289 - DNA, 604 bp, Heterodera glycines
atgaagcgaaccaacgcatcaaacatcactccacctcgcgccaaacgtgcaatgccacctgcactggacctggaccaaaacactgccacactcgaagagcaagaacgccaacgcaccctggtcttcattggcctcccggaaagcaatgccatccgcccatcggagcgtgttcaggaagacagggaagccatcacaaaaatcctggaccatcttgaagttgaggcccaaccaacggccgtctttcgactcggacgatacgacccgcagcgaacaacaccacgcccgctcaaggtggtcatgccaacgcccacacaccaacatgtggtactcggaggatggaagcgcgagcgtgctcggctccgttcccaacagaacctgaaccgtctgttcgtccgtccggcgctgtccaaagaacaactcaaagaggaatacgaagcgcgtctccgaaaacgtcaacaaaacccagctccaccggcacctccaacccagctcccaaaaacgacaaatgaccagacacccgatgttgctaaaggaccaaaccagaacgaggccagtgaagacgtttccaaaccaccggatgtttttgaccaaacaatcctcgcat

SEQ ID NO: 75290 - DNA, 235 bp, Heterodera glycines
aaattcacttttatgttcgtagctgtacagaatgaccattctttgatattccaatggtttgtgaccaaatttagcatgttttaatcaatttaggaactaaagtgagaatttttaaaattttgagttttagactttttgttcgaattcgggtccgggattcgaaattggtccaatgaaggtcatattcgtgatcagcgaccctgaaaacccccataaacatgtttccaatactttc

SEQ ID NO: 75291 - DNA, 2138 bp, Heterodera glycines
atggtcgtcggacggcacacttttgtggcggatgggcaaaacgcaacggcacaacaacaacatcatcatcatcagcaacatcaacaaaagccaattaataatatgccaacgggcaaaaatgttattcttcaatcggcggacgaatcggcagcagacaccgcctttctccaggaattgtttatgaaggtaaaattgggaaaataaatcggaagcttttaagcctcgaaaacatcaacaaaaaaaattcaaaattagttttatattttgtatttaaattgaaaaacccaatttgggaaaataaaaatattttccaaagaaggaaaaatttttttctagtctgagaaattcggaggcttcggcctcgtaaacattaaaaaaataaaatttccaattttacataggacaaaaaagaagaagaaattttttaatgtatctttaagataatgaatttttttatgtaccatcatattttcagcatgtacctgctgcacaaccatcgccgccaatgccaaatgccgtcgtcgctgtgtgtcaaaatgaaatgccaaaaatggcggtgatggtcaaacaggaggagccagaggttgtggaaatggatcagcaacaccaccaacagcagcagctcaagtggaaggcgaacaacaccaacaaccagaacaacaacaatggcacaacgacgggcaacgaactgagcaatggcactagccaagtttacctgtcgtacaaccaagtgagtgccgtcgtgggaggtgagagagttaagcctggggcaattttataaaaatcagtgatcaatcaatgtgaagttttttcgtggtattatgtcccctattgctgctgctggaccgaaaatttcctaaaactcgaggagacgacgaaaaaaaaacccgcgacttttttttgagtctagactcgagaccgagattcttaagtatctctaatgtatccaaatcccttgcagatcaactgcctggagaatgtgcaccgtctgctgaagagtcagtcctcaaatgggtcggctgcagacggcgaaccgtgcggcggtggcaaaatgccggccgactcagcgccaccatctcaaccactgccgccgtcgcaacttgtgccctctgcgtcgccgccttatgcgacgactgtcgccgctgcggcgacgacaccgtcggcgggcggcggtgtcggcacagcattgacgcgtgaattgctccaactgcatgaccagcgttgggaggagcggtgccgtgcgcactggcgacgccggctcagccaacagacgacgacagtcgtggcggcatcgccgcggtgccatcaaacgcagcagcagcagaagcagaagcgaccgttaagtcaggaacaggtgtgtttgtggaatggtatgacatgcttttactgcttgaaaatgatggcaatttccatttttgggccaatttgtccattttttcacgcaaaattgacgtttaaattaattcattgcaattttaaattttccatttttagcctggcaatttcgcgagtcggtctccgcctggtgtcgccgattggcaccatcacccacaacagcatcaccatcatgttgctaagttggcacggtgccgaagtgagcagcggcgcagtgcatggccaatgcaggcagcggttgcccaatttgaggacgaagtgagattttgatgccacaaaaagtcgcacatttggagaatttctgcttatcggatttccgcatacacttaaattttggcttcatctctctaatttcggattaacataaaaaccccgttttttagcctcctctttcggcatttaaaaagaaatttctccaaattttccatttttcccaaattttctattttcctcaaatttttgtttttccccaattttccgcgtatattttagctttctcccctccacgctgtgccaccttctgctgctggtgccgttgttgcccacaatgagcagccgccatgcggcggtgcgttaccacccactgaactgatcgcactgatcgctgccgtgctgcaaaatgtgccaccgccgtcgccgcccgcggaaaccgccaaaattggcattgttgcttccccaccgataatgaatgacagcaacggcacaccgctgggactgcacccgcaactgctggaccaactgct

SEQ ID NO: 75292 - DNA, 149 bp, Heterodera glycines
gtcagaagatgcaaagataaagaagatgtctcataatcgtgatctgtattatttgatgtattgtacatttgtatgcatatatcatttgctgtgtattatcactttatttccatctgtgttccgaaataaattgaattgatggtcattaa

SEQ ID NO: 75293 - DNA, 585 bp, Heterodera glycines
agtgccagccagccttcaactcaacgcaacatcaacaccagtgcgcgccaagctcatctacacatttcgtcgcgacaactcatcacttcatcatgagcgacatgagcgcctacatgggatccggccccgccgagcctgcaccgtcgtccggcgccgcggaagcctcttcatcgtcaggagtcgcgagcgcctacatgggatccggccccgccgagcctgcaccgtcgtccggcgccgcggaagcctctccatcgtcaggagtcgcgagcgcctacatgggagcctcgcccgcgtacgagccgccagcggttggtttaagggggacacgggagcaaacgcatcactaatcttttgtttttgcagccggagaagtccccggatcagagcgcctacatgtgagaagatgcaacaacgaccggcggatggatggacgaaacctgaagagcgagcgacctgtcagaagatgcaaagataaagaagatgtctcataatcgtgatctgtatttattgatgtattgtacatttgtatgcatatatcatttgctgtgtattatcactttatttccatctgtgttccgaaataaa

SEQ ID NO: 75294 - DNA, 1078 bp, Heterodera glycines
atgccgttcgcgactcttcccgaacagaaccaaccaaatttcggcggttgtgaaaacgcattcattcagcagcaacaattgacggaaaatgtattgaatcatgttgtgtccgagcaacagttaaagggaatattgatttattccaaataaataaagcacagaaaattgggaggtcaaaggacaaataataaatgcagataaattaaatgacaaatgaatggtggaaaaagcaaaggaaggggaaacaattccatatttatgggcagtaaaatgggcgggaaatgtgggcatttaaaattcaaaatatccacttaaacactacaaatcaggtagaggaaagagtagcagaattcactttcaaatgtgaaaaaaggggaagtcacagtgatcccaaaacacaataaaattttcaaaaaatgactcaaaccacgggaaacgtggcctcggataattttttgcttgtccgggaacaccccttgccgataatttattggaaaataacacttaaaacatttcttcaggccgatctttcttccattccgccaccaactccccaatcgcaccagaaattcggtagcggtagcggcggcactctctcggaaaccggcaaccaattaccgcgttccaccgggcacaagcggatcaaaaaaaccaaaccaaagggcgaagaactcgcgaagaaggctaaagaaaatgtaagtggagtttagttgctctccaagtctttttggtgttttttaaagaattataaaaaacgaaaaaatttcctataaattttttgtcacaggtgccgccgccttttggtcctccgaatcagctaccacagcagacaattggctacgttcctccggccacagaaccaaacaatttttttccaaacccgaacctcgcgtggcttcaagctttggcttacgctcggatgaaccccggtgctggcacgtcgacttcggcgtacattggaggaacgatgccaacgactgtttggcagcagatgccgtactctgctgccgacggtatgccttcatcgaccgcagcgaatcaccatccgatgacgaacattcaatcggccagcaattag

SEQ ID NO: 75295 - DNA, 1683 bp, Heterodera glycines
atgcagcaaatgcggaagagtcggacattgggcgatcgtgtgcaggacaaatggaggcaacaaaaattcgtcaagacggaaagtcgaccatggaaaggtagcaacagggtgaagcaaatacagctgcagtgcggtgctaagccactagcaatttcgagtttggagcagaagtcggccaaaactgtgactgttccgccgagcttcatccaactcaaagtgcatgaaggaaatgccgattttgaattggacagtggtgcagatgtatcaatcatcagcagccaagattggagccacattggaaagcccgaattgaagcaatgccaaggattaatggcttctgggggcataccgatagaaggcgtcctcggcatggccaatgtaaatgtggaatacaatggcatgtaaatcaacacggatatttatgtgttaaaggaaataagagtaatttgtgcggtcgtgatttgattcgcggactgcgcattgatttgaacaaagcattcggcattaacgcaatccaaatcggatccacgaataatgatcagaaagaggtggacaaaattctcggaaaattgaagtatttcgagacgaattgggccgatgcacccgtcaaatttcattgaaattcaagcctggagtgcaaccaaaaaggtgtaaggctcgtcctgtaccatttgcgctcaaagccgaagtggagaagattttggatcagtgggtacagcagggagtgctggagccgatgaacaacagtgattgggccacacctttggtcattgtaccaaaaccgaacggaaaaattcggctctgctgtgattacaaagtgaccgtcaaccaatggttggacgtgcaccaatatccactaccaagaccggacgacctattcagtgtgctaaatggcggtcagaaattttcaaaagtggatttgaaagacgcctatctgcagctgatgttggatgatgaagcaaaaaagtgtttggcagtatgcacgcacaaaggattgttccaatttacgagacttccttttggcgtagcgtcagcaccggcgattttccagcaggtcatggacgaaattttgcaaggaattgaaggagtggcagtgtatctcgacgatatactgatcacagcaccaacacaggcagaacatctttgccgaattacgcaggtgcttcagcggctcaaggcaaatggacctgagagttaaacgggacaaatgcgaatttatgcgtgaaagcatagaatatttgggacaccgagtggacaaaaacggagtacatgcttcagaggaaaagctggaagcaattcgcaaaatgccaccgccccaaaatttaaaggagcttcaatcctttttaggtatggttaattattatggcaaattcgtgcccgcaatggctaccgtttccgagccattaaaccaattgcggagaatggaagaaaagtggcattggggaagtgaacagcagaaagcatttcaaaggattaaagaaattttgtcatcaaccgaagtgctcgttcattatgatcccgaaggtatccgttaacgatggttaaatgaatgtgagaaaaaatagtattgagtgcgattaaaagtttaagattaaatgaaacatcaaacatcaaaaaaccagcataattaattgtccgcgaaatgtgcgccagctccgttcccgttggattccttaaaataaa

SEQ ID NO: 75296 - DNA, 562 bp, Heterodera glycines
atgggaagagagggaaaggggaaggcactttattactccccagggacgccgacgagttcatacgccgaagggcaaaagtcgcgcgacggcggcgaagcgacgagcgaagccccgacaatgctcggtaattaggggaggaaactgattgactggaccattggcactaattaattagtacaataacacgtcatgcaatttgttagacactctgtgcacattaatcggcgaaattggcaaattgcgacgagaaaatcggcgcctccgtcgccgattcgaagtgcaacaaacagtcagtcattagcagtttcaattaatgttttgagtttttctgattcatttgtaatttttgcccaatttttaggaggaaaaccaaacgcagccgaaaaatgcgcgcggagtcagctcattgccgcgcccttcccgttcattggaggaaatgcatctggggtgacgacacttctcattaaggaagtttggacgcttgggactagttgaagacatttttttaattttggaaaaattataatttctgaaaaaagttcgaaaaaatttaggaaataaa

SEQ ID NO: 75297 - DNA, 1796 bp, Heterodera glycines
ctacgaatcgaagcaaattgaacggatcgaaatgctaccacagtctattaccgaaatgatttttgataaagttggcaaagatggatcatcaaaaatagacaaagatggattgcaaactattctttcaaacggcacaggccgtgcttttaatccggacacgtgtaggcttctcattgccctgtttgacttcaaccgcaacggcgtgattgatcggaatgaatttggtccgctttggaaggtaggttattcttatagtttttacctttggcttatcgtgtagcttactgctaacacatttctttatctgttcattttagtacgttgaggaatggaaggcctcttttaaaaaaatagcaggcgataatgagctgtcaattggcgttgaacgacttgaaattgctctaagggaatacggtaggtatttgtcaccgatattattatttcagatgttagtttataggctaccgattttctgccgacgtttattgtgaattgttgcgcaagtatgatcgcacaatttcaggtaaaagaccagagctgctgtttttaaaataatcttgtatttaaattaagctcggttgcactttgacgattttatacatctttgtattgtactgcagcaattgactacaccctttcgtgatcgggactttggccaaaaaggacggattagtgttggtaagtattattcatcaaaaaataatttttctaattttttctttaaggttttggagactacatcgctatgtttttatccacaatattataagatttttgcatttgatattaaaatttgctcccatctgtatttttattgttcattggcgtgacattacgcatcattctttactctcggttcagctgtcgctataatcgactttgagctcattttcagcatcccagtccgcttttccctgtcgctattctttccactcagtgtacgaagatgaacagaaacaacctgaaacgattccaaatcaagcctctttcggcagagtccaaaggctccgaggagcagccaacttcacgcacgaaaacgcttagcgaagtcaaggagttcgactcggctggcactttttttctgcgtgcaaagcttgtaagcgtgttgttttgcatttacaaggtgagatggacaataaatccctgcgaatatactcttacatcattatgcttcgaatttagtcctgcccaatgagaagtaagggtattccatgtcgtaagaaactcgacagtgaagacttttgtgtttcgtgcgtccaccgtgcgaaaaagcccagccgcaatttgtacctccgtgttgtactccaagattgtgatgacgaggaatgcgagcaggaaacaacagcattttcctatgcagccatcaactttttgagcattgccagcgtggaagctttttacaacctgtcagagaacgcacctaataagttggaatcgattttgcagtcaaaaatagatcaacccgtgctcgtcaaagtcaacatcaaggtgggttcattttttttttgctatgtgtttatcccaccttagctagtccattgtgttccatgcaaaaattatgtcagctaaaagaggcatattttaaggaaaataatgatacggcgaagcttgactggattatttcctccatatctgtggaaaaaccggtgtcggtgaagcttttggatgacaaaaacaacgatgatggagttgaggaagaggcatcttcaagcgagccgcctaagaagcgaaccaaaaacaatcaagtcgagcgtgctattgatgaagatgctgacgacatccatacgattgaatga

SEQ ID NO: 75298 - DNA, 368 bp, Heterodera glycines
atgaagaggactgcatctgttactgcatcaaaggagatggaaagttgtaaaaaggaagagtcgattgggactggatgccgcaaaggggtgaaacgacgatacccttatccgttgctgtcagctcgatctcaggatgcctggtaagtttgcagacccaaaaaaaaaatcacgtgacaataactcaggtctgcaaaacttgatcagttggaggagaaatattcaaaaatgcaagaagaactttcggaagacagcgatgatgcaattaatttcttcgaagatagcattgaggatattgtggaaaagtgagtaaacctttcaacactttaaatactgcttttattttaaggataaattgttctgaagctaaa

SEQ ID NO: 75299 - DNA, 4582 bp, Heterodera glycines
tgacatgtcatccaatagaaaaagaacagcagcggaaaacaattgcaagcaaagcaagcctaaacagccaaaatgggatttccgctcaatggtgtacttcgaacagtacccaactgaaccacaattggaagaggagactacccagcaacaacaatcatcatcagaagcgacaaatcaaactggaatgggcgatcgatcatcggattccgatggtggacagcaacagctaccgttgtacaaagaaatcaccaatcattcacataccatcgagcggttctctgtgcagcgccatgtcacggaatttgtgctcaacgcccagcatgagcaacctgatgaagcactacgtcaagccttcgatgaactcatcgccagagctatacaaaatgcggaaaaaggaagtgggcgcactgtttcaaaattgggcataatggtaaccggaaaaggcttaaacgatccggtagttcttcctatacggtctcctctgcaaaacaatgtcgacgttgtgatggccgagcttgacaagctgggtcagagcgagggcgacgaaggaggggctaacaaaaaaacgttactactaagcgagccagtggagatcgtcgtcacatgcttgactcctccggcagggtccgccccacgcttgcacaaataccaaaattggggatacgacgaagcgcaaagaatacgtatacacaacgtggacaactactgcttatttcatgcacttgctgcaggccgggcatatcacgaccacgatattttttgttccaatcccaattcgacaaattctccatttttttcaaacataaagaaaagaagggatttttgcaaaaactacgaagcgttcaatcgcctggtatcaaacaatgaacgaatgcgaactgtagctgaagagttgatgaatgcatctggcatccagattggtcaaacttcttatggaattgaacatctacagcatgttcaacaatactgggtaagtgttatacgattttagtcataaattgctgaaaatatgtttcaggataatgtttttcctgggacgtatcgcattgtgttgtttgaagaccggccagaagagctacctcggcctatatggaaaggagcgggaggacatcgttttaacgtcacgctttttctgtccgacaatcattatgatgcgatcaaaaaaattcattgcttcttcaaacttggtcggaaatattgcgtagactgcgagtgtacgtacactcttgacgctaaacatacatttcattgtaagagcagatgtccgcaatgtgctaaaggttttaaaatttgttaaaattttgctatactgaaatttttcagttgggccagaacaaccatgctcaaaacagcaaggcatccaaattttgtgcccggaatgtaaccgatactttttttcacaaacgtgttatgaaaaccaccgtgggtcaacatgcagagtgattaaacgttgttctctctgtaatcgtactcattggtcagataccggcgagatacacaaatgctatacaagctattgcaaacgatgcaaggtagaatattctatttgaaaaatagaaacacgcgcatcatttcaggtttatcacgcggaaaagacgagttgtttcatcaaaaggatccagataccaaaagaaaaacagcgctatcgtatcatcgtctgggatactgaaacacgacttgaacaacttgaggacgaatgccagcgtatacatcgggtcaattttctttcggcacgtattacgtgcaccgattgctgtgaatcgtcagagtcaaacaatgactgtgaaatttgctgtcaaaacaatagagtgctggagcgagaaaaagaatggtgggatgtgattgagaaaataaacttaaattcagataataggagtgaagcctatggcaatgagcagcctgttgcagcgtttgttgagtggattctgagagcgtggaacaaaaaattcaaaacatacatatgggtaagcgattcatgaacaaatttgtcttacaataaaatttataggctcacaacgcatcgagatttgacgggcattttgctctcaaccatctttgcaaaaccgcaagacgccctgatgtcgtgatgaacggactaaaaattttcgaatttcgcgtccaatatagccgaaagcattcaatgctcatatggcgtgactcctgtctgattatgccgattgcgctcgctgaattaaagaagactttcaatcttgactgcgaggacaagccgttcttcccttatgcatttaacagaagggagaactacaccataagactggaaaatcttccggacgaaagcgagtatgagcccggcacgatgaaggctgacaagtacgaaaagtttaaaaaatggtacaacgacaacaaagagacgccattcttcttgcccgatgagctaagggcatactgtctgaatgacaccgaaattctgctcaaagctttggttaaattccgccagattttgatgaatgaaattacggacggatttgacgtgctgccaattagctgtaccatagcgaggtttaaaacataaattgctcttttatcattttcattttacagcgcttgcatgaacatcttcaaggttcaattcatgcaagaggatcaaattgcaatggtccccgagctgggctatgaacgaaacgacagagccagcgtcatcgcaatcaaatatttagactggcgggcaaaaagtgaaggcattgaaatccagcatgcgggcaatggacgcgaaaaacgatggaaacaattcaaacttgatggatggattgagagacaacaacggtgcatcgaagtgttaggatgttattggcatggatgtgagaaatgtttcaaacctaatgaggagctcgtcgatggaaaaacgtgtcgtgagctgaatgaaacaacacatgaccgtcttcgccaacttcgcgagcctgacgataatgggatctgtttacaagttgaagaagtctgggaatgtgaaataaatgaccagctaaagaaaaacgacgagatgaaagagttttttgatgacttggggaatgaacgtggacctcttgaccctcgacttgcatattgcggcggacgaactggcccattgcgactatttgctgaaccagcagaggatgagaagatatccgtcttcgacattgtctcactatatccatgggtcaactatgacaccgattatcccgttggcgttcctaccgttgttcatcctagcgcagaggagatgattgtcaattggacaaaacctgagcatttaagctaccgaggtctttaccgtgttcgcgtcatccctcctcgtggactacaaataccagtacttccgatgaagattgacgaaagattgctattcagctgctgtcatcgatgtgcagctttgttccgtaaaagtttgacacggtgttcacacaagtgcaaccacacagatcagcagagggccttcactggcaacttcactcacattgaactcgaaaaagcgttagagatgggttatattgtcgaccgattttggagggcctggcattacacagaatggagtgatcagattttcaaaggatatgtgcggcaatttatcaggctcaaggtagtataattaaaaaaaatttgtatccaacttttttttcataggtggaatcaagcggctttccggaggggatcgaaacattggaacaaaaacaggagtacattgatgaatatcgacgaatttatggagttgacttggattttgggcatatcaaaaaaaatccaggactccgattcatcgccaaattgatgctcaacagcctatggtttgttcaattaagcgctcttgttagtctgtatgattcttttttcaggggaaaattcagcatgaggaatcagtttgggtcgaataaagtgatgacgagaccacaggagttttacgatctcgttttcgaccacaaaacggtattgagttttgggtatgagaataattttttcttttaaggaaatctcttcaataataccaatctctgacgcagctattcgtgtgatgtataagccaaagaaaaacttcataaccgagcatacatccagcaacattgtgctcagcttgtggacgaccagtcgagctagactgaaattgtttgactacatgcaacaatgctacaacacacctggcgccgagttgctgtacactgacacagacagtgtaattgtgcggcacaagcgcgaccttgttccggtacagacgggcgaatttttgggccagatgagcgaggaatacgcggattacgacatcttgacttttgcatgtggtggagcaaagcagtatgcgctgaagatggtccataaacaaacgaaggagataacatatgtgcagaagattcgaggcatcaccttcgacgtcaacaactctcaagcgctacagtttgaacgatttgtgcacaaagtgctcaactatggaaaagaggatgaacagaatgatgccgcagtgttcaactacaaaaaaatccagcctacaaaggacagtcggataattacaaggaagcaaaataaaagatatttgcctgtttgccaaaaaggaattatcactgaaaatctcgatgttttaccttttggatatgaatga

SEQ ID NO: 75300 - DNA, 441 bp, Heterodera glycines
atgtctttgctctccgctctccgtgtcccatacaattgcgcaattgtccgtcccgcaactcgcaaaccgttcgctttcggatgcttcgcagacggccaaccccgtgacaatgcctttgtggccacagaaaatgcgcaaaagctgtgcacgcgtttcgcccaacgcaaagagtttgatggttttgtcgtcggaaccgctcagcaatttgcaatggtcagtgagaaaagttaagcagcgcactttcatcgaatgggctgaacgggaaagaacaacaatacgaccatttccgacttggctgaacaccttcgatgctgtaaagggattggagggcgggcgaagtgagcaacgaaatgacaccgtgggaattgccaatggcgacgaattgagtgccctaattgtaagccatttgaaatgccgagattggataaaagttcaaataaa

SEQ ID NO: 75301 - DNA, 468 bp, Heterodera glycines
atggcgaccaatgacagcgtattgccgcagaggccgaacagcacgatgaatggcaacacgagcaaatggtactcttggcccgagttgtcggggggagccatttgctcggaaatgtttggctgcgtgggattcatgggcaacaatcaaatgtacggtttagtttaaaattttgccaaagtttaactaaatttataaaaattgtaattgtcatttgagtaatgtattcaaaatgccaatgcccacattggagtaacaaaaaaagaatttgcataatttatgttccatttaaagcccacaattcaataaatattggactgacacatatacactcacctctaatggacagcgaagaaaaatggaaattattggcaaattagcgaaaatttttcacaaatccgtggggaacgcattcggttaagcgttaattcaaagtcttgtcaatttttgcatttgacaagagacaataaa

SEQ ID NO: 75302 - DNA, 1343 bp, Heterodera glycines
  unsure (1)..(1343): unsure at all n locations
atgatcactgagttcgctgacgtgctgttgtgctatttgttcccgtgctgtgtggtggttgtgctcaattcggtgattgcttccaaagtgcgccgttctgagaaatgctttcacatcggtccgtcgccgactccgtccgccaccaaaaagtcctactgtacgctgcccacctcggccagcactggttcaacgacggcggcggcagcggtcgcctcggcttccgccattgcaccgccgcgtcgccagcactacgcgtcgccgaaagcgatgacgacggtggtgggcggaggggcgtcgccatctgcggacgcagacgagcggccggcaatgcgtaaactgtccacgcgcaccgcacccggcaacgtgccagtcggcgcccgaacagccggcggtgagtggactaattgattaggctattaattaatagagatgagatatttgggcacaaaaatgggccaagaaaaataaatttagagaattaattttttgagaaattatgtattcattttatagtagattttttgaaattttggaaaggccaaacaatcccttttttattttattgaatttttaaaatcctaaaaatagtcgcaaaaatggctaaaagtattacacaaagtgatttcacattctttttaataattatgctttatttccattgccacattaaatgatcaattcgttttatatttaattgattttaaaataattattttttaaaatgtatttcttattttttaaatggagttttaggctcctcctctggaaatccggcgggaacaacgcgcattctgttggttgtaccggtggtgtacattctgctcaacactccgttctacatgtttcgcattttggatacggtggcgttgaacgtgttcaactccacgatgtttcagtacgacggactgaaccgtaaccccgtgctggcatggtgttacaatgtcgcacactatttgtactacgtgaactttgcctgtgacgtgattgtctacgcattttccaggtagaaaagcacgtgtttgaatttgggagggtttaattgggagaattttttgtaattagctccaaattatttgaaattttgacaaataaattttaacttttcttactcaaaattccatgcttattcataaaattaaaataaaagcaattanattgaattaattaaccccaagttttcaaaaagtttttgaaaagcgcaccactaaaattgtcaaattttttaggttaaaattgagcctcggaattcgatttctgaaaattttggggcctgggatgccttgtataaaatgccaaattggacgcacgtttactggcgccaacgaatgaattggatcagatga

SEQ ID NO: 75303 - DNA, 1017 bp, Heterodera glycines
agcatcgaattggagaccattgtggtggaggcggtgaccggccgcggcgttcactctccgcacgttttctgcttctgctacgactgcagccaaaagccgaacaattacatcattcggattgggctgaacgagtgagtttttcaactctctcttcttttccatccaaattatcgaaacaaaaccatttttttaaattggttttaattttattgcaccaatcccaaaatgtcctaatcgtttatatatcactaatagaaagattgctgttttaagaaatggaatgataggggtacggcagtgccgaaatgattcaattagttcatcgtaaatactgaaccaagtatttcctggactgaaaacgacagtttcgtttcaccgaattaagcctaaatcaaaaaatctgtaattttatgtagtaaagcttcagactgataacctaaagataacacgtaatctgagaaacatgacccgaattgttgaaaagagcccgatcgcttaatgtgcatcaatcatttcattgcagttttttgggacaatagtctcccttttttgtcccctttttagggtcgacgaattgcccacccccgggcaatgggttcgcgttgtgatgaagcaggaagtgcacgggaagcgggtggactacagcttgtgggaggcgcagaacatgagcaaggccaagcacgagacggactttaccattgacaacggaatccgtaccgttttggtgggttcaatcgaagacaatcccatccaacttttcctaactcaaaaacatttttcccgcttctcaggtccgtgttcccctgaaagtgtccggcgatggcttctacaaccaattcttgggcccagtttcggacatcaaacgaaggtcacgacatcccctcccctctttctaattttatttggatttttaaaaatttcaaaatttagacttaaaatcccaaccggcaaagaacgccgatttgtcagcgcgtggtgccgcaaagtgatgccgttgagcatatgcacaatggatgg

SEQ ID NO: 75304 - DNA, 1224 bp, Heterodera glycines
tttgtgggttctcgttatcgatcgcagccaacgacgaccgagggacaattagcgaagggaacgacgccgccaatgccccaaacgtcacaacagcagcaaatacagcaggtggagggggtgaggaaagacaagaatggaacgaagtgggcaatgcttaaattcgtttcccacccttttagccaatgaccatcagcaaaccgaaccagcatcacaacgccaacaccggtggacaccgtgccaacgccagcttgtcgccggcgctgggatcctccggtttcggctcgtccgcctccagcaacgcttccgcccaggtcgagcgcgacctgatcgacctcttcgacgagaagtgttcgattgggccgccgctcaaatggacgccttcccctcctccgcttcaacagcaccaggtgtttatcagattataaagatgacaacatgacgtcaaagatatttgacgacaagaaaaatgctttgaccttttgctttattttaattctcatacttttttatatttgtttcgtttggaatgttttatttgtttcatatgataatccaaacctattagcataatgagtataaaattaaaattgcgagagggattgacaaaataaataaataaattacaattcccattcactcccgttttctgtcagcttatcatttttgtaatgttgcaacttgcaatctgttccagttctccggtgtgatgtacccacacaccggcgtaatagcctccatggacctcaaatccagaggctactacgtctacagcaacgagttcgacaacgaactctacctgttaacggaggagttgctggagaagggaagctggattaaatttaacatcctgtaagatagggaatttgggaaacaaaaaatgcaaaatttccctcgattcagcgacgattattaccgcttgacgattggacagtacgccctgctcaaaaaatcccccttcgacgtaagagtcgaaagaaacacaatttatgtgggttttttcactgggtcttgggttaagtttgtcttgatatattgatttttccagatgtgtgtcagcgcgtacattacccccgaggcactgacgcaacgtacaatcgacacttcctacgtcaaaaatgtaaaaaaaaatcgattttttttaaatgtaatgaaatgatttttaaggtctacgacagatgccgcttgcttcagcatgcgcatgttgggaaggagctgaagctggag

SEQ ID NO: 75305 - DNA, 311 bp, Heterodera glycines
  unsure (1)..(311): unsure at all n locations
catgatgaacccccgattgagctgccgcacgagagcaaaacgaccttcaaaatccccgtatgttttctctcttcttttcctnttctcccaatcgatcgaaattcgagtttaaataatcccacatttaacggagcgcaacactgtgccgtttgaaattaatttctaatcggaatgctaacaataagcattttactaatgttgtttttaatggtatccgttatccattcctctaagcatacatatgtatatgtatttgtttttaaatttaatttaattttttattttactttattttcgtttaactgtaaatt

SEQ ID NO: 75306 - DNA, 385 bp, Heterodera glycines
atggcggaccctccggcactgtcgcgtgaccgtccgcgcagcgtagtctctaacattgagcacggcgtcgtgttgcaccaccgccttccccacgcgacgaacacagcgggggtaaaagcatcgccaaagattgtgctaattttagaaatttgataaatgttcaccatttgtcctattccagcagccttctccactccatcatgctcaagcagtcgctgcaacaccaccaccgccgtcgtcgtcggcggtagcgtcggcgttgttccaccaccatcggtcgccacaaaatgttaccagcagcaacagtgcatcttcactgatgacaatggcggcgatgatgcaccaccagcaacaacgacaacaacagcaacagaacagcgggtga

SEQ ID NO: 75307 - DNA, 965 bp, Heterodera glycines
atggctaataactcatcattatcatctcctttaccgcccgccgacaaaagttgtattgatattgagacagctttgttcggttctaattaccttgtcattcatattcaactgtttttgcttggcgttgtgctaattgcaatttgttcattgatccacaaatacaacaaaaattgcatcccaattcataagaatttaaaggtgaaagtttcttttatttctatggattatacggtaaaacccaactcgtactgttattcgacaaaaaaatcgtcaattttctcatgtttcaaaaaaaaagatgaccaaaaattgtaaaaaaaaatttcgtctttatcttttttgaaacaagatcaattttttttgaaaaagcaatgaaagattaacattaatggctatcgaaagatgcaaaaaaaaatgtttgaaatttttcatgaaaaattgtttttaacccaaatttttgaatatttaaatacataattattttttaagcttctacttgtcaacaccatcattctttacattattaattcactggtttggattgtcttctttttacgatatcgggtaatcccaaagcttttttaaaaatttaaatgaatgcttattaaaaatgcagggattttaaaaataattttaatttttaaatgcttattcagattcaaatgttcacgtataaacatccttgtgactttctgagccccgtttggatggttccgatgtttttgggaccgccaaaattgtactccatcgcttacccatgttttcattttgcaattgcatttgaacgaatacgttcaacctttttggccaaaagatatgagcgaatgggcacacaatcgactgtaataataatttggataattgtgagttaaatacaataataagtagagcacgactaaaaagtcaccaaaaatgcgaaaaaggcactataataggcaccaaaaatttgaaaaaaaggcattaaa

SEQ ID NO: 75308 - DNA, 269 bp, Heterodera glycines
atgaatattaaattctttttcaaaatccatactaagattaaatcatttttgaatttcaactatttgacaaatgatcgttttactgttttgccttgtggcgctcctcttcagtacgatggccatgacaatcgacaatggccgagacggaaacggcactttggaaaacggtaccacctctggactagagatcggaatcagaacagatttacaaaagccaacatggacaaaactcaagaatccattatttcaattgctttaagcttgcccag

SEQ ID NO: 75309 - DNA, 228 bp, Heterodera glycines
  unsure (1)..(228): unsure at all n locations
atgcaagagactcacattgttctcggcattgcctcgctttgctctctgctggcgattattgtcaccgtagtcactttgccatcgctgtactcggagatgagccaactgaacaacaaagtgcgcgacggcgttcaagtaaaaacaattttaaaaaataccgtaatttattaccgtattccccaggncttccgcgtcaacaccgactcggcttggactgacctgatggac

SEQ ID NO: 75310 - DNA, 580 bp, Heterodera glycines
atgcttctttatttagttgccttggcattgctttgccatcgtaaggaatgttcggatgcttttgcctgtgccttcggttgggacatttgcgagggttccttttgctacattcgtaataattagccaaatatttgcccattatctattgttttgttcacttttcgccagttcgacttcaaaatgtgactaacagtggtcactttttgctccgtcgcggctgtttcggcagtgaatccccgcagattcggtacaacaacgagttgaagccgttcacttcgctgaacgaatgccgaaagatgcaagtcaattaaacatataatggaagtgatttctttttcagtttgtggaaagacatcgaatatttattgggcatttgtgcggacagcgatttttgcaatgtttgcaattattggagcgaattggcagccgaaaagtcggcggccgttggcattatgcgggcgggtggagagaacactttgaggggaaaaaagttgctgatgggcacggcggcacttttgccacttttggcactttattttattgacaaaatcatttaacaaaaaccaatttagataataaa

SEQ ID NO: 75311 - DNA, 131 bp, Heterodera glycines
gtggtggacgtccaaaattatgtgatggaaaagcacccgttcagtgggcaattccacgaacatgctcaaaaggtggtaattccgaacattcggcgactgattgaaactgcgcgccaattgaaaattgaagt

SEQ ID NO: 75312 - DNA, 1112 bp, Heterodera glycines
atgacagaaagtcgttgtcgcatttgtatcagtgcggcacatgacaaagagatgctggacagagtgttggatgccatcgacgaagttggcgacatcagtgccaccaaacattcgcacagaacgcaccgttaccgccaattggacgtgaaatggtgaacaaagaaaggggagaacggacacacgagaagagaagagacaatgacgggaaataaacaaaaggaccgacttttgccttattttatgttttttgttagatcatccgttgagttttgctacgcatttctttcacgcgaacttttgccattgccttttcttgccgaccctttcctccctaattttgctcatcactttgcttcttctaatgccctccctccccctttcgtctgctgattgtttccctccgccgttcttcgccctcgctttttcccactcgtcgaccttttttaattgattaattgcttagaaaataaaggagatgaaagcaaaaataaataaatttgttagtccttcggatgaacgaacatatggcacttttggtgctctttgggcgggagcgtggaaccgattcattcctgatcactttgacaaaataaaatgcgcctcctccgtttcgctgttctgttgatcctttccctccaaattgcggagatcattgccaaaaagcccaaatattgtggtgaacgctttgccaaaatgcgggataaggtgggcgacacggcacaaaaggggagacgtacactttttgccttcccccacttttcgctaggtttgtcgctggcccggcgaacagcagccgtgtcttcaactgcaccacagcatcagtaaaacattttacgcacagcaattcttccccccccccctaaaaacactaatggaattcccctttttcgagccttggaaatgctagtgaatttcgtcttttcgggggcacaaatgcctttattaaccaaaatcagcttaaaatccccgcgacagaagagcgtgttcgtacgaagtgctgtgcggagggctgctccctggaggaaatgaaggaggaaatgtgctgcatgacggacgcatgcctacggaggtgctacccgggaaaaggctaccgactgggctccgtttactga

SEQ ID NO: 75313 - DNA, 467 bp, Heterodera glycines
atgtttttcattgatatacggtaaaaaattaatatcacgagcaatagaacttaaaccaaagccaaagaaattcgaaaatctggaaaatggaattgaaaaatcttcaatgcttttttagaattttagttttgattgttgaataaatagtgaaaataatacattttttgacaaatcaaataaaaagggattattaattttggaaatatcacctccgaattccaaatacaaaaaaaagggaagagctcttggtcaaatggcaaatttttctagcaatatcctaacattttagccagtttgaggaaaaaatggtttatttggttatacaatagattaaaaacaaaacatacttcaaaaaaataggtgctgatcgaatttgctgtatgaattggattttgaatttgtcaaatttttgttgtgcatgagtttcaaaataattacctatccaatttggactaggatttaataaa

SEQ ID NO: 75314 - DNA, 859 bp, Heterodera glycines
atgcttgagaatagagttggccgagtccgggtatttgggcaaaaatcgggtccagaaaagcggggtccgagtccaagtttttcaactgggtatccgggtatgggaccaggtcaggtacccgaacccggccaacccttgtattttaacaagaaatttgctttctgctgcacaaaaatgcaatttccacaacgcaaaactgagtctgagtccgtcgatgtcgggctggtgttgacggaagctctgagcaacggtgcggaaccgttcaaggtgcgtataaactaggaatggcataaacccatctcatcataaccatacccaacttagccattgtccaaatttgtggccggaggagtgactgcaattgcgcctaaggctgtggatggaggagtgagtactattgcgtctaagttaattgatttgacttataaatgcatttaggtgccaattgtgccgttctatgcgctccgtgacaccaagcctggcgaggaagaattgtctatggactacggtacatacaatatattggggtcccagggacgtagttccgaagaacgaaattggaagtcggaaacggaaacgacccaaaattatcggaagattgagaattaaggaatttcttttttccagtgcaataatgctagctagacttctgaaatttatttttaaaattttgtataactgaattgcgaattctagatggaggagtgattgcgcccaaatctgtggacggaggatcgataatactgttaccagtggtcgccataaaaacggtggagggataaagcgataaatttgatgggctattagctatgattgctatctaatttgttccttttgtcattttctggtggaacatcca

SEQ ID NO: 75315 - DNA, 295 bp, Heterodera glycines
atgtgtagcgataaacagttacctgaacataaatcgaaaaaatacgagtatattattcaggcaatgtatggtatatttattgataatataaaaggttagggatgtatgaagtattttttattataagaagtaaaaaggttaattgaaaatttaatcaaaagttttttgaccctaccctttttaataaaatttacgtactaagtatatagcttggattttgatttatttaaactttattgcttacctatcagttcgtcactgagacataatttttaaaaaatattgacaaatttca

SEQ ID NO: 75316 - DNA, 474 bp, Heterodera glycines
ttcgcaaaaaatctcgaatgaattctcatttttaaattttttatagatttttaaatgtttggattttttttaggcttaccaaaacttcatcgaacctggctctttctattctcattcaaatcgccccaaattttttttacagcttaactaggcccaattaagcttatttccagaaaatctcgcatgaattctcatttttaaattttttatagatttttaaatgtttggattttttttagtcttaccaaaacttcatcgaacctggttctttctattctctttcaaatcgccccaaatttttttttacagcttaactaggccctattaagcttatttccagaaaatctcgcatgaattctcatttttaaattttttatagatttttaaatgtttggattttttttaggcttaccaaaacttcatcgaacctggctctttctattctcattcaaatcgccccaaattttttttaca

SEQ ID NO: 75317 - DNA, 369 bp, Heterodera glycines
atgaatgtgatagaaaaggaagaaaaaaagaaggtgagagacaaaagagagagagagagatttaaaaaaaagaaaaaattagagaaattggtagaaaattcaaaaagcggggaagcattatatttttatttattaatttatagcatttaaaacattgttttttcaacatatgtattaccaaccaaaaaaaaaaaaaattttttttaaagtggcgccggtcgcctcatcaatgttttgagaggtgtataagagcaccaacaagtaaaaatgacgatgagttgtggtgtggaagtgtggtgactgatcagtcgggggaccgctaatgaggggggctaatgagattttttgtttgactaacgcgctaataaa

SEQ ID NO: 75318 - DNA, 306 bp, Heterodera glycines
atggccgccactgatgcgtcattattatcatttgcatcgacggctggcacaaaagcatttgtcgcagccgccggtaagggcatcgatggcattggaaatggtggcatttgggccaacgatggacaaacggtggcacctgtacaaaattttattttgacaatgcttggcaatttcgttgaatttaaaaaaattaaaacccattctgtggtcaatctgcgctgatcagagaccaatcaaagataatttcagtgctaaagaaagcatttagaccaaaattataaatgatcacttttaccgacaaataaa

SEQ ID NO: 75319 - DNA, 1214 bp, Heterodera glycines
atggaggacgttgatcgggacgaactcagcgcagctgcttcacaaactggtgctgctgatcaacatgcttcgacagcagtgacaggtgattttttgaataagtttgggtttacaataattaatcccttctgatcaatcactaataaaatgatcatctgatcagtcctttgaaatatgcattcaaaaaagagtaacatgagtccattaaaaatgtatgccttgatcacttcctaccaaaattgagtcctctgataatcagtcccctcaaaggcgagcccctgatcagtcccttcaaaaatacatcccctattcaatcccctcaaaaatcaatccctccgatcaatcagattactcatccacccacgatgatcatctgttgactgcgtcctccgcttcgcccactatttccaccgcttcttccgtgccggaagatgataatgatagtggtgctgataatgttcctcctccgccacctccgattcatccatctgctgcttctccactggatgatgatcactcgccgccgttgttgtcctccttgtccggctctcagttagccccatcgcctatttcaccgccacccatcgtcattctgtcaccatccgaaggcaccgtcgaattggttggtggctgatgggctggcctagagtcgaaattttccgagactcttgagaccccaaaaaaccgcgaaattaattgagcccgagagtcgagaccgagaagctcgagcagccctagtgggtgaagacggtgtttgttggattacacaacgctctctcacttcctaccacaattgcccataatcatcaataaatagatgtagcaaaaaaatgatcaaaaatgctttttcaccaggaaaatccgactaccgtcgtgccgcaaccgtcgtactccgttggcactacggccgcaacggcggcaacaaccgctgatgctgccgccggggacaattcgtcgtcgtcgccattctcgccagttgctgttgagttgacggcatcacaacctaaattgccagaggcggcggaaccatttccaagcagtagcagtgacaatgcgccgcgagtcgcggcggctgcgcaacggtcgccgagtgccgcggcggcggacagcgacggcaacatcaacatgaacaacgaggcgaagaacacgcacgcggtgggcgagctggacctgaagtcggaccgcgaattggccaagctgatgcgacgcacaac

SEQ ID NO: 75320 - DNA, 817 bp, Heterodera glycines
atgctaaaccaaaaggacaatttcacattgaaggagcttaaaaatcagacagatgaagagaaacagctttttcagctcatcaatgaaggtttttgctcctgaatagtttatgtattttttatttgtttgttttcgttttatagacaaaattgaggaaaccgaggaattggttaagagtggcaaagtgcgtgtgaattcgctggacaacagcgggatgaacgcgttggaccacgcgtgtttcaagggcaacgaagcgttggtcgagtttttgcttgaaaatgggtcggactcggacaaccgagcgcactcggacggatacacggcactgatgttcgcagcactcgcaggtgtggccacaagctattaataagcatttggtttgggtcattttactttcaaaatttccctatgggatacatttaaaacacaaaaaaattttaaattttcaaacaaaattatggagcatttaagcacttaccctaaaaccgatccattttaagaactgtccatttattcttgaaccttcttaatctataatccatataaatataatgccaatcattaattgctgaaggtaacggccgaatatgtcaactattgttggatgctggggcaaatgcgcatgcgcagaacaacattggtaaaacagcagccgaactcgcagcttttgtaggtcggaactttttaaaccgattaattccaaagtcattttattttcgatttcatatcctttcaaatttcagtcggaaatattccggtttgtctatcttcctcgagaaattttgggattttttaaaataatttacctgacaataaa

SEQ ID NO: 75321 - DNA, 533 bp, Heterodera glycines
atgggaatcgtacttgaattgcaagtacgtacttgaaaatcggccctaatgcaggaaaatatgaaatttgcttattttcaagattgtacttgaaaaagagaattcaaaaaaaaaatacattcaaaaatttattattttttgaaatttacaccaatttttttattaatgccaaaaaataaatttaccaaaaaatgtgtcggaaacaaaaaagaaaatgttggataaactttttttttaaagcgtgccgaaaaaagtgcacatgcagcgaaatgggattggaaaaaccccattctggcgcaaaacacaaacaaccatctgaataaacagttacccctttttcacatgttattttttgcgtacttgaattttatgaaattttccagttgtgtacttggaaatcagtatgaccgtacttgagaagagtgtttggacgatcccaaccagggctgtgcgaaaatcacaaaaaaattttttcgtatacgaaagcgaaacgaaaagctcattcgatacgaaaatgaaacacgaaacgaaaa

SEQ ID NO: 75322 - DNA, 4450 bp, Heterodera glycines
ttttgcgcctcgaaagtagctgccggcgcagatcaccaccgggggagaagcagtaaaacttgggggtttcgaaaataattttttggaaattccgaaaaaatttcctggcataatttttaacattttaaatttattttattgccatttttgtttttaaggttttttcttaaacgaattttttggaaatttcgaaaaatttcctggcaaagtttttaaacattataaattttatttatttttattcctatttttaattttattttttcaaccattattcaattcatatattattccgtcatcattcaaaaaggtgaaaaaaaaattcttcgtcaatttttcccacgctccgaagaccccaaaaaaagggaaagaaaaaaccaatgtttgaacagcgaattaattctcgaaaatttattcatttttattgtctgaaaattaaaaaaaaattgtttttttccgtcacagaaaatcgctttaaaaaattatgcattttttgatttgaaaaattatgttccccggccggcccatctgtggccagtgcgggtgcccccgctcctccagcacggcatcattcagaaacggcagcgaactgcttgaccaagtggtctatttgtaaggaaggcatttgctaacctaaaagaaatgtcaaacttcttacaatgtgtaagactcaaagggtacaaagtcgagaattgaattgtcgaaaatttttgaattagtttctcgagtgaccgaaaatttttcaagattcgagatccaaaaaaacacacgagtttttctcgggttgagcaagactcgagaccgagatttaacccctgagacttagacgggactcacaaatccctggaaatcaccaattagagttagtgaagggagagagagagggttttgcctcgaattaaaaaaaaatccaattttaaaagtggaagacactgaagggaacgccaaagagcgttggaaattttaaaatgttggtattcaaattgcttagaaagcaggcaattcccgagagaacttttaaattcgtgcagtaaaagaccaggaatcagacaaagatttttttttttcggaaattctttgaaagttataaaaattttgtttttaattttttggcaattcatgtcggagggtgggcgagggcggagggggacgggctgctctccccagttctgaaggcattactgtatctaactgaaaacagcggcatactgtatctaatttataaaattgcataattgctttttctccagccacatcaacaagcggactcagtatgagcggccaacttcgctggtcatggtgccgtccaccaagcagcccatctacgagccgtaccagcaccaacagcagacggcaaccacctccacggcgccgccgccgccgaatctccaccacaaccaccacgagcgattggtgtccatggcatcgacggcaggtggcggcattccattgaacagtggtgccaataatggtagagcacatgccaattattacataaatgcacatttgtagagatagatagatatttgacctggacctgggtagtagagtctggaattttcaaaaaacccgagccggattaggggtcacgaaattccgagatggactcggacagatattctgggtttgagaatttacccggattttttggtgtcgtagctttaggcttggcctaagctttaggctaggcttaggctttatttgtaaattttttaattgtatgaattgtcttttgtacgagttgccattgactcgatttcaatgggcctgggtttgtcttaggctaaatatgaaagccatttgaccagccattgtattgtccatcatgtttttttccaaaatgccaaccgattgctcaagaattggtatttttttactcgagacttgagattttttcctaatatatttatttactttttttttacattggcaggaatttatggcaccgccgtttttcacaacaacggcaccggcgccgccaattattatcagcctcatcagcaggatcattatgatagtggcggtggtgctgggcttggttatcagcgtcagcagcagcagcgaattcatttcacgcgaaatcccggcgaactttgtggtcagttcaaaaagcgcgggaatttttggcgaagtgttttaatccccaccccaaaaaaaggcgacattttaaatgcccgtgtccaaaaggggcccaaagggctcggcttcacactgatcggcaacgatggcacaaatttgcacgacgagttcatccaggtgtggtgggagaagctggttttattgcattacaacaaattaaggacggggtgggcgtgtccttcctttcaaggacagaaggccaattatccttatttgtagggccacaaatccgtttattgaattgtcagtccttttcaaacactttaaactcacataggcaattaaggaccgggtggtgaagtgcccttcctttcatggacaaatgacccgcttctcctttttgaagagccacaaatccgtttaattacccttccttttattaatgttttaagccgcctctcaaaaatttatgaatttgttttaagacttgcataaaccaaaaattgataaatgtcccagaaactttttgaaaatggttgagtgtgcggcattcaattgccattagtgttgtattgtaattaatcaattaattatgtcggttcaaattgccaaattattttggatcaaaacaatcattgccaatgggccggccgctgcggagggcacactgcgctcgggcgacgtgctggtgatggtcaacgaccggtgcatgctcggcgccagccaggacgacgcgtgccaagtgttccgtgccatcaatgtgcgggcgggcgggcacattttttttgagggggggtaattaggcattaattagtgctgctaattgattgattgattgcccctgacccataaattacactcaatgggcatattttgtttggcatcaattaaaaaaaaattctttcatattttcgaaattctaatctaatacaaaagtatatccttttgtaccttattaacagtacgttacagtacactgtccataaggcctacagtattcgggaatgagacctttgtgaaaaaaaatcactagagaactaaatatttaattgtacggtcttgtgtggtcactgtagaataccgtaatacgcttggaaataaacggtacttactcgctttaggttggtgaatttgtccgaatccaagtgtgccgtggctatccccttcaaatggacccgacaaacagggtaaaacacacaacggcattttttttgcaattgatttaaattttaaaaaaaaaattaaaaatttgaattttaaagattttcactgaaaatgtttacgccgccgcttcctccgtccaacagcagcaaaactgtagcaacagtaaccagcagcagcaatacaacaaccatcagaatcaccaccgtttccgtgagcaacacgtggtcgagctgtgcaagggccaaaagggatttggctttacggtgtacgatgacgcattcggtgggtacggtactgcccaagaggcggggatcagggatggacgaaatttcgtttcgttttcgtttcgtcctacattttcagcactttttgagtttcgttttcgtgtttcgttttcgtccgccaaaattttttcgtttcgttttcggttttcaaaattttatttttcgtttcgtgtttcattttcgtatcgaatgagcttttcgtttcgctttcgtatacgaaaaaatttttttgtgattttcgcacagccctggttgggatcgtccaaacactcttctcaagtacggtcatactgatttccaagtacacaactggaaaatttcataaaattcaagtacgcaaaaaataacatgtgaaaaaggggtaactgtttattcagatggttgtttgtgttttgcgccagaatggggtttttccaatcccatttcgctgcatgtgcacttttttcggcacgctttaaaaaaaaagtttatccaacattttcttttttgtttccgacacattttttggtaaatttattttttggcattaataaaaaaattggtgtaaatttcaaaaaataataaatttttgaatgtattttttttttgaattctctttttcaagtacaatcttgaaaataagcaaatttcatattttcctgcattagggccgattttcaagtacgtacttgcaattcaagtacgattcccatccctgtattagaacaatattttagaatttgatttgtaaatagagaaaattatagaattcaaaaacaataaaagtaatattaaatattaatgcgtaaatttaaattatttaattaataataacaaaaatttagatatttaaaatattgtacttatacttaaatttattttatatttttattcaattattttttaataattataaattaaattcatttaatttaaaaattatt

SEQ ID NO: 75323 - DNA, 1131 bp, Heterodera glycines
atggaagcatttaaccctgatacaaaaatttgctttaaaattgaccaattttcaacatttttccaacaacgaactgacaccaaaaagcgttaccccaacactttgaataatggccaatttgaaataaagtgccatctttcttctgttgacatccgcgacgaagcgcatggtgcgctttcaccgataggaattcgaaaggcattccgaattgcactggaatgtcggggacatgtaaattaattttatttgccaaattatattttgcataattaatagagaccgcaaaaaaaggcaccaaaaatcgcgaaaaaggtactataataggcaccaaaaaattgaaaaaaaggcatgaaaaggcacgaaaatcccgaaaaaggcatttaaaaaaattttctaaggtttttagtgagcaaaacacgtaaagctaaccaaataacttaattttggtcatttttaaagatttttataatgtttttcgaaaagaacaaatttgaaaaccaaaaatttttaaagaaaaaagatgaaattttggcgaacaatttttgagaaaattttaaattcttatgggtctattttctgaaaatttttcaattcttaggggtgaattttcccgattttattgtattttttatggactttttcgaaagaaaacggcaaaaaaacaccaaatcggaaaaaaagccaaaaaggcaccaaaacggcaaaatgccaaaaaaggcatttaaggcacgaaaatcccgaaaaaggcaaaaaaaggcataataaaagtcaacgtagaagcctcaaaccaagtggagaatgcgttatttatgcttaatatatcgaaactagtgcgcataaaaaaaggcatttgcctcaaaatgcggtctctaataattaaattaatgtttgtgaataatttatttatcttttttctaaaatttaatgaaaacaatttagtattgtcaatggtctttccctgtggaagtggccagcaccaccgacgactttggaaatggcccatataactcaaccgaaacaaggcccgtgacaattcggttaagcattccaatcctgaaattccgtacccggagggattgcatcgaaacgcttttggtaatttaaatttaaaaaaattaaagtttaaataaa

SEQ ID NO: 75324 - DNA, 1554 bp, Heterodera glycines
agtcaattagctatttattctttttgtatttgctggtgacctttctttttcatgttcccaaaacacatgggcgttcaactgaaagtaatggagggaaaacttcgaaccgtcgatttggtcattgaagtgcatgacggtcagaagaaattaaatttagtgtaacaaaatataattttaatacggaatttcagcccgggttgccctgaccggaaggaatccttcgttcggtgccaaattatattcagtgcgaccgcacattctcgtctttaacaagatggatttaatcaacatgaaacgctacaagtgaggcaccaaaattggttttagtttagtataacaacatgatcgagaaaattaaaatttgtaaaggccagtattgtctttttcgaggctttgtttaccggtgattattcgacgtttttcgcatttaagggaacccatcgaagagtactaccggaatgagcagaacattaccaatatttgctggacaaattgcaagaatttgacaaacaaaacgcagttcaaaatttgatggacaaaatgttggatttgttgcgaaatgaacatcgcttcaacagaaacagtgaagacggaatacccagtgatggttgttggtattccgaatgtaagtgaaacgggggggggggctttgagttgtccttcaccccgtccgaacaaaaaatgtcacaatttactttgctctacaaaacttttctgtcttagatagctagagaaaaattttccaaattttttttttataagattgatttttatataattttaaattcgtaacttttttataattgtttagaaaaattgtccaacttgtttggcaaaaccttcaaaaagattgaattatattttgtttttagacaggcaaatcctcgttgataaacgcattacgcaatgtgaatttggactttggaaaagctgtgaaagagggcgcgaggcccggcgtgaccattcgggtgcaaaaccgtgttcgaattctgtgagcaagaaaaacaatagggattaacctttaatttggctttcccagcgatcgtccgcccacctatctgatggacaccccaggagtgcttaacccatggtaattatgacattataccatttaaacatccccaaacatttttcggggctaacaacattgacgcggcgatgaaattggccatttgcaatttggtgttggatacgaccacacggcccaatttcgtggccgattatttactctattttatgaataagttcgactatttttcttttttgtctatcaatacaacctttgctttaaattttcttaagatatcgcgacttttcctacgtcgactttctaagaatcagagagccatccgacgacatcaaacaagtgctcatcgctgtttctaaactgagaaactgtatgtccaactcatacaaagtgcccggcattgaagtgacttgggacttacattcggcagcattacaatttctgaatttgtttcgcaaatatgcaaaggacccctttttggacagggacttactgtgcgttacaatactttttgactaaaaaattta

SEQ ID NO: 75325 - DNA, 1241 bp, Heterodera glycines
ttttcaaaaaatttctatatattatgaaaatcaaaattcgggcattttgttcggatggcattttccgttgtgtgccaatgccaaaccaccggggggtccaactttgagcagttacgcttttgcatttgctttctcctcccattccttcaaagtgtcccccggggtctgctgatcagtcgctcctcgctttccgtgcactgactgtctttttgcttctgtttgcactttcggtccttttgatgggaagaagccgattaattttttgtcggtttgctttaacttttttttttgaagaggatgactttgattgagttgaaagccgaatcaatggatcaatggggtcattataagcaatttcaacaaatttttaatttaaaaaatgattccaattttgaccaacaattaatcatcattttgttgtttttcccctaattatttattaattgttaataaattttgtgctcattttcaaagcgaacatctgctgctccgggatggtttcaatcagtagaaaagtttgtttaaaataagccgagttccactccatgagcaattttacggctcgataccacattgttgatcctaacttcttattcctgggggggggggtcgcgtatgcataggtttttcttatattaattcatatcagtttgttgcttatgctcaacccacacatagatgtaagaaaatctctttaaaaattttttttgaaaaatgttagaatccgggttcggggttcagaatcggtcaaaaataaggtcggattcgtgctcagctcagtaaaatagccctagaaaaatttttccatgatttttaaagaaaaaaaaacgggaccagtaaactccatgattgccaaaaaaatggggaactctttcaattatccatccatttctaggtatactggtcattactttctctcggcacttctttattccattttccttggaccttttgcggttgatcgcttctatttgggttattcggcgattgcggtgggcaaattgatgacattgggaggattgggtaagttatcatttatcagcaatgtcatttcaaaacgaaaatattttccggaacttcctttgttttgatctttcaatttttctcccaaaatgcttaatattgtataatttttccttcaaaagtttgtttttgcaggtgtttggtggttagttgatattttcttgctgctttttggtcatttgaagcccgctgacgagtctgagtggcagccattttga

SEQ ID NO: 75326 - DNA, 650 bp, Heterodera glycines
atgaatgacggctcctgcaatcacatgcaatgcgttctgtgccatgccgagttttgttggctttgtctgaaacagatcaacgaattgcattatctcaggtcgtttcattcctccattccaacaatttaaaatgcttcttttcagtccaaccggttgcacattttggggcaaaaagccatggactcgcaaaaagaagttgctctggcagatcgggacactgatcggtgcaccgttgggcatcgcattgatcgccggattggccgtgcccggtatgcaattggattggttaacccatcattttttcgttttttgcaggaataatttgcggagtgcccatttttgtcggaaggtttcccattttttatctacaaaactgcaattgctttttttccacccgcaggaaagtctaccaacgctttgaaaatctgtccaaaatgcggcggcgttttgtcactgcgttggccgtgttcggttcgctcattgtttcgccggtgctcgccgttctgtccgttggtgagtgccattaattagttcatcaattggaccaccaatccaagtttttgattggttggatgaatatttcttctgcatttttcaggtgttggtgtgccggtcatgttagcctatgtgtacggagtggtcccattgtc

SEQ ID NO: 75327 - DNA, 363 bp, Heterodera glycines
atggagtcggacaagcagaaaatggtgccgctgacggacagtgggactgaaaaggacggcggcggatgctccgccagtggccatcggctgacgaaaagcctttgcggcaaagcggcggatgagttgcgccatgcgcacaccgatggcacagatgggggcggtggtggtggtgccgaccgtgaccatggcaccacgtcgtattgcgcggtaaatatcgagaaaggcgatagcagcagtagtggcacgggttgttgtggtggtggcggcatggcgtcaattggcaaggccaatggctgcgttggcaatgtgatggtggctgaccgtctgtccatcaaaagtggggccagcagcacttcgtcttcg

SEQ ID NO: 75328 - DNA, 136 bp, Heterodera glycines
cccattccgagtcccagtgcaatttgagtgtgggcaaacagatgaaggcccgggaatgccccgtctgttacattcgacagcaccccaccaatttccacaagctccaaacctgctcgcatttgacgtgcaaagcctg

SEQ ID NO: 75329 - DNA, 267 bp, Heterodera glycines
atgatttcctccagcaacagcagtgttggcgctggtggctcaaaatgcttgaaaaatttggacattgtaatggaaagtgcggacgaaggccaggcactgcttcaagacaaccccaacaacaccacaaccatcacttccgtttctgctgctgatggcattccggacggtgaagggacatcatcatcatctgctgaacagcaacagccaaatcgaacggacagtgcccaagcgcaacatgcacaaccgtcgacgacaatgctcaaaatg

SEQ ID NO: 75330 - DNA, 1384 bp, Heterodera glycines
atgtaccataagaaaatgccaatagaagagtgcgaggccgcgaagcagccgagtcacagtaggttttatcattcataattttattaaaaaaatcgcactgcctagcttgggatgcgccgaaggcgctaaatgaggacaaatcttcaatttcggagcttatatgtttctactttaaagaattttttgcattaactaatagaataaaataactaacgtgacggaagcggtcgcgacagtgcttcaacttccacattagtgtgccgtggccggcttcgtgccccgagactcgcgctcggccttgttcttcttgccctgtttgtagaacggccgctttaaattctcttctttttaccagaaattctttgcaactttttaattgctaaaattacttccgagcaattggatagtattagaggtcaatttggtcggattttttcgcgttttctattagaatatttatccaaaaaaccggtcgaagaatttttcgattttttggtgtttttcgactttcttaccagacataaaataaattcacattagactagtaattttttttattgcaaatgaccatatttccacatttcaaacaatttatatatgtacatattaccattttttgataatgcttgtttttcaaattttttcttttttcacaaattttctttattatttcgtcttaatacacatccaaaaaatgccaaagaattcgttgagattgtccccaacttataagcgatggcatttccaaccattgggaccaagccgggtcaaatgccgaaaccagcacagtttttaattattttttgatgcagaaattcggtgaaaattctggggcaacgaaactcaagaataattttttttcaaaaatatctgcaacaaaatactatgcaatttagaattcgttcagcaagaaccagccaaggaatcagaatcgatttgacttatttagaattcgttcagcaagaaccagccaaggaatcagaatcgatttgacttaaatttattatttacaaaaccgtgacaataattttttttcagaaatatctgcaaaaaaatatcatgcaatttagaattcgttcagcaatgagaaccagccaaggaatcagaatcgatttcactgaaatttattatttataaaaccgtggcaataattttttttcaaaaatatctgcaacaaaatattatgcaatttagaattcgttcagcaatgagaaccagccaaggaatcagaatagatttgacttaaatttattatttataaaaccgtggcaataattttttttcagaaatatctgcaacaaatactatgcaatttagaattcgttcagcaatgagaaccagccaaggaatcagaatcgatttgactgaaatttattatttataa

SEQ ID NO: 75331 - DNA, 944 bp, Heterodera glycines
atgaaaattgtgggagaagcattaattttttcacattggaagtgccatttttgggcaatggcactattatgcctttcattgcttggccaactgtgttccgaaacagaagctgctgatgacagtgccaaaagtgagttttttaaaaaaatttcgcgcttttccatgtccaaaaatttcaaaaaaaattcctaaatttctcctagccccaaaattatttttttgtgacaattttatggtttttctgagcttaaaagtccattctctaacaatagaccctttctcccatgggtggccattccgtcacaaattagcagctaaatgatgctaatttgattagcgtattatgtgcattattttatttatcggcgatcgaacggtccattgatcacacgcattaattaatgatcgcaaattaataaaaatagaaaagaaaaaataatagaaattgtgcaaataatagaaaatattttataattgtgaaaatatataaaatcttattaaaaaattaattaatattttccatttaatttttaaatttcatccaaaaatgtaatttttaaatattttcaatattattttattttttacatatattatacctacataattaaaatcaaaacaatttttcaaatttgttagtgccatttgcgcaatcagttcggcgccattttcacccaattggtagtggacgtccgacaattattcaacatggccacaacaattttcgtgatgaaacggtggaataaaaataattaatttataaaaaatttaaaaattttggaatttttaaaatatttaacaagaaaaaaatagaatgttgttgccgcttctccgattcaagctcctcatcagcagcagcagagttttgcggtagccgcgcctcaggcaaaaaaaaaataatagaaattttaaattgaaaaatgtagaaagatttaaactgagaa

SEQ ID NO: 75332 - DNA, 64 bp, Heterodera glycines
cccctcattcgtaggcttctcctcatgtggcgttcgattatggggcgacaaagcttgctgcagc

SEQ ID NO: 75333 - DNA, 701 bp, Heterodera glycines
atgttgccaaagtcttctcattttgcctctctcagctattgcaccaatgatgtggaaatcttgatgcccgctctcgtcgcgtttcgccgggaattcttcgacatttcgcggcgccaagaatacgttgatgggattgacgacaaggagaaccacgacggaatcgatgttctgcgagaatgcatgaccatcgcgggcgcatgcatgcgtcacttccgcacaaaccaaatgcccgacgcgcatctggccattgtccctgagcgcggctatgacaacgcgcagaaccaaagcctgctcgccttacgcttcttccactggtacgcggagcagcacggagtggaagtgcaaactgcccactcagccggaggagagaagagaatcggagcgtattcgctggatggatggattgaggcggaggggtgcgccattgaagtcaacggtgcctaatttatatatttaaaaaaaaattttatgcgtataattttaggctgcacttggcacgggtgcaaaaggtgctatcccaacgacaacatgctgctccccagtgggaagacagagggggaggtgcgcgagcgggacgccaaacgcctggacttcctgctgcggcaagtgaaccgagtggacgtctactgggagtgcgaaatccatcggatgctggagcagagcagagaaatgcgcaagtcgttttcggactatgtggatga

SEQ ID NO: 75334 - DNA, 1019 bp, Heterodera glycines
  unsure (1)..(1019): unsure at all n locations
atggtggccaaaacgcgtggttggcctcgttggaaattctacgactatttgcacagtcggaggggacagcagggatgtctgcagcgggatgctttacaactgatgcagcaaattcgtgtacgggcaggactgaatgcatatgatgcggagatttgtgtgccgtgtgtgatgccaccaacaccatttggcatcacatttttgtgccaaatcgaagcagtgcaaagaatgcggggtaatttggaatgtgcgagacaacaatcgaaatgggcgaaaggtcaaaaaaatggttgaaaacgcaatttcttaacgtttttagggccataagtgctttgaatccttctgtcaattgtgcaacacttttcacaatcccgagcgggggtgcttcatccaacccaacctggcgcagcagaacaacagcaggctgtcgaatttgtgggccgcatcgaactgttgccttttgtcaacgccgctttgtggacacgcacgtgaaccatcaggtggtggtggccgacaatccattggtggcatttgtgcattggctcgtcttcgaactgccgatgagctacgacacatacgcctactcacactttggcggacggttcgacatggtgctcgtttttcgcgagctcttcagaattggctttaacccagagatgctgagacgagtaaaagcaaaacattttttatggtgatataatttcaaatctttagggcaacaaaatgtatgagatgaaagtgcgtaagcagaagaagcgcaaccccaacgtcgtcttccgggactccttcaacctaatgccttgctcactggccgcgctcgtcccttcatatgggctggaggttgaggacaagccgttcttcccccacatggccaatcgaccggaaaactacggcagggaaatccatccgacgcccgacgactacctggccagcggtatgatgcccagcaaaaggcggcaattcgatgcgtggtacgccgagaaccgtcaccaccacttncagctggatgaggcattagcaag

SEQ ID NO: 75335 - DNA, 1491 bp, Heterodera glycines
atgccatgtgtctcgaaaaatgcagacatgacccaaaacgaactcaaaattttatattcctttcggcaacaagcctatcaggccaatattgctgctggtgaatataaatattttgtggttgatttggaaatcaggtccctgaaaaacccccacccgctcagaactcgctagggacacgcgaacaaaccaaccgaaaaaaatagaaaaacggtcaatccctggatttcttgccttttaataaatgcccgatcaatatcaaataaaatagctgatttagaacatttagctaaaaaatacaatccgtctatactcctaatcagtgagacctggttaaactccagaaatacggtagaagcggaacttacaataaattgtctgtatatcaaaagttaatgaaattcctacgttaattgatagtgctggaaatatgttttccagtaatgagcaaaaatgcgaaatattagcagaaatattccaaaaatcttttttagaaaattcagttgtcaatggttcactgactcaatcagcacagaataagactaaactttcggatattgaattaaatgctggcataatttggaatatattaagaaagcttcccaggcgaaattccacttcaccggataacattccttacattttattaaaaaattgtgcagagccaattacaaaaatattagctgacatatttcgacttgctttggattccggtcaaattccggaaatatggcgaacatcattagtggtaccaattttcaaaaaaggcgaaaaaactgatccattaaattacaggccggtgtcattaaccagcactgtctatagaatttttgaacgaattttaagtagcaaaattttagaatttctgaacggtataagattttttgataaagaacaatttgggtttttaaaaaataggtcgactacaacccaaatattaaaaacaatggacgatatatataattctctacaaaaggatcaacaaattgacattatctatattgattttgtcaaggcgtttgattctgttccaattgatttattacttcaaaaaatcaaaaagattggaattgaaggaaaaattcaaaattttttaactaactttttaaaaaatcggagttttaaagttaaaattggcgaagtattgtcagaaagtttcagcatattttcgggagtgccccagggaagtgtcttagggccattactctttttaatttttataaatgatctgccgtcctttattgcaaatgaagcatcatcagttggcataaaaatgtatgccgatgatgttaaattatattatgcccatgaaaatgatgataaaacagaatattttattaactcaaaaatgattttcagaatctgataatgtacgtgacttgggaattataattgactcaaaacttaatttttcagaacatattagcaaaattgtacgaaatgcatatcttagaatttccaaattttgagagtgttaaaaagcagggaaataaa

SEQ ID NO: 75336 - DNA, 517 bp, Heterodera glycines
atgctaaatttgtctaatgtaagaaatcatatgaaatcattaaaaaatattcatctttttatcatggaataattatatttttatattagcctataaaatttcaaaaagcttaactaaaggttttaaaattcgttttttcaatgtttttgaatcatggatgaattttaatttttattataataattttttgcatatacaattaaaatatattgacctccatttcagcgaaatgaaaaaaagtggtcaactacatattttttcaatataaaatttgaaaaataaagtgatcagcagataaaaactaaaaaatattctgttttctttgaagtatatcaaaaataatatgatattataatttcaaatttaaaaatcatgacaagagaacctgtttgttaaaaaaagtgaaggttattaagaaaagtgcgactaaaaatttatttgaaaaacatatgaattacctttcacattcatttaaaatttcattgaaacgataaaatagtcccatttatataataaa

SEQ ID NO: 75337 - DNA, 738 bp, Heterodera glycines
atgaaaatttttaaatcatactacggtatgaaattgaatggtatattcgattgtgctttattcatatttgagtttattgttaattataaattttctagatcagtcggcaccgaatcgtcagcgtgctatctcaccgatccgatcatcgctggtaattttcatgttttaattaatactgttttttcaatgtttttaacaaatggtcttaaatttctagatcactcggcattgaatcgtcagtgtgctatctcaccgatccgatcaaaaattgtcgctggtaattttcatgttttcattcagatcattgtgcaccattacgtagttgtaagaagagatgtcctacaccacacccattttcactatttactggtgaaaatttggaaacgatttccggtagggaaaaaaggaggggggggggggtagataaatgcaaattaattgaaaaataactgatctttgtaaattaaaaataaaatgaattaaatttcggaaaattttctcaacagtaagttaaattaagatgctggcagcccgatttcaccaaactgtcccatatctccgtacgtgtcgcctacaatacaataattttttgtctgaattgaaaaaataactaatttagttttatttttgataatctcattataatatcgataaatagaaaaaaatggaaatttattatatttaattcttttttagtcaaatcacgacctgactgtccgctggattagaacaagatga

SEQ ID NO: 75338 - DNA, 1596 bp, Heterodera glycines
atggcttggcaaacatttacggacaaaatgaagtctttagaaaagcaatccgagctttaccgagtcttgcttttttactcgaagaagaatgataccggctttaatgtttttaatgagattgccccaccggaagcggaaccgatttacaattattttaaaaagtatattaattaatattaattttaaaatcaataattttaagcacttatttatttcggatcgtgaatggtgaacagcgatttccattgtttcgtccagatcggtggaaccaacataattctgtgttgcttgaagaacaacgcacaaataatggcatcgagtggcaaataaaaatattaatttaaaataaatttaatgatttaatgtaaaaaatctcaggtggcacagcagtttccgaaaaagatttacgcccctcacccagctttttcaaagtaatcgacattttcgaaaaagtttccattcttaaaaaattctattgtcaggggtgtgcgaaatttcatgtcattttcgtgtcgtcccctttcttcgtcactttatgagtttcgttttcgtctgtcaaaaaattttcgcttcgttttcattttcgagttttaaaattttaattttcgtttcattttctaaaattattattttttggttttcgcacacgcctagttggggctcaatttattaaaaattttgacataaataggttcatcaaagagatgaaaaatgaagaagaataccaagtcaacagactgagaccgtatgaaattgatcacactcgcggattttctgaccgtccacggctcaaaaaatacctggaaaacgatcaggcaataaggagacttgttgtcgcatatgatgccaaagaaaacaaaaatgacgaagatttgataagtcacatacatgcactccagtaccgtcttggcatgaaaggcttcgaagaatggaattagtaatgcttgtcaaagtatgttaaattagaaattgatggatcaatcacataaattttttaaataagcggcgtaatttacatttttcgcttttgcggcgcaaatgtcgtttttattaagcggcgcaagtgtcgcggcgcaaatggcacggcgcaaatgtccgcggcgcaagagtctttattgctgagcggcgcaaatgtcgcggcgcaaatggcgcggcgcaaatgtccgcggcgcaaaagtcggctaaccattggtttgattttgttttctctagcaccaaattagtattagattaaggctttctttttttcatttttaacgagaaaatacaattaatatgtttttaagcttactatttcacatttattgatttttattatttagaattaatttaagttatagcggaatcgtcaaggttacaattttcaaggtcacttttcaaaactttttattcctttatgcattttattactttttactggagcttagtaagaaatttgttaatattatttaaattttcttttttattataaattatgaataattttgtttttcattcttttctggataactgaaagattcaatttttttcctttatttttcttagtaacattatctatgaaatatatataaataataggtatattcacaaaataaa

SEQ ID NO: 75339 - DNA, 187 bp, Heterodera glycines
ataaacaggttttcactgaaaattagccaatttataggtaaaattttgaaaaattttatgggaatttaatccaattcttaggggtgtaaaagtcgcgtttcgcgccaaaaagcgaaatgcgaaacgccaaaaaatgcgaataatgcgaaaggcgaaatgcgaaaagcgaaacctaggcacatccctg

SEQ ID NO: 75340 - DNA, 327 bp, Heterodera glycines
atgaacggggcaaaataccacgaggatccactccaggggcgacatgaagtttgggcaccgggaagcttgggagcaggaagttcgccgcaccagagatttgggcgccggttaagcttgagatccacacggggggattgcggaactggagatggagataaatatatagcgggtaatgtgactcatgagggacgaggaagtatcgcaagagaggagatcttgaatttctatgaggacggaacatcgcctaaagaggcggaatgccgtgggagttggaaatggtattggacgtcgatagcagatgacatttcatatctagatatgggttga

SEQ ID NO: 75341 - DNA, 1253 bp, Heterodera glycines
  unsure (1)..(1253): unsure at all n locations
ggtttcaccgacccaacatacagagcgcggcgcaaatattttgccgacattgcagcaaactacagacatggcgaaaaaattccacgcgtcgagtacaccgcggaagagattggcacatggcggacaatttacaacgaggtgaggctgggaaggggggccgcatggaaaaaaaaattgaaaaattcaatagaaaaaccaaggtccaaggcccgtagtcccaggggtttgggaatttcgcttccccgtgaaacgaaaaaatcggaaattttttcattcagttttcaaaaaaattcattaaaaatttccaaaaagggctaaattttcaaatttgacaattccggcgagggggcggggattttttgggtggcgggggagggggggagggaagaatggaaaacctcaccaagaaagtttcgagaaatttatttttgtaaaaaattagaaaaccggaaaaccataaaaaaatttctattataattttaattaacttacaactttaaaaatttttttaattagaattataattaatttaaaataaaaaatttattttggaacaaaaaaggtattccttaacggtgaacttaattaaaccatttaaaaaaggcaaaaaaaaaaaagaaaaagaaaataaattaaaaaaacaaaacaaaaaataatttaagaaaataatcaatatgaaataaaactaattatttaataaaaaaaaatactttttggtcaaaatgtttcaaaatttgctaaacgttttttcatttttaactttagatttggaaaaaaaaataccaaaaaaaaagcgcagcgtttttgggaacacaaaaaaaatatatgaaaattaaagcctaaaaaatatatttaaaaaattaataaattagttaactctccattaaaatttcaaaaaagtttttataataaatataaatttttgtatcgatgtgccgttgttttccccccattcagctgatcaatttgtatcccatccacgcgtgccgtgagttcaactacattttcccgctgcttcagcagaactgcggttatgcgcctgatcggattccgcagctgcaagtgagtgccatctttttttggcattatttaatggaataattagaattaattttaggatgtttccgacttcctcaaaggtaattttgngggcagcattttttcaaaaatcccggcaccggcttgaaaatcttgcattttttatgcccacaaaaagtgtcaatttgaagattctaggcattaaaaattttttt

SEQ ID NO: 75342 - DNA, 77 bp, Heterodera glycines
actgtaccggcttcacacttcgaccggtggccggccttctaagttcccgcgattttctggccgggctggcattcagg

SEQ ID NO: 75343 - DNA, 891 bp, Heterodera glycines
atggcaagatcaagacaaagtatcatttgcacattttatgtccgcaacccaatcacaaacgatggacgcgtacaatggcgaaaaacacaaattggacttgtccgacctgaaggtctcaaaaattttggacgaaatgccgccgctgcccgaagagcggggggcttcatcctcgagaggaaaagtattgaaaagccattcaatttcattgccaccaagtctggccaatttcaatccattcaaagcgtcgccatcaccaaagtcaaagctgtcgaaaagcctaagtgcttccctaaatgcttcttcttcttcatctctgagtggtccattgaaaacgcccaaacacaaggaaacgctgaaaaagaatggcaaatcaaacaaagtgccgaaaagttgtggaaaatcaaacgaattttcgaaaaatggtggaaaatcaaacaaagtgccgaaaagtggtggaaaatcaaatgaattgcccaaaaggaatggcaaatcaaaaagaattgccgaaaaatgatggcaaaaagaaaggcaaaaacatttgaatacaaattgatgcgagaaaagaagtaattttgagaaaatcggagaatttggtggtttttttatattgtcaaaaaatgttttctgtcatgtcaaagtgttgtaatgattatgattaaaaagatttttcgtgcatttttagtgccgtttttcgtccaaatttggttttcaaaacaattcattggcacgctttttacacataatttgacaaaaaaatcggtttaaaatcaaaaaatttttgggggtgtatcaccttaccaaattgtatcggcatacaaagagcatctacaaaacactgaatggtggtgcttttggatagcgcataaaaaatgctacaaattacaaaataaa

SEQ ID NO: 75344 - DNA, 583 bp, Heterodera glycines
atgtccgatggaagagaatctgctaaaactttggtacgaatacaaggaatgaaattagttttctttatttgttaaataaagttaaaaaatattttcagaagattcaatatggcttattgctaaattcatgtgaattttaaacctatacttagagatcggcctgtacctggatccaggcctgtatttttcctggatccaggtacaggtacaggccatttttcggcaacctgtatttttcctgtacttttgtacagaaaatacaggtacaggccatttttggaatacaggtacaggtacaggccttaagaacctgtacatatttcctgtattaatttttaatcactattttttggcgaaatgtctgaaaaattaggaaaaattcaaaaaaatatcattttattcagtgaaactgtcaaatttgaaaaattaataatgttttggcgaaatgtcataaatagttcaaggtggacttggtcgttttggcgccaacccattgtgctatacctttttttattttcaacaaaatctaacgatcttggtagcattcgaacgcccttcacatttcaatttggcgcatgcttta

SEQ ID NO: 75345 - DNA, 1506 bp, Heterodera glycines
atgccgttttcgctcaagtgcatgtccacccgcaaattggttaagcaaaacaatcatttgtgacatttgccactacaaattcggcgaacacccaacagtttgctggcatcccatcaaggcgaaccagcaacgagggcgatgccaatggcgtaatgccccatatttttatttttgaattttatggcaaaaaaaatattgttaaatcatctcttaaataatatatatttggcgacccgattatatggttaaaaaaattatacatttaataaataatcaatagctataaaatttattttaaaataatggactaattatttttattttttaattgattctaaaaaaaattatgaaacaatataatttgaaataattaagttacaattaatgacacggttcatatgtataataaaattaaaaaagccaaaaatctaaatataaatttttcagcagtcaggatgaaatttttttttaatttctttcattttataaatttttagtaaaaaagtgaaaaattcatcttaattagattaaaattttataaaattacataattcgaagccttattaagaaagaaatgttatttatataaaaaaaattttttttaataaaattcgtataattgtaattttttgaaaaatatatcattttttgcatttttcaattaaaacacaaaaatgtttgctacgagtttagaaagaaaataaattaaatagataaaatttgtttttttaactttttatataattgcatttaaaaataaaattgttaaaaataagcattaaaccgaataattttaacttttttttttatttttcatttcagcactttatttttctgatttttggtgccgcaattacttttgccatctccgtacttttcacatgcattttgcgaaggtgtgtttattataaaataatatattatatattttttaatttataatttaatttcatttttagacgatgctttttgtttaaagcctttttacggcacaacaaaaaacatcatcaaaaacgtggtccatcagtgtccgaaaaatcgcatcaaaagcaccgtggagctgaaagcacttcgctggttcaacgcggcacgagaggtaaattaattaaagaaaaacaacgcggcactaaaaattaattaagtaaaaacaaaaaattaatcaaaaatattattttacagtaaaaaaataaattattttggcaaaattccgaaatagacaatttcttcattctttaatttttttttaacaatttcaaaaaaaaacacttaaaaccttttcgttcaataatatataatgagtgtatttttgcatttatttacatcaattgaaatcaaagcgattaaaaattcttacaaattttaaaattattattattttttttttgaaaaaccgattcaacctctaaattttcaaccaattgaacgataatgaacccaataccaaaatcccgaaaaaacccgaagctttcctttcgtcgaactcgagaccaccgagattatttgaaa

SEQ ID NO: 75346 - DNA, 339 bp, Heterodera glycines
atgaagctatgtggatgtaaatgcattgcctcggaagagcagaattcaactggtggaccccagaacgggatgtcttcaacattacattaatgcaaattatgtagactcatgtgacgagaagcgggcatacagtaatccaaataattcctatcattactgtattactgtatttatttaataaataatatttttatattttcagtagcaactcaagcaccgttgccacacacatttgccgacttttgggcaatggtttggcaagagcggagcagtgttttggttgcattgaccaacattgtggagagtgggctcaaaaaatgcgatcagtaatatttaaaa

SEQ ID NO: 75347 - DNA, 1210 bp, Heterodera glycines
atggatttcattttgttagaattttttgtttggattcaaaataaaactgttggttgtactgctataactctatgcatgaagacgaagcagtacaagaaaagtgagaagccaacacataatgccttttggtaaatgttggcttaaaaattctattctaacaaaattaacgaattctaggaaaattttaaaatttaattttatcacttgttaaaaaaatgtgaaaataaattatatattttgagaaagatttttatttttgtttttttttattcgaaaattaagtcaattaaaatactttgttaaattaaattttttgcttttttggagaaagccatgttttttccgggcacaattgaaacacaaatccatgcccgatcattccgtaaaaaaagctccaaaaaattttgtgtaattattagataaataaaattctcatatcgtctcgtctcgtatttttttcctttttgcaacatccctgatgtacaatttccttgccttgttaattggagaaaaattttaaaaataattttttattgcttttaagtgatggtcaacgtgttccggtcatgaaaaggacagcttcactcaacgaacaaaacaatgaaatttgccaaattttgcccaacaattatctggccgccattgataaacagcgcaacaaaaaagcaatgctcaatgaggataaaaatgcttttctaaaagctcacggggttcggatatgctccaagccaattgaagcggaagcgcgacgcctgtacccaccggcaatagcctgcttattagccgaagaagacaaggaccaaaagaatagagagcatttggagccaaatcaaaatggaggtcggcaaatcatttgaattagggatgatattattatgcactaaaaaccatcaaaatagtaaccaaaaatgggagcatatgtattaaaagtcccccaaaaatttgatttatttcaaaaaattgtttaattagttgttaagatggtagacttaaactaaaaaacacagttatttttaagaatttcctacaaatcctaaaaatatatgtttttaaatttttttttttagatttgaatttttgttttactgaatattacgaaagtttacaatacacaaagccatcaaattttcccgaaaaattaaaatgggtaattgtcatcattggagaatcccaacaaatgtgcaagtgagtttttataataatatcacaa

SEQ ID NO: 75348 - DNA, 59 bp, Heterodera glycines
atgaaaaaagttatagtccaaaacatggctggggcacaaccgttcaggccccaactgag

SEQ ID NO: 75349 - DNA, 712 bp, Heterodera glycines
gaatttttatgatctattgaaagattgtgcaaaacatcgtggtgttgtttttacaactccagtggttcaaaatatttctcataaagaagccaattcattgtaagttgatcttttaatagcttgggcaatgttgctagtttgctttttcaattaactttcagagagctcgttcgaaaaagttttgaagcgcacaagaaaaataacgtgcgctttttactattgttagcgcccggaaaggattcggccaattctattgatgtgcattactttttcaaattgatggaacagcagactggtgagagtttattgaattttaatgtgtttttcaattcaaaaaattaatttctcgatacgaaaattgaaaaaaaaatgtgtatagtggggaaataataacaataatacagaataatcaaccaggaaacacggggctttacttaaaaaaattatgaatagggatgggattcttagttttttaactattttttctgcggctttaactcgacgagaaatgcacgaaaaacacattctttttcgaaaatttttcatttttagtgccacaattcatcactaggaatcactattttggagctttgccactaaaaaaaactatttcggaagttggccactaaaataattttttgccactattttggcgtttcgtcattatttttgccactattttggcatttttgaaaaacttcccaaaattgca

SEQ ID NO: 75350 - DNA, 421 bp, Heterodera glycines
  unsure (1)..(421): unsure at all n locations
atgaacctcaaacttggtggcattaattacggaatatgtgcttcgcaagcttttatgaatgccagacgaagcactgaagacattgtgtaagtgattatctatgggaaaaatttaagaaacctccatattggacgcttaaaaacatttttgatgataattcatttacagctaaatgataactcaaaataagcaagaaatccatttcgnatttttaataaacgcgaggcgtggactcttgagccttacaagaccaacacggaattctatttttaattttaaaatactttattaaatttttaaaaatccaaaatcttttagtttgtgaatcaaagcctttaaaattaaaaaaaaaaaaacaaaattcccttatttttttagggggccaaatccaatttaaaacccctttttttccgggttaaaa

SEQ ID NO: 75351 - DNA, 3728 bp, Heterodera glycines
cggcgatgatgacgacttgctgctgtgcgcggtcagccgtgtccggctcgtccagttcagcaaggacacggaagagccgatgggcatcacgctcaaggtggtcgggcactcggattgacttaacacaaatttttaaaggaatttttcaaaaaaaaaaaaaaaaatttatgtgaaaagttcaataaaaaaatttttgaaattttctagcgattttttcaaaaatttattagttttttatttctgagttttttttcaaaacagatcacggaggatggccgatgttatgtgggccgaataatgcacggcggactgatccatcggcagggcacgctgcacgtggacgacgaaatcctggagatcaacggagtatcggtagggggaaagaaaaatggaataattataataaaaaataataattattaataatattatttaaaaaaatggtcttatttacgggagcaggtcttccccccccctcccttcgagatttttaaaaaaaatttaaaaaaatttttttgaagaaaatttcaaaaaaaaaaaaaaatttgaaaaattttttctagcgattttttttcgagttttatgctatttattagatttgctcattttttcaaaaatttttacaaaaagctgaaaaaattttaaaaattttaccaatgaaattttcttcaaaaaatagatttttttgaagaatttcttaatttgaaaatttttatttcaaatatttcgggggttagggaatatttaattaattattgtttccatattttatatgaaaaagaaaaagaaataacaattaaactcattgtcaaaaagagtgacatttcttcaacatttaattttacaaaaatttaaagcgaaatcaaaaaatttaatttaaaaattttttaaataaatttctttaatttcaaaaaattaaaaatataaacggttaaaggtggccaatcggaatgttgaacagctccagcggctgttgcgtgacgcgcgcggggcggtcaccttcaaaattgtgccttcctaccgctccgcgccgccggcctgcgaaattttctgcaaggcccagtgcgtaaaacaaacactcaattttttaaatttagtattttaaaattaaaaaaaaattagccaactattttaacgttaaaattgttggccgttacattcgttttctcacaatacaaaaaaacaatttttgctcgggtgaaaaattctataaaaatttgtataacatttatactgttccattacgtatctctgcaaaatttggtgagcttctgatcatttttaaaaataataattctgagttttccattattttaattttttttgcaatttttttgaaaatttttgaaaaaacttagtagtttattaaaaatcgctaaaagtttaaaaaaaaattgttttttcttgaaattttcttattaagaaatttcctaacaattttggaaaatttctgtttgaaaattttaattttttatggggaggaaacgacgacggaaaacgaactgctccccgttttttctaaaatttcttagaaaatttttctaaaatttcttctttttttttaaattcaaattttaatgcaaatgatgcgagatggtgggcttgaaaacatttttacaatttatgttattatatttgcattgaaggttgttgaattttgtgccatttttgagcaaaattttcacaatttcaaaaacgatcaaagatttgactacgacccggcccaggatgacctgatcccgtgcccaagtgcgggcgtgccgttccgaactggcgacattctgcaagtgatctccaaggatgaccacaactggtggcagggtgagaaattgttaattttaatttaaatttttatttttaattgaatccaaaaatcgggctttttccaattctttggcatttaattttttaaaattcttttcattgaaattagagcccggagcggaacgagatcccgcgcaggattttgcgggattttcagtccaaaatccctccatttagggaaatgcgggattaatccctgcgggatcccgtcccgcaaatttttgaattccaatcccgcagcggaacccgcaaatttgaaatttactggctatggtcctttgtttttttcaattccttggtattttatccattttttaaaattatgtttaaattatttgttagcccgctttgtgtgccatttccctgcgcttggcggctcctcaaaatggcactcttcttctgctggccgatgtacaagcagtgcttccgggtgcggagtggcaaatgcggtgaatttaaaatgcaaattttttaattaaaataaaaatatttatatatttttaaaatgttttatgtttacagatatatttaattttaacattaattaattatctaattaattaattacctagttaattgattatttaattagtttgattgattcacatcccccccccttaaattaggtggcctccacttcggctgcggcattggccaaccatacgggtgccgtcatgccccaaaggcatgccaaaaagggtggaacaatgccaacagcgtcggcactaattggcaacaatgtcggcgccggtgccgccacggccaccggcaacgtcaacatggccggactgattccttcgccggaattacaggcaaaaaaaacaaatatgaaaaaaatacacttcaaaaattaattacattttaaatgaatttgagaataatttaattattaaaaaaatatattttaaaaattttgatgaaaaccgagtataattagttaacaaaaatatatttttaataaattttaaatgaaaaaaatcatgaaaaaaggtatattaattaaattaaaatgcaacttgaacaataattatcaaaaatatttatttaaattaaattttaaataaaattcgagtataattaaatattaaaaaaaaaattttgaattaaatcttacgtggaattcgagtaaaattaaattattaaaaacaatctaaatttgaaagcattgaatttttaattcgtttatcttaaaattaattatgacattttttttgtttaaaaaaatataatttcgtatataaattaatttatatttcgtcatttaatgtttttttattatttattttaccaaaattattttttggatttgttcaattttttttaattatacaggaatggcggacagcttgtttggcgatggagcgagcacgggaaaattcgcattgcttcatgtttagcaagaaaaaaagtggcaacaaatattacacgacgaaggcaaaagcggaaaaattaattattattttaaattattaaaaattaattttagaattttaaaaattctaaaatcattttaaataacaaattcttatttagtataatttttcttcatttttaagtatttgcgtaaacattccgagctgtttgacggcatggaaatgatcagctacgaagaggttaaatttttttaaatttatttttttgtaaatttaattaaattttttatcaaattcgaaatttaattaaaattatttattccagcaattcatttaattttgtccgataaatttcgcaatttttaatattattaaaaaatgcattgattaatttctaggtggtcaggttagcctcgttccgccgcaaaacgcttgtactgctcggcgcccacggggttggtcgacggcacatcaaaaacacgctgatcaagctgcacccgcaccgatttgcctacccaattccgcgtaaat

SEQ ID NO: 75352 - DNA, 378 bp, Heterodera glycines
atggtatgtagagtaatgtttaaaattaaaacaggactttttgtcaaggatcctgtcgggttcacctggaattcggattctggtccgggttttaacattccgcgttcaacttatccttatcaataaaatgaccaggttttccgcccgaaattcatttgctgtcgaaatcaggcacagatagtaagaaaagatgaaataacttactgtcgaaatcactcattcgaaaccaatcactgtcgaaaagacatagcaccggcgggggtgggatcccaaggattttcaaccccatcccctgttttcctatacgcgaaaaatgggattgcagaagcagcaaaccaagttaaaaatatatttttcgttcgttccaggccattttaa

SEQ ID NO: 75353 - DNA, 759 bp, Heterodera glycines
atggcgtcggatggacaagcgatggccaaatggcttttcactccacttcaaaacaatgtgccaaagatgttcaactgctcgttgcacttgaatgatgggattttgccgtcgaatattgaaccgttcaaagcggtgcttcatttcgtatttctttaatcaattttcccaaatttcaggcttttgccagtgcttcttcctccgtcaatttcattgtcgtcatttgttttcagttgtcttttgctgattccgttgtgccatttgatctgacaaatgaattgactcgggaacaattggcgttgaaaaggattaacaatagccatcgttttcttctaatccgttgtccaattgcgcgagacgaaagcaaatggacaaaatgggaaaaggaagcgattgtctggcgattttgtgatcaatgggatcgaattagcactaatacttattatgagaatgccatcggggatgggtcagtgaatgatttttaataaaaattcaatttttgcgtttatgtttagacttcttaacgcaactcccggcccaagtgatcagcagaaatgaatgaatgatttgctgagaaatggtcgatcaattttaattgctgtgtaggacatgatttgacgtttataaaattgttctttttgttacaatgatcactgatcacaaattatgttatacaatatatgtgcatattgcctttaggatatttagtgattttctgaaacagcgtttgttgttttcttaaaaactggctcaaaatcacaa

SEQ ID NO: 75354 - DNA, 589 bp, Heterodera glycines
atggtcttttccacacttttggcattctgtttggtgtcctcatttgactccgcttctgccaaagcccaatccgttaacaattcggtgcgaaatgatgaaatcatagaaaaaggtccaaccagcagcaaaaatgggctgttgaacatgtgcatggacagcggactgatcagcaacggaaaggccggagatgaggcggagatggatggtttggttgagctgttgactgagctggacgagcatgacagcgtaatccaagcagcattggccaacccgacaaaggtggtttctgtgaccagaaaattcgtggtgatagcaataccgtaattagtgagtgataaataatgacatggtctaatagcatatgagcagggtgcagctttttagttgtatatttatgcagcttgttttgatgagaaacacacgaaaaaacatgtgtttatccgggaattcattttaacatcactattcggcacacggaataattatcactttttttgctattttccccattatttagttaactctcatgtttttgaatttgtaactaaaaatctgcacccaaacttacctattcgtcattggaaagata

SEQ ID NO: 75355 - DNA, 1070 bp, Heterodera glycines
atgtccgacgaaatcaaagaactgaaggccattacgctgcaaattctgaagaatcagacgttgatgatcgctcatttagtcaatcaggcacgccaaaataaaccgcagcaacacgtccaaccgccgctgatgttgaagcaggtcaagacggagccgtgtgagcctccgtcgacggtgtcaaagcgaaaggcgccgtcggccgtggagcagccattgaaggaaatcagtttcatcaacaaaaacaacggcggatgcgctacggtcaataaacgtcgcaggatgagcgcaccgaacaccgctgggatggccaccaaacagaacaacaccaaagttagtcgactgacaaatggtcgcaatgtgtcacgttttacactgactaagtgaaaagattacaaaataacgatttgagttttaagttctgcaaaatttgcgatgccgtggtggacgagaatagtctcgtgagtcacatttggtgcgtctttgaattgtcaatgtttaaaatgttaattagttctattcagggagcacattctgaaaaagatgatgaaagagaaggcggacttgtccaatgcgtacagtttcgtttgcgacgtcaacggatgcgtcttccgtaccaacaagtaattcaaacgggcaaaaacaatgagggagaagaggaaagggtgcaaaaactattcaataggagatacacaatcaaaaaagaatcgagttggtatttgggttatcgaaatttttgttgatgcgactgtttgccttcgtcctatttccgccccaattcagaagggtgtgtgtattatgagaatccatttggtttatgttcgtaataatttgcttgacttaggttggaagcggccggtggccatgccatcaaacacccggaagtggagcgtaacaaggtacaataagcacttctcactggttgtgttcggtgtcttcatctgtcgttgtttttgccttctttacgtctcatttttcaggttgtgttggacaatcgtgaaaattcggagccgctctttctcgccactctcgcgcaatgctacgacagaatgagcgactcggagaaggacgag

SEQ ID NO: 75356 - DNA, 2292 bp, Heterodera glycines
agtggcccattaagtagaaagcataattcatttgggcgaattatggcatggaattaccgaatgttttttgtcagtttttgttcgactacgaaattccgcacagaccgggccaacatttgcactgccgctgggggttcaactcgggcagtgtttttacgggtaaacaaacaaattctttgattttaacttccaaattcgtggcccaaaaatgggacccggaattgtttctcttgccaggaatcaaccccattctttttcaatccgaacaaacatttcgttttgggtgtcgtcggcatcaccgcccctcgttactgtgtgttcggttcgaccgttactttggccgccaaaatggagaactcgggacagcaggaccgcattcagatggcactgaaaagctaccaacttctgtcggaacagtttccagagtttcggtgcattccgaggggaggagtgagaattgaagtaaaatgggggggggggacggtagaacagaggaaacctcggagggaatacggtaccgtggagggaaaatttgtggcggaaaacagaaaattgcctctattcttcccacagggagtcggcacccttttgacctattggttggagggcattgactctggcggaatgataagcgaccgctcagccagcgacgacccaatgcaacggtcggaccaatgacatcaaaaaagaaaccctaacaacgaaataaccattctttttttaatcattttttaaactcgctcaattatttgttgcacttcctcagtttcaaatgtacagacatataatttaacacaaacagaaattggagcacaattgatgacaattaaatgggaaaatagccaaatatgaggaaaaacaagtagacagtgttaaaatcaaaaatcatcgcaatatcgaattccacttcggatgtgcttcttcaatcatagcgcttgcgaaacaccttcaaacatttttagagaaaattgctgttccaacaacttttcgtccaatttttaaatattgtaatatagggtttttttatttgtggatagatgaaaacaaagtcccttttcgtcgtcacagacacaaagcattggactcacctcgtccttctccgagtcgctcattctgtcgtagcattgcgcgagagtggcgagaaagagcggctccgaattttcacgattgtccaacacaacctgaaaaatgagacgtaaagaaggcaaaaacaacgacagatgaagacaccgaacacaaccagtgagaagtgcttattgtaccttgttacgctccacttccgggtgtttgatggcatggccaccggccgcttccaacctaagtcaagcaaattattacgaacataaaccaaatggattctcataatacacacacccttctgaattggggcggaaataggacgaaggcaaacagtcgcatcaacaaaaatttcgataacccaaataccaactcgattcttttttgattgtgtatctcctattgaatagtttttgcaccctttcctcttctccctcattgtttttgcccgtttgaattacttgttggtacggaagacgcatccgttgacgtcgcaaacgaaactgtacgcattggacaagtccgccttctctttcatcatctttttcagaatgtgctccctgaatagaactaattaacattttaaacattgacaattcaaagacgcaccaaatgtgactcacgagactattctcgtccaccacggcatcgcaaattttgcagaacttaaaactcaaatcgttattttgtaatcttttcacttagtcagtgtaaaacgtgacacattgcgaccatttgtcagtcgactaactttggtgttgttctgtttggtggccatcccagcggtgttcggtgcgctcatcctgcgacgtttattgaccgtagcgcatccgccgttgtttttgttgatgaaactgatttccttcaatggctgctccacggccgacggcgcctttcgctttgacaccgtcgacggaggctcacacggctccgtcttgacctgcttcaacatcagcggcggttggacgtgttgctgcggtttattttggcgtgcctgattgactaaatgagcgatcatcaacgtctgattcttcagaatttgcagcgtaatggccttcagttctttgatttcgtcggacattttaaagtaaacaatgctctaagatttatagttttaatttggagagctgaatctgtaatactagtaaaataagaaaccttttctacgatttgtacacctttttctacttggactcaaaaaaaaaaccaaaatgg

SEQ ID NO: 75357 - DNA, 1681 bp, Heterodera glycines
atgacttccgatttgggcacccaagtcaaccgtgacctaaagcgtcgaattcgcgtcagcggtgactttgtcccatccgtcgccactctctcagcgttcacttctcccattgactctcaccgtccaattgcgtccaatacgcttcgccaagctgctcggcttgtctttttgttggatgtgcgggagggactttaccgggaagaggcggaggatggtgaagacgaaggcggacggagcttcgacatgggcgaatttaacggagtcgatggtaagttctgggcagagattaaatcacagaacaaattgccaggcttggacgaagctgtgctgaaaagccgcaaccccattttggcagggattgccgattatatggtggaggaagcgagtgttgaagaagtgaatgacatttaaaaaacaatccaaaacgtgattctatttaaggaagtcctcttggaaagggctgcttccgtcgatgggccaattgtgtcgtcggagatttctttgcaatttgaggaagaccggtcgcttcttaaggtgcattttgctttggtgttctactcaaaattggacattttgtttgcttttagattctcgaccgtctcctgttttatttgcggattgtccattctgtggacttttacggtgccgtccattacccgcaagaggaccgaatgccgagtcggtaagcaactacaaaacggactgtccatttgtttctattggccaccagtaactttgagttcttgttctcagtctcggtttgttccacgttcgtcgcattccaccggcaaatgaaagtaccaaaagggctcctcaattgtcaaaaagtgcggtggatggacatattgaaggcttcaacgctcgtcttgagaacggactttttaagcggtgcactccactgagtgaacgggacttgcagaaacttgacaaaaaggacgcagacaagtgaaagactggcaaataagttgtggaaaactaagcttctttcacagagcggttgagctgttcgttaatgcgaatacgcaacaattgggtcccgagaaatggctttgtcctctctccgggaagaaatttaaagggcccgactttgtgcacaaacacatccattccaagtacaatgaggaggtggacaaagtgcgaaatgaggtgagccataccattgcgttcgtttaacttttcttctttctttttgcaggctctttattacaacaatttcattactgacccaaatcgtccccacagtccgcagctttttgaacagccaaaaacgcgtgccgagtcgcgccaactgatcgaaagcggcacagactcacaacatgtttctcctcacatggaatcaacgaatgagaggattcgtgagttgtaatattagtgattctttatgtttatttttcaccagcatttcaacgcggtacttcttcatggggtggaggaaattacggagccgaccgagttggtgggccttctcgctactgtatgttaatgttcaattgtatactagtgtaattttgatcagacccattaattaatatattttaattgtacagctggcgtttctcgccctccgatgaacactggaggatggcgacgcatggaaccaatgaatgaaacaacggtccggggtgtcaatggtggaggtggtggtgggatgcgggacccgcgagcgccgccgtcgtatagg

SEQ ID NO: 75358 - DNA, 1412 bp, Heterodera glycines
atgcctccacggatggcgccgccggacacaatgatgcgttttaatacgcctcgtcctgctccgatgtctcttcgtctggaaccgtggcaaatgttcccatctgctactccaccgcaacggatgatggcgcctacggttccctctcatccacaaatccaaccaatggtaccagcaacaactggtggcaccatgtcacaattcagcaacaaggaattgttggaagataacaggtgtgaggagggagatgggatcggcttttacaaattccaagcttgtttcattgtcaatttttccaagggttggttgctcgtcagcaggcggcggacgcggcggtggtacgggtcgaaaaggcggcggacgcggcggtggtgcgggtagtaaacgtaaagccggtgaattctttgaggtgattcttttattagtagttaacagaccaacaaagagattgttataggaattaactacttctccaatgcctccacggatggcgccgccggacacaatgatgcgttttaatacgcctcgtcctgctccgatgtctcttcgtatggcaccgcggcaaatgttcccatctgctactccaccgcaacggatgatggcgcctacggttccctctcatccacaaatccaaccaatggtactcggcggtggtccggatagtaaacgctttgaggtgattcttttattagtagttaacagaccaacaaagagattgttataggaattaaccattttatgcactgttcccatgacctttctttatttctccccttggttgtaatcaaatttcatttataatgagaaagtccatctcatttctctattcgctctttttagttcaaaaatgaatcctaaaaagcgtaaaattccacccgagttgcttttcgagcttgtttcttttcttccgtttgacattctttgggccatcataagggtttcctatgcttttgatggttttctatggcacagacaattttggtggattcgaaatgagataattcgccgggaggcagtaaggcgaaaagctgtaaaaaaatttttgtaaattaacaattatttaagcaaatgtcattccgcggcatttgtcaacgacttggtacattatcaaaagatgctcccgaaatggttatcgattgggcgaaaaacggtatattatttaaccatttagttattgaacatattttgaaaattcagaaatatgtgcccatttttccattcccatcagaattttcgacaacgtagaattcacagaaaaaataaaaattctgtatccaatgttcaaggatgtcaatactgacgaactatcgaccgattgcaaatgtaatttttgtagttttttatcttttcactttgaatttttagttgtgtctgacatttgcgatgaaatagaaagacgcaaacgaatggcttga

SEQ ID NO: 75359 - DNA, 1718 bp, Heterodera glycines
gttctacgaccaggacgtgatgcggtccaccatcgtgacggagtggaatttggtgtgcgacgacaacttcaagcgtgcccatgcccacctgttctactcgttcggcttcctgttcggctgtctgctgggcggcttcgcctccgaccgtttcgggcgcaagccgacggtgatcggcttcggcattctgtcctccatgttcggtctgctgctgccctactccacctacttccccatgttcctgttcatccgcttctgcggcgcggtgtgcaacgagggtcagtcctttcagttaggatggaaatttcctgaaaaatacaaattcaccgaatttccaaaaatatttttagcattgtattgtaatttgtttttctaaaatttgaatcattcgaaatccgacgcattttaaaagaatgttcggagttagacaaaatttagccacagaaattttgccggaaaaaaatatttaaaaagtccaaaaaacaaatttttgcggttttctgaagaattcaaattttttaataaaatgcattttttcaaaatgtatcaaaaaggattttttcaacttttcttggaattgtctaaagcaaaattaatgaaaaggctaggaactaaaaattttagaaatttttttttggacttttcttgcggccttttggtccctcggatttaccaatttccataaaaaataagtgtgattacaataattaaacaaaccatcgctactgtccccttttcagctgctgacctggccgcgtatgtgctgtgcatggaaatcacgggtaattaagtattaattatttccattttattactatttttcatttgtttcattttttccaacccatccccatgattctcccagggactcgctatcgtgcaatggtcggcagtttgctgcaggcgccgtgggcggtcggctacgcaacgttggcactgatcgcctacttttgcaactcgtggcagaacattcaggtaaaaacaacagtgtttgagggagaagggatgctcatggcgatgtttttctgctaaaaatttttttgtgacaatcccaatgttttttttttgaaaaaactcctaaaaaagttagaaaaccaaaaattttcagttttttaataaaaaaaaattaaggaaaaacaatgcggaacaggtcgtcttaggaattttcttagtacgaaaatttcaaggaaaaaaaatttttaagaaatttttcagcgattttttagaaaatttttgaaaaaacttggtagttcattataaaatttctaaaaaaatttttttcttgaaattttcgtactaagaaaattcctaagaatttttttatgaaaaatttctaggtttgaaaatttttttttttaaatttttcggggggaaaatgaagtgcccccaaaacaatgcgagatggggggggggatttaaaaaaattaaaactaatcacactaattaaataattataaaaagtcctaaaaccaaaaaaattttcttgacccattgcgtttttcattccattattttccgcttttttcagttgatcactgccgcgctgcacacggtgagcatctgtctgatctgtgtgctgccggagagtccgcggtggctgatcgtcaacaaccgcgtggacgaggtgtgtcagctgcggcggtggattcctccgtactaatgccatttacatttgttgccctgtaatttcaggccgaacggtacatccgcaaggcgtgcag

SEQ ID NO: 75360 - DNA, 220 bp, Heterodera glycines
  unsure (1)..(220): unsure at all n locations
tgtaccagggatgggccaaattgaaaaataaaaagcgaaatgcgaaaagcgaaatttgcgaaactgaaaatgcgaaatgaaaaaaaagcgaaatgcgaaaagctaaaatatgcgaaaatgcgaaaggcgaaatgcgaaagcgaaattttttctacaactntttaatagttaaaatcataaagcaaaaatcattttttaaattttatattagccaatttat

SEQ ID NO: 75361 - DNA, 2971 bp, Heterodera glycines
  unsure (1)..(2971): unsure at all n locations
atgcccaattgttggagcaaattcattggtcggacattgaccagcagtaccggcggaaccgtgagcagctcaaagacctcaattttcagaagttctgctccgagtcgggctttttgcgctattttccgtccgccccgtggctttgggaggtgtttaaagcgtcaaaatgtgccgattattccaatttttgcccaaggaccgttcctcggagttggacctgttcgactgtcggaacacggaatggtacgtcaacgcggccaccgcgtcgcgtaatttggtcattttgctggacacttccggctcaatgctcggccaacgcttcgaaatcgcacggcagacaatcgaagcgattctcggcactctttcggacaatgacttcttcaacattatcaatgcacgtgctccgccccaatcattaattgctgcccataatccgcttctcctccttaagttttctaagcaggccatccttttggaggagtgcgacggcaaaaaattggtgcaggcgacgctaaggaacaaaaagttgcttctctcgcggctgtcaaatgtcagctcagagggaaaagcggactacgaaatggcactgcacaaggcattcatggcactgatgaacgtgagagccgaagagattattaaagccaaactgagagcttagataaatgattgaatgttgcttaagctaagctaacggtacccctcagcaaatattaatttgttgctaattgcaatttctaatttacttaacttttgccttggactgcttatgcacataacttccttaaatacccttaattaactaattaattgctttttaatgcctttctcattgccctcctaccgctcaattgtctttttgctttccaccgcttttcgcttgctcagttgccggatgaaagtgtgcgtcttcgaagcaaagaggaagcggcgcgtgaagcggcgcgaagggaagcggcggattcgcctgagtcggagagagccgcggaaggaatgcgccattttgtgttggaggacaacgttttaacagtgccggaacgctttatggaggcggttggtccctttgctgctttgctttgctttacctccgatcactttttccgctgctattcttctgatctttttccgctttgcttttcctctaatcactttttccgctttgcttttcctctgatcactttccactttgcttttcctctgatcacgttttccgctttgcttttcctctgatcacttttcccgctttgcttttcctctgatcacgttttccgctttgcttttcctctgatcacttttcccgctttgcttttcctctgatcacgttttccgctttgcttttcctctgatcacttttcccgctttgcttttcctctgatcacttttcccgctttgcttttcctctgatcacttttcccgctttgcttttcctctgatcacttttcccgctttgcttttcctctgatcacttttcccgctttgcttttcctctgatcacttttcccgctttgcttttcctctgatcacttttctcttccctttctcttttccataatcatttttcaattaaatatcaatctcttttttcctgttcaagattagcaaatatgcgggaagtgaccagcagatgggatgccaggatatgatcatgctgataactgatggagcacccggctttttccgcgaaacattcgaattgttcaatccggaaaagcgggtaaaaagggcgaagccaacaaaagtccaaaaaatgccatttcaaaattcaggtccgtttcttttcgtttgtcgttggagaagaggcaaaggattttgagcaggtgcttatcccttatattcggccaaatttgaatttgaaaaaggtccgatggatggcatgtgcaaaccgcggatttatggcacatatcagttcaatggccgacgttcaggaggtgagacaggcgaaaatatatgggaaaagagagagagagagagagagagagaaggtaattaattacatttgatcaaggcaattaaaaatgaaaaaacaaaggaatgggcaacaaaaatacaaacttttcggggatgaaacattcaaatgcattcaaacgtttatccacttaccccatagaaagtgcagcaatacgttcgcattttgtcccgcaccgtttcgcgacaaaaggccgctttcaccgaggacagtccgttttggagtggggcaacccgcgaaagaatggtcagtcggtgaagaagggagacataaagcggggggaaagggagggaaaagcgtgtccttagtagcaatggattggtaactttacgttaacaatttcgccaaatctctccaacagagcgacgacttcatcgtttctgtttcctttcccgtcgtccttcccgacggccaatttatgggcgtttcctccgtcactgtgccactctttgaactgtcccaattggcccatccgtcgcgcgtcggtgcgcggagtcattttgtgctgttggacggcagcggatacgctctgattcacccccaactgaggccgatggtaagcgaaggaaggaagaagcaattatggcattttgagaatatttggctaaggaagagacgggggagctgaaggccggctttaacagcatctcatggcacgaggcggaagcgcaacggacgcattcgccggtaaggcaaattcggacgaaaatgccataaaacggagcagatgctttgccattcagcaccaccaaaagcgatccttcagctgctcaacaggcgaaatagaaccaaaaaagcaacacactctcttcgcggtggacaaaatggtaattgaggaggaaaagcataggaaaagcatgaaaggagaaatgcgggaaggaaggaatggcatttgacaaaaggacgacacttttctttcgtgatgcgacatttgcgccgcccagcaaaatcgacatttgcgccgcttttaaaaaattttaatttcaactagantatttaatcaaatta

SEQ ID NO: 75362 - DNA, 1132 bp, Heterodera glycines
atggacgtctatgtggccctcaattctggcgcgattattgattgtttccatgatcaaaagaatggactcgccagccttaatggtatgtcaattttttcaaaataagattaataaaattacatgctcgagtacatctgtttccagtaaatactcagatccgtcgccgaaaaatcttatcttccagaaatggcagattttttcacaacgcaggcagttacagatgtcgtacagtcgaagggatgctatctcgtagaattccttcccttcgtcctcaaaatcgcgttcacattgctccctgtggcgatgcgagcattgctgggtttttaattattattattattaggccgctctggtctttcggcgagcaaagagcccgccatcaggcgagcaaagcgcccgccatcaggcgagcaaagagcccgccgtcaggcgagcaaagagcccgccatccggcgagcaaagcgcccgacgtcaggcgagcaaagcgcccgccgtcaggcgagcaaagcgcccgccgtcaggcgagcaaagcgcccgccgtcaggcgagcaaagcgcccgccgtcgggcgagcaagcgcccgccgtcaggcgagcaaagcgcccgccgtcaggcgagcaaagcgcccgccgtcgggcgagcaagcgcccgccgtcaggcgagcaaagcgcccgccgtcaggcgagcaaagcgcccgccgtcgggcgagcaagcgcccgccgtctggcgagcaaagcgcccgccatcaggcgagcaaagcgcccgccatcaggcgagcaaagcgcccgccgtctggcgagcaaagcgcccgccatcaggcgagcaaagcgcccgccgtcaggcgagcaaagcgcccgccgtcaggcgagcaaagcgcccgccatcaggcgagcaaagcgcccgccgtcaggcgaacaaaagacagtgcccataagccacctcttgtgcttgctgccgcctcgtccgcgctcctcctatcagactcaagcgcaggtaaagagtggactccttctggatgttgtagtcggcaatagtttgaccatccttgagcgtttttcctgaaaagtgcattagttttcgctaattttcatgttttagtaattcttacttacattccttattattacaataaa

SEQ ID NO: 75363 - DNA, 1098 bp, Heterodera glycines
atggatcttccgtcttcaagcggtaccgtggagttgttcgaccgagggttggcattctctgtacaggaacgatacggtctacaaacggctgcgacattgcgacaaaaggacaaccagtttctcacaacatcacatgccttcgcccccactgaaatttctgctgatgctctttttaaatctgtcgttgctacggcaactgtgcaaccacaacaaaaatcaccaccatcatcatcattatcatcggcatccccacaacaacaacaacaacaacaatcatcatttttggcatcggcaccaccaccgccacaacatcgtcctcaccaatttattgattgtgaaggaaggctcacaacacacctaataatagatgagggcgaagagttagaagaacagcaacaccaaaaccaacaatattcacctatatctgacaatccatttgagggtgtctcgcaatcgggcaccgagatccaaatcgcaggcttaatgacttctattttaaaggtgtttttttaaaatcaataaaaaactaagtttttaccaaaaaatgataacccacgggaaattgtaatttttgtaattttgcgtttttcggaaaagaatggaatttctttctggttatgaaatttttgaaaattttgtttgagattttggtttccgggtctattaaaaacctcaattaaatgattgtcaaaaataatacaattagttaaaattaatcataaaatttaacattctgacgtttcccacaaaagtttcaaaaatacgcaaaatcctcaatgaacttatcaaaaaacacaaaatgatgataaaaatcctattgtttagcgtatcccctctacttccggctcatcaacctcatcaaagtctggacatgaaattcggaagcatgtccgagagttgtacgcagaattgggcgagaaaaatgagcagcaacgcgagagagccaaaaacgccattgagacaaaaaatgaaggagggcggaagcgatcaactgccgagacagacaaaataaaaaaaaaagtcatccaacatcttaaatataaacattctcatgagtgttcgttatgcaattctattcacgctgcttatcaaaaataa

SEQ ID NO: 75364 - DNA, 267 bp, Heterodera glycines
ttgaatttcaactctttcaactgcatcccaacggcacccgcgtcaaactgcgcccaattcccgtctgaattactgtatcagaagcattttaaaataattactgtaccatggcgagtgggagaggcagctttagaatgccgcatactgtaattttggaataccgtacccaatcaatcacacattcgcatttatttctcagctgtttttgttgcacaatcaacacaaatcatttgataaatgattggatcatcaaaatgaacaaataaa

SEQ ID NO: 75365 - DNA, 840 bp, Heterodera glycines
atgtgtgccaagcaccaggcatggttgaagaagaatggaggaaagaatgaaaaagcggcgaacaacgtccgcgttggaagagttttcctggttaaatctgagaaccagaggaagaatggaataatcgatgtaccgattgatgtgaatggcaccaaagtggatttcattgctgatttaggcactgagggaactgttctttgtgaggacactgtgcgccaaatcggagctttgaaattgagccgttgtcaagaacgtgctcagtaccacgatggcacaactcgtccattcgttggcaaaggaaagacaactttttcgttcggagaccgctcatgctatggacatttctttgtttccaaagacggatccaagaatttgctcggattggacatgatggacagacttggattgtcggactccatcagaaatggtctgaaggacaaattccgaactgaggcttccaaagagaacggagcgagccaaaagaaaaagaagaaattcttcagaaaagacggacgtggcaaaaagaagaatttcttcgctgtgggagcgaatgtgatcgccagcttgggtgatgagccatggcgtgccggacgtgtgatcagccgaaaagaaggcacttacgacgttcaatttttggacggcacgactggagaattcccggcaaaaggtgtacaaccgtacaagccggatgaagatgaaaatttgaattttcttcttgacgggtttggtctgaagagagcctcatccggtggatctatcgggaagcacggcagcgatggccgacgagatcaaacgaaagatgatcttcgagaagcttccgactgtggacacaaggcataa

SEQ ID NO: 75366 - DNA, 756 bp, Heterodera glycines
ctccattcttcttcaaccatgcctggtgcttggcacacatcctttccaagtggccactcttcttgcactttcggcaaacggttttttcatgtcgacaattcctcgacgaatggctcaaaccgcatcgccaacatacgcgttgcgatcgattgctgctccgtgttcctgtcgaaatgctgctcgcattcgacgaaagatcagttcgttcgtttcttttttgccttcaatttggtcgccatcaagtttcgtgagcccatcggttgttgttcgaggacctttgcttcagcgatggtcgactggtacatttggaggtcttcgacgactccatcatactcgaccaggtcaccatccgctgcaagcttcgaaaggattcgctttctcagctcggcatccttcggtgatttcagtgccgtcaaaagcatgaggcaagaaaattgctcttcgttgagcttttcaaactgaaaatcacgcaagagtcgcttatgtctgttgataaaaggacgaaagctttcatcttcgcttttcgaggccctcagacattcatagcgatcaatccaaatggattgtggccggctgaaggcaatctttaggcgctcctctgtttggctgtagtcaaaatcgatgactttcttcggcagacatgacttgctgtactggctgaaagccacttcactcagcttcgtcatgagcagcttgacctttgcttcgtctgccagttgcggtgccgcacagtcgagggcaaaattgaagcgttcc

SEQ ID NO: 75367 - DNA, 711 bp, Heterodera glycines
atgggcgacgcaatccaacaactcactgcggcaatccagcaattattggcaaatcaaaatggtgcgccagccgcaaatgcgcatgctttgccaacgcttccgaccatcgactgttttgagccatcagacgatagaagcatttccgattggttggaacgcttcaattttgccctcgactgtgcggcaccgcaactggcagacgaagcaaaggtcaagctgctcatgacgaagctgagtgaagtggctttcagccagtacagcaagtcatgtctgccgaagaaagtcatcgattttgactacagccaaacagaggagcgcctaaagattgccttcagccggccacaatccatttggattgatcgctatgaatgtctgagggcctcgaaaagcgaagatgaaagctttcgtccttttatcaacagacataagcgactcttgcgtgattttcagtttgaaaagctcaacgaagagcaattttcttgcctcatgcttttgacggcactgaaatcaccgaaggatgccgagctgagaaagcgaatcctttcgaagcttgcagcggatggtgacctggtcgagtatgatggagtcgtcgaagacctccaaatgtaccagtcgaccatcgctgaagcaaaggtcctcgaacaacaaccgatgggctcacgaaacttgatggcgaccaaattgaaggcaaaaaagaaacgaacgaactga

SEQ ID NO: 75368 - DNA, 1133 bp, Heterodera glycines
atggccgatgttgaaatgcaagaacagagtgtgccacttaaaaatgccgagcaacaacaaccaacacaacaacaacaaatgaccacggaagggacggaaacaacagcaacaacaactacagtaacgacgacagtaaccgcgccgggcactggtgtcgccgttccccaacaaggggaagaagccccgccggcatcgaaaagcaaggagaaaaaggggggaggatggttcgcaaaaaaggtattgtaaattgttttgttcgaacttgctgaatatgctccgaccagcaaatatttacttctaattacacaaatacaactcatacgttagttagctgaaatgcgtagagttatgattaggggccaattattttcatttttgcctattgtacgctactgctttttatatttaattgatgctgaatattaatcatgtatgtaggtaaaataaattaaatttattttttcatgaattatttaattttgtttgcttaattgaattgctttgcctttttgaagtggtttgtgcccaaaaatgggcgccttttcatggtttagctagtgtccgggattttgaaccagggttgacgatgaaccaggactacaatgaaaacgcgtagtttttcggtactccaatttcggtattttccaaaataaaacctgggttcgggagtcctgccggtcccttatgggctggcattttccttataccagcgatcagttactactgtttgcttacagtaataatacgcttttaagaagacgcaaaagtcgccgcatgatggtggtgatgaggaatccgaaaaattggttagcagtgacaagaaagcgaaaaacctagcagcagcagcagcaggagacggaggtggtggtgatgagaaagaggctgcagcagcagagacaaacaatgtgaaggatgaagccaagaaaatgaagaaggacagcagcaacggcacaaagcagcagcagcaacgtgccaaatgcccgttcagtctgtgccgtggtgcgcgaaaggtggaggaggtcggccatgccgagcagcatacgacggcgtcgcaatggggcgaacgggagccgacgccgacgacgacctttcgctttgaccttgtccaacgcgattcggccaagctgcaggaa

SEQ ID NO: 75369 - DNA, 642 bp, Heterodera glycines
atgtgtgagcatccgcgcgaaggacagcgccaaatgaagagaatgtgagtaaatatagttccaggctatttttggcaacctgagttttttctgggcctgatttttgtatagaaaatagaaggcccatttttcaaaacgagctctaatcctccatttgcatgaaaaaataacaaagttttggtttcgggattccgaaatttttcgatgggattttctgaataatctgaaaaacccaatcaccataaagctagacatagactcgaatacgatggcaaattttttttcaaaatccactacagtaaattatgtgccgatgtttgctacgacgtgctcgccttctttgggcctgtaatgctcgggctcggaattgcgctggtcagcggcaaattcaacgcggtggccgaccatttgttgagacgaaaactgtggacagttggccacattcaaattcgccgtgccaaggacggcattgattggatgttggacattgtcaaggattaccaagacgcgcagaaagccgtcacatttcccgtcgccgtgtcaccacttccgcttggcataacagatttcaaaagcatccaaataaagtggaatattttagtgcattcatatgagaaacaaatatgactgtgaccagaaaaa

SEQ ID NO: 75370 - DNA, 1228 bp, Heterodera glycines
atgatgaaccgcaccatgtttcgcccaggagttcaggagtatgttcttatgttgttttattttaaaaaatgggctgggattggagaatgggttttttttttgaaattgcactggaaaaaaacatagagacaaaaaaggctaattcctgggattgaaagaatgttaaatttgaacccgattttggacacaggtgctagtgtttgaggcgcgcaaatgtggggtaaccggagagggaggaagggaggtccccagatccgcacgcactcatatttttttcaaaaaaatcaacttgctcaccactttatccgaatggagtagtgatcgggcagcagcagcaggacctccttctgctaaaattatttccatgctgtccgtgaatcagccagcgtcttgcagtgtctgaaaaaatgattcttttttagcttgagcgtaggtggtgagagaaaataccacctaagcctcaaaaaaaaaaaataataataattttttgtcctttctcggcctaaacggaaggttcgaatggaaaaaattgaaaaattttatatattaaacagcctgtgtctctgacaattttgaaaaacttgacatttcttagggtttaatacatttttttgaaatttgggggatgtgggggggggggcaggatgaagtgcacacgttcaaaagcagtgttgacaaatattttgatatataaattaaaatttaaaatctataaaaaaatttaggctttttgggcacccagaaaggagcgaaattaacgcaaatgacaatgacgaggatgccgaactgttgagcgtgagtgaagcaagcgtggctagtgatgaaagtgaagaagagttcgaggacgacagcggcggttttgtggtttgagatcagaatttgatttgttttttaatatttattttgttggggaagtttcaaccaacccgtttttgtattggtccgtattttttttgggttgaaacctgacgacaaacgaggtcaaattgatgaaaattttagattttttggtgttcaatctcggaataaggctttttatgtcattttaaatgttttgggaataggttaagttaaaaccacaaattttcgagtttagaaaattaaaaattttctaaattcttttggactcatttttgatcaacaaaattttttttcaaaaaaattatgaaagcctgcgtatattaaaaactgtgaacactcgcctaaaaagcatcctgagttgaataaa

SEQ ID NO: 75371 - DNA, 71 bp, Heterodera glycines
gttgagcatcatctgttccgtcgtctacggtggcgcccgtccaaactgttgctgtctgttgttgaccgatt

SEQ ID NO: 75372 - DNA, 1370 bp, Heterodera glycines
tagacaaatgtggtgaccaatttcatcgctggcggcgtcggcggctcatgcgccgtcatcaccggccatccgttcgacacggtcaaagttcgactgcagacaatgccaaagccggcgcccggacagccgccactgttcgccggcgcgatggactgtgtgcgccaaaccatggcacgggagggattttttgtgaggtttttttgaaattaaaaatttggtcttctaatccgcttccgtcacaaatggacagttcaaatatgagtttttctcactaaaatcctatccaacccttaactcatcgaccgttttatctgaacaatagtcgcaatttggttgaaaaagcacacttttcaaagagttgtgaggtttaaacaactgacgggttgtgaataaattcggttttggtgggatttcctgaaaaaaaaatctcagaaaattttggagatttgttttaatctcggattaattccgccgaatttcggtcgcatttgatcgccaagtaaattcatttgctgttcattcatcagtcatcctttggttggggaaatccacttgttttcttaagtggctgaagtgaccccaatttacggcactcacattcgttcattcattcaaatgatcttctctgcctgccgatttgttccccgctcaaaaaccagcagctctcacataacgccaaacttttcgttttgtctggggccatttttgttcttttttgaattgaaattcattttgaagtgccagacttcaatatttagattctttcagccttttcggcagaattcgaaggcaatttcccaaacattaaattttcaaacttgggaactcaaaatttccagaaattctaagtaattcccgcactttccaatacaatattcaaatccggggggggggggggtaaaattacttgctattagtgagaccttcggcgtaagctttaatcccatggaacattcaaatgaatttgattgaaactcccgaaaatgccaaccgctcttaattaaatgctaaaactcgagactcccgaaatttcgtcaaaatgccggcaaattctttcccgatcaaaaagccatatagctgcttcaacatattgctaattacatatgaaccaaccacaccgttctttgtactctgatcgcactcagagtacggcggcgggggcgggcggcgcgacataaagtgcccgccacccaccgacggcaccccaaattgcttcttctccagaggcggcggcgtcatttgttatgtgcctatgccccgctaatgggcgccgctggcgcctcattaggcgctggctgctctcactaatcagtgccggtcggtcggcgctatgaaaccatttgttctcagccggcggcgctctcccaccc

SEQ ID NO: 75373 - DNA, 705 bp, Heterodera glycines
atgaccaagctcatgcagggtggtgcgggctttggtaagtcgccccgttctttcgcctctttccatgctttcggcaagccttttttcgtaccggcgtctccgtcgttgtgctttttgttgtccagttaaagcggccatagttagtgataatttatttaaaaataacagaattgtgcagatctgaattcgcaagccaatatggcaagacgattaagcaacaaaacacaaaaacaaatgcttaaagatgcaaaaaacacttttttgtttgtttgtttttttttgcaatttacgacttgggtagaagcgtgacatcaatactcatttttgagtgtcagaacatatcgcatcaacagttttcgaatatgccattacagtaaccttgcgtttcaaaaaaaaagtttctgatgccattacagtaacctcgcgtttcaaaaaaaaagtttcaaattcttgcgcttaaatggcagccctcaatcggctacggttcgctgagcattaaaaaaaaaacgattgataattcaaatttgcacaaatttatctatcaacttcagaacacgcagccaatttgctgcatcttttcagaatacgtccgctgttgttcatttcctgacaagcaattcggttgaactgagcagttttggagggtaatgcgttaattgtgtcaaaggcaaaattttcgactgcttttcgtttacttacaaaaaa

SEQ ID NO: 75374 - DNA, 926 bp, Heterodera glycines
atggccacttcctccacaggcaatgtcaaatggtacgagtaccatatgacagcgatgagttgccgagccttgacgagttgccagaaatttaagatgaacgcaaacggttcaacgacattcacgaatttaaaaaaaatcggtgcttttgatcagtttacgcccccccccccctgtcgctacgctcttgcggagatccgaatttgactaccattttcgcccatgtcgaattgcgaattcaaacagcattttggaaaagtacgaggggataattttctgggaatttcagccctcatttgagcagccctaattggtgcatttaatgtgaaaagtgaaagaaataaaaaatatttttgacggaaagaatcatcaaaattaacgagtcaaaaaaataagcatcaaaaaatggaacagcagatcaatttgtccattcaataaatatttcacttccgcacagttcgacgccgcttctttttacctctttttggtggggacaataatggcctaaagaaatgccaaaatctattttttatctcgaaattttttttcttaattcaataaaagaatggtaatactattctgttttggcctcatttcattttctttgcccgaatttgaacaaaaaggcgaaaaaaaaacaaaaaaaaaattgtgaaattattaatcgcaattttaatttttgatttttttaaggatatgctcaacatcggtgtatttttattaaaatcaaaatttctaatttggtattgatttaacgtataggaaaaagatataccgtacgaagtaaatatattagagaccgagccggaccggatccggtaccggatttttctggatccggcaatccggtccggcgattttgggaaaaatctggattgaccggattaccggattatgagagaccggatccggaatccggtcatttttga

SEQ ID NO: 75375 - DNA, 132 bp, Heterodera glycines
atggacggacgaaaattcgatcaatttgaacaatgtcagcattcatttgaatggcgcaaattgcatttggtgagcaaaaattggataaacatttaaaataattaaaattttagaaattttgattttaataaa

SEQ ID NO: 75376 - DNA, 1384 bp, Heterodera glycines
atgtcgcaaaaatctatttctggttttatttctaaaattacatttgaacaatcatcttcaactcaaaatttcgatgaacaaatttcaagtgctgaggaagcaatttctgatttagccgtttctgtttcgagtgatgagttttgggtgaattttagcaaatgtacttttgtatattaaattgatttgttcactgagattgctgagttgaaacagacactgaaagagctcgagggcgactggttcaataggaaaaacgtggatgaaaaatggacggctattttcaaaaatcctaattttgtcctgctcaaatcactagtctctgcaattctatcaattttcccttccaatgccgtttgtgaatctgtcttttctgttctcaagaaaatcaaaacggacgagaggaatagtattggcatacctttgttgaattctcttatttcaatcaaattcaattcaaaaatttcgtgcctaaatgttcacaattattttctttcattggcaaacttgctcaaacaggtgaaaagtggtgataaatatattgtttaaatgtttttgacgttttttacagtgaacaattgacctaaaaaaaattgccgggtttttgccgggtatttcaactggtttgccgggtttttaggttttggcgatattgaaacggggcgaaagcaatgccaatttgagaccaagttgggcgccaaaaaatgggagaatgtccatcaacacgtcgttgcacacccaactgaatgaaatgcgaggaaaaatgattgagcgcttttatcttaatttatgttcaccaattggggcggtagaagaaatgaggcggcgattgtcggcggaggaaaacttgctttttttgtgacgggcggtgccattaaaaataataataattgcccaaatgaaattttgtatgaaaaaaaatactcgagaccgagatttccaaaattcgccggaccggtaccggatccattaaagaccggtacaattcccggtcccgtacaactctatttgaatcaaatcaaatgcctccatggacggtaaaaaaatttaaaaagcgccaaaaaaacattggcgtaaaaaacataatgccaataattatacagaatttcatcatttattttagagaccgagatttccaaattctccggaccggaccggactggtattttaaaaaatgaccggatcccggatccggtctctcataatccggtcaatccgataatccggattttcatattgccggatccggaaccggattccggattggtaaaatatttaaatttcgatgttaatttagggaaaaaacccgcaaaatgtcatcaattatatgtaaaatttggtgcaccagaaaatgtcgccatagaaaagacaatgcgccgaaaaaaaa

SEQ ID NO: 75377 - DNA, 1526 bp, Heterodera glycines
atgacaaagaaactgcgcgccatggaagtctcttgggcattgggcgccgctttccatctgctgaacacgtaccatgacaacatgaagcgcgaacggcacggcaggcggcactcgcgcgaggagttggagcagcgcaggcgggcagtcgaggagcgcgaggcggccgcagacgcgcgcattgccgagttggcgaacagcaggaacttgctgaaatcagtgggtgggccttccgagttatgacaaatttcgttgggttttaaaaaaatctacggccaaaaatatttagaaaccaactttgtaattttctggtcataaattttttaaaacccaagaaattttttgaaattttttcccatttgataaaaatgtttcaaggctttgcctgcatggctgttgccaagacaaccgttaacgaaccggtacggcctcttcaatttgctcactgatcatgacgatgatgcatggaatggctttttcgatgcctatgtgcgccaatacgttggtgtccgtcgccggccataatttcttcgacgagaacaatgtgaccgtccaatggaggccaaatggacggcggattgagggcagttccgggtccggcacagtgctgtgcgctctgtgttcgctggcgaccggccgtttgtgcagagccgacacggcgataacggcgagagttgtttcggctccttggctggagagcgttgggggtttggagctgaaggcggcggctgcgcgaaatgcgcgggtgagacgcctggtgatgtcgcggactaatcaagtgaattggcacgcattgccagctgctgcgacggtcggagtggaaccagtgtttgtggagggcgttggggaattattggaaaatgtgctcgtttgatggggattctcatttgttgttttgcttatcgggcggcccgggattggtgggttttaagcacggcattgtttttgggatgggtcgcccggccagggctgcacttaccaagttcaataataatgtgagataaagggaactgaacattttctaaacaaaaaatgtaacatactcaatcacttttttaaacacaaggaaattttaatcactaattaattctggaaacaaatctttttgtgcagccctggttattagtgcatatatatcattcacccgatttttaaaaatttaaaacaatgatttaatttagttggttacggtctgcactatgtgtcgtactgtaccagctaatagcattgtgcactttgtagtaaaaaaattaatttcataaattttggaaggtgaacaactttttaatttcgggcttaatttaggtgattaattttaagtgtaagggtgaatgaatagatatgcctaacttacgttatcatattttttgttttgtttcaatttggataaaaaacacaaaatggcaagttaaagaaagacgtcaaaaaatatatcaaaaaaaaaaaaatcgttttccaccgtttgtgccatccaatttgtgccaattcgtccgcacttaaaatttaaaatacaaaagagtatattcaca

SEQ ID NO: 75378 - DNA, 392 bp, Heterodera glycines
atgttcaaaaaagggttggtttttgaatttctcagatcaaaaactaattttttttttaaatttaacaaaactttttaaaattttacaatataataaacagggctgcaaaaaatatgcacgaaaagtggtcaaaatatgcaaataaactcgtgaaatatgcaccaaatatgcacaaaatcacaaaatatgcaccaaatatgcataaaaaacatgaaactgaggggtgtaaattcccggtcaaaacggtcaaaacccgggactttggggtactcagttgtccgcttccaggtcccggtcccgtggcactctacattatcgagtacagttctggcaccatttagtgctgttcaattgaattgaaagaagacaaatcgttctcctctggaaataaa

SEQ ID NO: 75379 - DNA, 1194 bp, Heterodera glycines
atggttcccgagagtgaatatctcactttgataaatctgctgaagaggggaacaacaacttctggcccctatgaaagtgagagagctgaactggacacagacatccaaaaaaatttggccgatcataaacgcggagcagatgtgcaaatgaagcgccattcctggctgtataagcaaagacggcagctaaaagatttagcagaaaatagaccccaaaaggtggtcattgaaaacctggcagccataccgcccaatattgctccttatatgggaattcaggctccttccgccaaagctaagttagagacaaaagttaaaaaagcatcggataatgagcagcagaaaacgaattctttttataataggcttactgcagcaggtgatgaacggaaaagaaggagtcgtaaaaggaagttaggcaaaaaaatggtaatgaacactggcgatgagtctgatgccgacaacaatagtggagataatgccgatggctccttttattcttcagcgaaggatgatgagctcgagcagacatcttatcataaaagaaaacgagcaccttctttgttgacacaaatagaccaaacagaccctgaacactatgaagaattgaagaagattgtggaagcaaggctcataaaatatggaattgatgccaaaacgggcgcaattttgaccaatttcaataaaccggtcgccggatcacattacctgaacgcaattaagtacatgacaggccagctgaacaacaagccgaaaggacatagatttttaatccaacgcttgaacagggaaaaagaaattttaaaattcttcccacatctaaaccaatcgcagcagtccggagagggaatcaagagatttagagccaagaagaaaaaattcttagcccttgttcgcatgcaaccccctataaaaacaccgggactacaccgaactgcctatgccgaaaaactacatgcaaaatttcctccaaaacatcaacaacaaaaatttacgtttaagccagcaatatgggcaaaactgtagagaagctactagagcaaatctattatgaccttcgctccccggcaagctacgcaggggttcttaaggtctggcaagaagcaaaaaaacataacaaatcaattggtattagcgatgttcaaaaatttttgcatgatcagcgaacctacactctgtttaaaccgcgtcgga

SEQ ID NO: 75380 - DNA, 1802 bp, Heterodera glycines
atgagagccctctggcgtttggcgcgggccttccccggaacactcatccgctgcatctgcttctacgccgcgcaagccctggagatcgaacggttggtggcccaacaagaaatcccggacattttagtgacaacagcggacgcgacacagggccacgagtcgtcacttgccgtcctcgtcacaacatgctccgtcttcgacagtggagcagactctcagcctttctgggctgatgccgcgcgggtggacgtcgccatctctcgcgccagccatggaatgatcatcattggcgatttgctgctgctcaaccggacggagacatggcggcgctacctggaccaagcgacaacggaaacgacagtggtcggcccggagtacttcgacttcgagcagttcaacaaccccgacaactactacgacaaggacggacagctgatctcagccaacggcggtgcggtacggtcagagcatttctacagcaagtacggtaaaaatgtgtggtacaacaactccggtgagtcaaggggggcggagaacagatatcaaccttatcttcctcaaggtggcactcgggaacgcactcgtggcaaagcctcaacttctggcgcgcgcagatgaatgaaagccaagctgtacgacttcagccatggtcggcaactgcgcatggacctgctttcattcccttcccctcacgttttaccattttccttttgttttgactctctctttctcactctctctcgtcatccatttcttaaaattatcattcattttgtctttatttccgaactgttaatggcctttctttctcccaattcaaatttctcaaaaatgcgtcggtttcctcacactttctctgacccattctctctcttctctcatcatgcttttacatctcgttcccaaaccggaatgacccctggttgcttttctccgatttcccatgccatccatctgagatgaaggtggaccactgctcattattgtaatgcgcagcttggccgtggaagttcggattggagagatgaagggcgaagccgagagtttggtccattcattcactttcacttcatttttcatttaaggatcggggacgatcctaaggaaaggggggagttgtaaggattattcgacgcatttccctcatttaattattccttattggccattatcaattcaatcacatttatccattttcacacgtttttccttttctcattgtaatgtttctccgcccattctcttcgtatttctctttccccagtgatcagttagtcagtagttgtgatggaacagacttcaattattattccgatttctcgcttcgtttaaatccaacatcgaatgaataaacacatctttaacagtcaatgagtcgtttgggggttcggggcttggtcaaaggcgccttggcttttccccattccctcccaaactccatccgggataaacggtgcatagttggtctgggggcacagtgcgcatccctcactataataatttaagaaaattttgtaataaaatttctgtaaattatcaaatattgttgatttatttgaattaataggaagcgagtttagcatagatcaagaaagaaatttcaagatgcataagtgtttaaattgtgaaattgccaatttggcattaaagaaaattaaattcgcagaaaatatggaaaattgttaaaatgtaattaaataaatcctaataatcaattgtaacaaatattttatcttttaatattacaatgtttcttttattcagtctttttaaatctaaatttgttatagaagaaaatatca

SEQ ID NO: 75381 - DNA, 921 bp, Heterodera glycines
atggacaatttgctgctgtttccgctccaaccgcagtgccgcacccgccctttgctcgcggccatccgaaaagccattggcgcaatggcaaaccaaacgcaatgccaacaaaaacaagcggaactgacgagtgggttcgtctgtgccaggcaattcgttgtccgcaattcgcccgtctcattttcgctgctcatcgcggacgaccaaattgcgtggacccactgttttgtgcaagtattgtacacatttaccatgccactttttaatggggataggtgctaaaatcgacggaaattattattattttttaatttaaatgaattttgcatgcttttatcagccgacggagtaagagaaaacagaaatttagaagtgggaagtgaactggtatttttgaaaattgagacaattttcttacaactaattgctttcgttcaaatttttttacaatttccaccagcgacgtccatcgattgccaaatttgataaaatttgagtttttctcatttgtggcttacaattaaaacgtaattattagcatttaaaaacaaaaaaagcaggcataaaaagccaatttttcagtattgggtggagcgaattctgcccctgttcgccgattatggtgccatcattttcacggccgtccgcccaacgcccgtcgagcagctcgaacccgccgcacgccgtgtgatgcatgcgctttatcggcattcgccgttggccaccccctggcgctgtgccgtccattacgcgtgggatcaaccgtttggccattgggtggaccggttggcattgatgaggtgaccctgactgagttttaatagggtacggtgcagtggagtttggaactcggaaaaaatttttaagaaatttcaagaaagtttttgaaaaaattatcaataatttcaggaaattttctga

SEQ ID NO: 75382 - DNA, 2224 bp, Heterodera glycines
atgcaaaaaccgataatcgtaaatataattgctctcgctaatctcggtaccgggattaaactaaacgctctgatgatcaccgaatgcgaatttaaatataaccctagaaaattcaatgccgcggttatcaaatgtataagccccatcaaagccacggcattattatgggaatccgggaaaatgatatgtctggggacgaaaagtctgatagactgtgaaaatgctattaaaaattttatagaaataattaagggctcggggtgtccgggggcttcttacaccggacacacggttgaaaatattgtttcgacctttaaattcggacgtgaaattgaactgaacgagtttcgaaaaaatcgtcgtgcattttatgaaccggaaatattttgcggtttaaatttcaagcggggtaaaagcatgactgctttaattttctggaccggtaaagtcgtaattacgggaacaaaaaacaattctgaaattgacgaaatgtaccattatatgctgccctatctgaaaatggctcaaaagaatttaaagagacgataaaaattttaatttattgggacggtcccccaatttatggttctgttgtgtatttattaattatcgattactacttgcggcatcagcatcggcggggagggtgggggtagtgtaattatcgattaatttgcgcggcggcacatcgacggagcggatgagagtggcggtctcattatcgattttttttttgcgcggcggcgacatcgatggggagggtagggcggtgtcattatcgattttttttttgcgcggcggcgacatcgatggggagggtagggcggtgtcattatcgattaatttgcgcggcgatgcatcggcggggagggatgggttgggcaaaaaaaagcacccgtgcggttttgggaaatcggatttgggtgggcggcaacttcaaagtggtccaatagattttggttctgggcggtaactttaaagtggtccaataggtttgggttctgggcggcaccttcaaagggctgcacccctcccataggctttgggttcgtgcggggcggcaacatcaaagggctgcgcccctcccataggcatgggttcgtgcggggcggcaacatcaaagggctgcgcccctcccataggcatgggttcgtgcggggcggcaacatcaaagggctgcgcccctcccataggcacgggtccctgggcggcaacatcaaagggctgcgcccctcccataggcatgggttcgtgcgggaaacacccgtgcgaaaccgttcgcttttggtactttatactactgagggcaaatattcacaaactctattattaaaaagaaggcagctttcatgcaaaataatgattttcaatgaaaaaaaattctcatttatttctgaaaaataatttttggtgccaataatttgtataaaaatgatcaatatgacagtaattgagccattgatttttagccactcaatttattagctaagtgaagaatctacttatgaaaatgggttttattttatagccctaagagtttagaatataaaatttcaaaaatttcgtctagtatgaaccaagttatggccaaaaaacacaagcaaccaggttttcaaacatttttggccctaactttttagaaaattaattaaatttttgaaatttgacaggctactagagaaaactaatgctatcgaatgatatcacgagcagttaattttgttggttccaagaaagttttaaacagaatttctggtgatcgaaattattttaattctaattaaaaaaaaattttagttataaattattttattttttattttcttgctatcattcgaaatacgaaatataagtctaattggtaaaatcaatgttttaagcatataaatcccagaaaatctcattctttatcattttcaccctcacaattaatacatttcgaggcgttcgggggtaaaattagcctttgccggccctctttctttctcattttttttttgaaaaatatcacaaaaaatgcctcaggaaatagactaaatttgaacatatacatttgaatttttaatatttacaggaccctcactaaattttaaaggaggatttacaggacttttcttgaaaaaatctcgttttttagaatacagtcttgtaacaggagacataaattcaaaattccgaccacaaaaattattaatattgttgattaagttgattgttactgcta

SEQ ID NO: 75383 - DNA, 550 bp, Heterodera glycines
atgcctcctccgctgtcacaaaaaaatccgatcacagttcaactcaaattgaccaacagcacggacacatgcagcgattactcgttggaatttacgaacacttgctttaagctggtggaccaagtcaaattccatgtgaaagtgccgaaaacggtgacattttcatttttaattgtattaatttgagtcaaagttcaattaaaataaaaaataaattataaaaattctgagtatattttaattatttgttttattgtactttgcggtgtccctaggagttcacaactaatatatataatatatatttttgtcagtcaaaattggcaaatcattggggcatcgttccgcttgccactgacaatggcactgctgatcagcaacagttgttcacattgcccaacaatgtgcacctttacccgggcaaatcattcgcgtctgccggcatttcagtgaacggtgctgaccgtccggaaattgttattttggatgtgcaatcggttctttgcacggaaaagcatgacgatgctgccactaattgagcagaattaaa

SEQ ID NO: 75384 - DNA, 709 bp, Heterodera glycines
gtataattgcttaagttaggccggtgtttaggcctaagctttcggctaggcctacgcttaggcttgattgggtctaggcttatgattagcttaagctttattttgtaaaatatgagttgccttttgtacaagttgccattgagccattttccgattatacaaaacatgcagaagccataaaaatctcatccctacttattttatttattaagtaattaatttttctctattttcagtaaatttatgagttcaaagcgcaaattacaggtttcttatttaaaagattggccattaaaaaattgacgaaacccaactcgtacttggccaacacgtactgccccaactcgtactgtttgacaaaaaaatcgtcataactcttgcaaagtcgactaaattaaactttcttggtgccattcgataactcttaaagttctccatctacatgaagcaaaatattagaaaattttattgcttttcaaaatttatgaccaaaaatggtaaaaaaaattttgttaattttttcaaattttttattctttaattttttcacatttcaattaattgtctcccccattggttcatttccaaaaggtaataagcggctaagagagagaggcgtgcgttgttccaacggccgcgccggcggcggggcgcggggtcgcgcaagaattcggcacaaattaagatagcattatttacaaagaaaaaa

SEQ ID NO: 75385 - DNA, 1507 bp, Heterodera glycines
atgattggcttaatcttaaatgaagagtcttgcagttttctccgccaaagcatcgcacctacggcacttctttcatgccttaaactgcacattattgagggcaccgaattaatcccggagttttctcgcaatgacattggggaaacaactaacgaaaatgaaattaatcgatggcttgtgaagcatctcacaaatacttctactccaaaaatttacaaatgtcaaactgaagatatcgctttcaacgtttccgcgtttaagacggtattatgaattaaataatatattatctttatttttaaatatcgctataggagttaaacccaacttttctttttaaatttaaaaatagaaaattatttttaagggaaaaattcatgcacctgttgatttaaattttattggagtccaaaatgacgagtggagcagaatttgttttttaacagatggtacgcatttcacgttatttattaattgaaaacaattttaaagcaaatttgcgctagttaaaaagtgacagattttgaattttatcaaaaacctaagggggggggggggtttgtgttttgcaaaatttttttgagataaaaaatcgtgaaacactttttactagccataattgtgctgttaatgcttaatattatcattagtgtaaataaacaaaaaaaaaagtttgaccaaaaaagtgaaaaaatttttaaaaaggcccttctttaaagtggcgctaatttttctaatttgcaattagttataaagcataataatatttgaaggattataagaaagtattatgttttttaagtacttttttgtatataaacccaggcgttattattataaattattatttttatccaatttaattttactattaaataaattcagcttttgctttcgccgctgacctgaagtgcctgtctcgaaaaacgatctttttcataatgtatttatttttattccaacacatttaaaaaagattaaacaatcatttaaaaaactactttagtttcgggtcagattccggctcacttatatagattgaattcatttcaaaattaaatgagcgttttattgctatgtattcactctccgaccattcgttttctttacaactgattgagtctcttcgcaatacccaaagtccattcggattgaaatggttttcaaaacgacgaaacgtcatccttttctcgtgttcgcgcgttgtcccattctaatgggttcccagtgaaattaaatgtaaaactaaaatcaaaacagacggcataactgacgggcaattccgcattgataaacacctaaaggcgcaaaaattttaaaaacagtcaaattttgaaaatatcatttttaaatcttccaattgcctttcaatgttggaaagacaataacatttgagcactttgggacgtccatcgtcgcgcggagtgtgaagccacttggacaatgcctggttttgtgatgcccgggggccatcatacgacggactctcgggaaaaatattgcggca

SEQ ID NO: 75386 - DNA, 112 bp, Heterodera glycines
gcactttttgtgttgtatattttcccaacctcttttttcattttgtttttttttttttgctactttttcaaattgtctccattccttttattgtataaatttattctaatta

SEQ ID NO: 75387 - DNA, 444 bp, Heterodera glycines
atgtccaaacaatttctgctgttggctttgctgcttttattgctgccattggacactttgcaagaatgcgtttggaacgatgaaattacgctgtgtgttgggctttgttcaacaggatgcggacaattaagtcaagcaaactgtgcttgtgcaaaggtttttttttgaattttggcaatttttaatattttttaattaaaatcattttttatttatgaatttaaagcattcctcaagggaggaagtccacggcacctaaaaaacgcttcttttattaaagtttgaggtgttcattttccaattaatcattttggcacaaatacaaaaaaaaattcagagaagaaaaaacaaggaaaagcagaaacaacagcagaagaacaaaagtgtcgaatgtgatgaagacgaaaaatggataataatattaattaaataattattaataaa

SEQ ID NO: 75388 - DNA, 986 bp, Heterodera glycines
atggccgtgcacggggcgttgttggccaactttctcagccagggccaagtgtgcagcaacgcgtccaaagtgttggtgcagcgcaaagtgttggagcagttcacccaccaaattgtgcatcagacggagaacatgcgcattggggtgggcatttggggggggggggaagaaattgggagagaaatgccaaaattgtcatggccaaaggttgggagaggcagatagaaaactgcagcagccattagttgacaattgcaaatgtttgttttggcattctctgtttttaggacccgctcaacgagtccacccacgtgggcgcctgcatttctgaacagcacatggacaaagtgcgccaattcatacgaaccgccgtcgacgaagatggcgcgaaattgttgacgggtggcgaacgggtcaccacaatacagggtcattaaaacacaccatttggactaattaggtcgttaatcaccccagtaaaaaggggccatttggactaagtccgaatattaaattgggtgaatctgcctgcacatttcacactttccaggccttgagcatggctattttctgtccccgtgcgtcctcacaaatatcaccccgaaaatgactgtttaccaacaagaaatattcggcccggttttgcttatcattccgtttgacgatgagcaggtgaaaaacgaaggattggattacttttggaaataatcagtgctaattccaaggaggcacttcaaatggccaatgacacggagttcggcttggccggtggcatttttacaaagtctgtgcagtgactaatgacgcatttttctttacttgattattgttgtgtcaaatttgccctttttcccttcagggatttggccagggcccaccaattcgccgctcggatgaacgccggaaatgtgtacatcaacacgtacaacgacacgcacccgaatgtcccattcggaggcttcaatcagtccgggttctctaattaa

SEQ ID NO: 75389 - DNA, 105 bp, Heterodera glycines
aaaaatcatagataaaaatcaatgattttcaaaatctgagttcagattcgtgatcagcgcattttttaagcctagaaaaaatagctgcgaatttttaaacatttt

SEQ ID NO: 75390 - DNA, 801 bp, Heterodera glycines
atggagaagatcgtctacttaaagctgttccaaattgtgctcactttgaccatcttttggcaactcatttcacttcaccaattctgtggcactttgccgacccaaaagtgctgtcgctgttttttgttgccaccaattcattttaaatttatgttttcagactttcctctgtcacatccgtgcgggcaattgtgaacgctacacgctcatcggaatggactcagaaactggcgaattcggctcaatgtacaacaaattgcacaaccaactgtggatgatttgcaccaatggccgaccaatcgaagaacagcaacaccaattcatggacgaattggccgcgaaattgcctcccgctggacgccattgcattccgataacagtcaatcagcaaagttgatgcaaattgtgctcactttggcattcttcaacagctccaatggacagtcaaccaatgcaccgcaataccaatactttcacttcttggtcgagaaattgccacccgccggacgtcattgcattccgataacggtcaattagcaaaaagctatcataacgatgaaagcaaatttcatttgtttttcagatttcgccttttgaatggattggcaaagacataaacgccctcaacaatgacactttgttatatttctccacccaactgttcttctcattggtgtcgcttggcgttcttggctatggcatcatacacaaaataaatgttaaattaaaaacctccattcttcagatttgtcgtgtccaaaaatgcctttcttttcgtcacaccccgttatctttttgctg

SEQ ID NO: 75391 - DNA, 1375 bp, Heterodera glycines
atggccaccctgattgtcttacataaacattttggttatttaggttataaggccaacgtaaaatttttacaacaaattaaattttgtgagactcaacaaatccggtggatgcttatcctcgggccggaagaaattgctaaaaattcggtaaaattgcgttacatcccggccaaagacaaaggagaggaggttcgattgggaattggaaagtaaacaatgtgtttttaattaagcttgtcacaatggacaaactgatcgatgttttgcgcgaaaaactggaaaacgatgatgaaaattaagaaaatgtgaagagtgaaaggcgcatttcccatttatatatgattgttgaattggatgttctatgttttcatttatattgtctcattgacgaacaaattgagcttgtttatatcatttgatagtattaaaaaacctttaaacgttcggttggctaattatgagccgtatttagtttctctattagcagaaaaaataatagtactatgaatttcgatcatgacgattaccatatgagctcatttttgtgtggaaaggttgtccttgaaaacgcaaaatcgtgatggtacgtcaaaaacaaatgcgttttaaaacgaatcctttttgtgctaaaattaatttcaaaataactggattaaatataaatgcaactctggatggtgcagggtcgttacttaaaaaccatcataatgggcgttatttaaaaaaccatcattatgtaaatttttgtcgaaaaattatttataactttgctcgaaagaaaccaaatttttaattcttgatatcatttgatagccctaagtgttctctatcagtctgcagaatttcaaaaaatttcgttaagtttcaaaaaagttatagctcgaggaactcgaaaaaccttgattttcgaacatttttggccatctttttttaaacttaacgaaattttttgaaattttgcaggctcataaagaacacttagacctatcgaatgatatcaaggattaaaaatttggtctttttagaaagcaaaattttttattttgatggttttttaaataacgcacataatgatggtttttaaataatgacatagcacccatgatccaactcaaagtatcattactttgttttgaggatcagagctcaccttactttcatgaaggaaggcaaagaggggcaatccctcaattttgtacagtgcgccatattttgcaaataatgggcgtttactgtaattttggcatgtttgttccctcttcccattaaggggggaacagaaacaaatgcttatcaaaccaatcaatgcactgagtgcaatcttctttgctttaacaaacgcgttaaagcaaagatcccaaaggaaattaataaa

SEQ ID NO: 75392 - DNA, 605 bp, Heterodera glycines
atgaaacaaatgtttgccaaggagagaaaatataaatttattattaaaagagaaaatgtaaaatgatttataaaatagcaaataataaaaaataataaaccgaaataattcaatttatgtaaattaattaataattatacaaaaaatagaaaaaaaattagtcagcactttttcataggttttaaaaatgcactttttttgcttaatatccaaattataattacataaatttaaaaagtaatacatatataaattaaaacataaatgcgatttaaaataaaataaaataaatgatgagatggaaaagtacaaaaattaattagcaacggacaacaattccgaaagccggaggagatctctagtcaagagtttaaataaaaataaaaagacaaaatttaattgtgaaatttaataaaaaggaacataattaatttttaaaataaacaacagcaaaaaattaaacatttattaattaaaaaagaatgttaaaaaagcgaattaaaccatgaaaatgaaaacaattattgttatttaataaatgagcaaaaaaataaactcaaatatcagctaaaaatggataaaaaacaattttaatttctaaaaaa

SEQ ID NO: 75393 - DNA, 279 bp, Heterodera glycines
atgatatggtcaatacggctacccgacttttggggatttgcaacttgggtacccgacatttggggacccgacatttggggacccgacatttggggacccgacttttggggacccgacatttggggacccgacttttggggatcccgtcatttggggacccgacttttggtgacccgacacttagggaacccgacatttggggacccgaaatttggggatcgaatgtcttttggggacccgacatttggggattttattaaaacaaaaaaaaatatttaa

SEQ ID NO: 75394 - DNA, 603 bp, Heterodera glycines
atgaataagaccacgctgaaggctcgtttcgggtcggatattaggaagaattggatccatcacagtaacgacattagcctgaatgacttggtaacgaagatgcagcgttatttcgatattaaggatgcgaatgccatcaaactcaaataccgcgaccaaggttttataacaataaattatgtagcttaagtgtaacggaaaataggtcatgtggtattggggacgaatgacatcggtggggttcccactaatcacttacttttttcaaattagtagttggggttgtttttttgcttgtaaattttaattcatgtcatgttcggtattgttgcacaacacttaatgcagagagcgactgggttaccctcgccgacgacgacgatttggcttatgcactcgcctctatggaacttctttacgtggacgtgatcgtcgagaaatatcaattcaagcaagatgaggaaacagttgagaagacagcgccgcctgctgaagttgtgaaggcagtggcgccgccgagggacgcaactcccgtggacaatggtgacgtggcacagctgcaaaagcagcagcgttcttctacgactccagtttcatcgatcg

SEQ ID NO: 75395 - DNA, 305 bp, Heterodera glycines
atggaccaaatagtaactgagtttttatctaaattgggaatggcaaaactatatgctaattgtaagtgaaacttttaagaaaacctgcacaaaacacaacaattataaattaattattgtaatgacaaattcaggtcagagacgaaactttaacgggaaatgagcgaagctaaccactaccgctaacagctaaaaatgggtggtgaaacatatcgtaattatgtaggacgaatgaactgaactcccttctaactggacgaacctagaacaaatgtaaaagtacgattagccaaaggccaacacaa

SEQ ID NO: 75396 - DNA, 1676 bp, Heterodera glycines
cgactgaactcactttctctctgcacagaattcggctttttttaggggctttcacaccattcaccactcaagcgagtattacaacttctcaaccgctcttcgccaagctgcgattcaggtccatcgggctgacaaagtccgacgctcgggtgctattaccgttaaacgtttttccacaggacgcgggactggcggcgtatgatattttgcaggtgttcgcccgtgtcattcattattcatgcatattcgttcattggtctgctaatcacttccattgtccttccaatgcaggcctttctcatccctccgtccattttcctcgtccatcgctatttctccgaaatcttccagttttggatgcacacttccctgctcggttctctcggcccccttggctttgtgttcaacactccgtcccaccaccgcgtgcaccacggacgcaatgtccgcactttgccactctctccagcagcaaattaatgagtattccctttccaggcatactgtatcgaccgtaactttggtggtcggtgaaaaaagcacttgtactaactgctgttttaatattcggaaggtgttttgatcatttgggaccggatgttccgcactttcgaggccgagcgcaaggaagagcccccggtctacgggctgatccgtcccgagcgaagctttgatcagctgtggctccaggcctgaattgtcggcttccaattgtgcttctaatcagttttcgttcgtttttagtttcacactctcaaggaattgttgtgcgacaaatggcgcttaaaggacgaaaaggggcaaaaagtgttccccaaatggacggacaaagtgaaggcgcttttcttccctccgggttggttccctggaacaaaagtgcgtttagcagggcaatctgtgtacttttccgatttgctcagccttttgtcctcagattcgccacttcttccactggacttcgttggatgaccactctttcggagttcccccggtgaatttccattcaaatggcttttcttctcccatttgtatttggcttctcattatttttcgttccctgtgctaatccctcccaacccttcactaattcaggtgcaattgcctgtccaaaagtacgacccgtccctttccgtttggcttaaggcctattgcctcgcccattttctgctgctcctttgcattttcctccacttcgaatacgacagggctcagttgggctatttggacttcacactgaaaatcgccttcttcatttgcacaagtcctttgacaaaaagtcaaaaaacattcgtaaaaatggtttccttttagtgcagtctttcggcgctttcttcgacaaaaagtgggaaatttggcatttttattgcgtcggaaatcatttttcaggaaatttgctccctttttggaaatatttcgttcatttggagtcttttcttattatacgactcgaactatcattgagcacaaaaagcctcagcccaatcgcattttcattgccacacttttcgtcgcctcagcaattgtttgggtcgttgtccttctccgacactttgtccgttcaatttaaaatgcatttcaaaagcattgccattccatttaaggtcaaaaaggaggcgaaggcaaaagtaacggcgaaagatggaaaagaaaacagaacaattggcaaggaattgaga

SEQ ID NO: 75397 - DNA, 1638 bp, Heterodera glycines
atggtcgccaaaacgtgcaattggcctcgctggaagtttttcgactatgtgaacgacagaaaaggacagcagggacaactccatcatgatgcggttgagctcatgcagcaggttaatgcaccaatggatttggttggctacgacgcggacacatttgtgcctcacgtcgttgactactggaacaacacgcagcgacaacaccgctttgctgtgttcatctttggatcgttgggacagtataagccactctacaagtacattgacaacacctacgacacaccattgctgctatatttcaatgaggaccatttcgatggtgtgcagaagcagggcggtctgttcggtcaaccgtactgtttggagtgtgaacgaccttacgataaaatgtcaaggcacaacaaatcttgtaaggcgcattgtgtgatgtgctcacgtgttggaccgcagtttccgtgtcagccaacggatggattcgtcaaggaatgctctaaatgctataaaaggttccgaaactacgactgctaccagcatcatcttcattccaacttttgtatgcggtcaaagatgtgcaaagattgcggtgctgtttgggatgtagcagataacaaaagaaatggcagaaaggggcatgtgtgtggcgagaattattgtgggctatgcaacaactaccacaacactgagcggggatgctacattcaacccattgagccgaaacaacatactccctatcgtattgttgcgtttgacgtggagacaatgcagcatacgttcattggggaatctgaacaacggaaccatttgcctaattttattgctgcgaaagtaatatgcccgggatgcatcgagaatggagactggcaaagaggaacaaaagggtgtgaggtgtgcgggccaaacagaacggtcgccttttgccaacgccgcttcacagaaacaacagtcgacaagcaagtggtcgcagacaatcctttggaggaatttgtcgattggttagtcttccaactcccgctgaagtacgacacttatgtttattcgcactttggtggccgcttcgatatggtgttggttttccgtgaacttttccggcggggattcaatccgagcatgttgaggaagggcaataagctgtatgaaatgaaagtgggcaagcagaagaaacgcaatccaaacgtggtgttccgagactcgtataatttgatgccctgcgctttggctgaacttgtcccatccttcggcttggatgtcgaagacaagccattcttcccgcacatggcaaaccaaccggataactacggaaagcagatataccccacgcctgaagactacttggccgatgggatgatgccggataaacgacaaaaattcaacgtctggtatgaacaacatcagcataaacccttcctcctcgacgaggcgttggcaagctactgcacaaacgacgttgaaattttaaaggcagcgctggtagcgtttcggatggaattctttgatgtgtctcggagggaagaaggcattgtagcggaaagggcacacgaaggaattaaacggcgaaattttggggtgcacccaaagagacgaacttcagcgcaccgacacatccaatcactgaattcgcgacctaacaacaaaattcactaa

SEQ ID NO: 75398 - DNA, 446 bp, Heterodera glycines
gaaaacaatttggacaacggatcatcgacttccatcgttacttaggcgataaaaacattttgaattacggatgggattctttaggctgtccaacaccaacttgccgacttggcatgcgatattgaggccacccgtttgcttgtgtacaatgccgcgcgtctgaaggaatcgaatttgccttacataaaagaagcggcaatttccaaattattctcttcgaatgtggccacgaaagtgacgagcaaatgcatcgaactaatgggcggagttggtttcaccaaagaatttcccattgaaaaatactacagggactgcaaaatcggtctttaataacaaggcaaattccttaatttttgccaatttcagggactatttatgaaggcacttccaacatccaactgaacacaatcgccaaattcattgactccgaatacacccaataaaaa

SEQ ID NO: 75399 - DNA, 962 bp, Heterodera glycines
ccagccacaataaagtcgaacaatggaaaggcggagatgccgatgagtttcagctcaagttccacttcgactttgcattcgcagccattcaaaactttggtttgtcatttcttttgttcattttggcattctgtttggactgacttttaggctttaccttccgatgttgagcttttagcagcgaaaaagcaagcaacaaaagcgcatgagaacagttatttgggggctgttcttcgcggtgagaaaaagatgaaacgatttgtgaggagttgtgggggacaggttggcattctcatggcgaaacattaaaaatggaaggtgaactgcacactttgccaccatccttttaaggtgtgggaggactcatccatggccgagtgggacccaaatgattttcgaattttttgtggtgaccttggtaacgaagtttctgacgaattacttgccaaggtacttgtttttggtttaactctactacaattaataattacatttttaaaaattatattttttaaatcatgatgggcaagatcacgaaagattctccaatcgaactttttccccttttttgttccttttttgaatcgtatgtagcgggataattaatcatatttttggttaaatttttgcttaaatgtaatatatgaagtggacatttacaaactttcaggcttttcggaaatacccaagcttccagaaagcgaaggtggtccgtgacagcaggacgaacaaatccaaaggctttgggttcgtctccttcaaacaccaagacgtaatttctgggaaaaagatgtttatttgccacttcattggttaaggactttattcgtgcaatgaaagaaatggacgggaaatacgtcgggaacagaccaataaaattacgaaagagcaattggaaggaacgcaatttggacatcgtcaaaaagaaaaacaaggccaagaagaagctcggattgttgtga

SEQ ID NO: 75400 - DNA, 1175 bp, Heterodera glycines
atggtacagccagtgacagcggaagacagcattccggagtatatgaacgtgttggggatggtcttttcgatgatgggtcttatgatgagagtacggaataagcatttaattacttttctacaaagaattccaaattctttaattaactcattgtttatttatttagctcaaatggtgttcttgggtggctcttatttgctcttgcgttagttttgccaatatgcgcgcgtccgatgacactaaacaggtggtcagctcgttcatgctcagcatttcggccgtggtaattttccagctttgatgcatgattcttattgttagacctacacattcaattccaattcaggtgatgtcctatctgcagaatccaacgccaattgtgccgccatgggcgtaaaaaataaatgcattgaattgttcagttcaaattatgttattctatcggtttcatttacatctcttattatttgcctgaaatacccgttgttcagcccaaaaatggattttttggttccgtgtcaaattgagttaaccctcataaaatatctaaaaaaacgtgtcctttaattctttgtatttgccttattgatgttgagtcggagtcctgaaatggaagaagaacgtttgcccattgtttcgatggtaattgtcgcggacaaaagtcgtgcgccggccaatttcattacggtgttttccgattatttctttaatttttcatttccccgtttttccaacagctaacgaaaacttacgacgacggaagtgacgccgatttatggaaggatgggttcggtttcgggttgttcaaccgttccgttcgttatatcgctgtaagccgacacatcgccgaaacgccggtttgtccgtctgtctgctgcttaaattgtgtgctttttagcccagcggtttggaagtgttgactgacgtggccgtcatttcggacaaagaagcagttccgtccagcttcgtctgcttggacttcaccgttgacaccagtgcgtcggtcgccttccatagttcttccttcactttttttgccctttagaagaacgcgccctgaagaagaaatatttgtgcgcccgcttcactcctcggactgatgcaattgacgcggtgaccaatttgattgttttggcgcggtcgcggaggccccccaaaggatacactttggccgg

SEQ ID NO: 75401 - DNA, 439 bp, Heterodera glycines
atggctgatccgaaaaaggctgtctgcgtgctcgtcggtgatgcggacccatccgtgaaagggatgattactttcactcaagtcattaaaatttcctaatattttttagtaagtataactttgtatatttccaggacaaggaaggttcgcccgtgtcagttcagggcgaaatcagtggtcttgagcctggtcttcacggcttccatgtccatggtaattaaattaatgcttgcagtctaaagttatttatctgtttagcctacggcgatttgtccaacgggtgcacttccgccggcccgcatttcaatccaacaaacaaaacgcacggcggaccgcaggttctatttcattcaccggtcttttcaataatatggttgtgggaaatgctttccttttatatttgcatagaaatatttaaaatagcgaaaaaattaataaa

SEQ ID NO: 75402 - DNA, 1131 bp, Heterodera glycines
atgcaaattatactgatcgaagaacgcttggacagtgcgcataaaagggacaaagcggcagaatttgtgatggaaaaggcggagaaagagggcgaaaaggcgccaatccattcgtttaaaatgagcggacattgtgacggagaggccgtagaaaaggaggaggaggagtacggtagcaaacaggtggaataccgtagtttagcaatatgtaagcgacatagaagaaaatttaggagagatagtctaacaatggaagtatgtgcattaatgaaggtttatgggcaggcacagtattaaataattgtggaggagttacggtagtataagtaaaacaagacgcatagatactgtatttgaattcatttgcctggactacagtagtatcctgcccaatcagctgatcccttgtgctccgtacgctcgtctgttgctcttcggcacgccctctgccattcaaagtgcgcaattggctcagctccgtgcgctcgtccccggcgcgcaactggccgtggccaactgtcggcctggcctggacacggacgaagcggtggaggaggaaattgttgccctgggggcaagccatctggtatttgtccatggggcaggtgagacggggaaatggcatttcacagaaaataaattaatgacataattgccagacggagaaacgcgcgacgcatgggaagcgggcggaccggcgaatttgcgggagaatgtgcgcgtcaacctgttcaggtaaagccctggttgaatccatttaaattttgtccattttcagcccgtggctgctctccaacatttgtgaccgttttggcattgtgttcatcgaatttgatggggagggcaaaaactgttgcaattcggtaaatgtttttgtttgttcgagactctcgaattttctaattttcgaacattttttttaagaatgggaaagtgccgacaaatgctgacgctttacaaatgagtcgctacgcggtggtgcgccactttggtgaaaagctttgccaaatgaaagtccacttggaataataagaaaatgagggcaaagaaaaatgaatccatttatcatacagtaatatggaatttacaaaaaaagcaaaatgatactgtaaccaacaatttatagaaaaa

SEQ ID NO: 75403 - DNA, 690 bp, Heterodera glycines
atgaaaatactcacctctctgtccatgctcattttcatcatcagttttggctatttttttgcgattgtgattcgtatcatttcgtctctttggaaaattgccaattttgcttacatcacttttctctcttcgatgttttcagcgattgcgatggccgccaatgcgccggttttgtacatttataggtcgaaaaaaaattataaattaaatgcaattaccgtatgaaaaaacatgaattttacaaaaccaattaaggccaaataaaaaactcaaaaaaattctgattgctcactaattaatctttatatttgccaatttttggtgccgtttttagctccgactatcaaaatgcgttgcgtcagcattttccacgcctttttaagcctcagcaacgacaaatgggagggtcaaatgctttcaacaacaacaacaacaacaacaacaacaactgggcaacactttcgttggccgcggtggacagaacgacacgcgttgcgcccataaatgtgagaggagccgcagcagagacgaaacgccaaggaaatggccaaaattaaaaaaaatttgaaaaggattcaatagaaatggctaaactctttttttgtggtagttgaacatggctaatcatgtgaagtttttcttgataaagaagcgatccgggaacgttcttggcaataattactcaataaa

SEQ ID NO: 75404 - DNA, 452 bp, Heterodera glycines
  unsure (1)..(452): unsure at all n locations
tattttaaaaatnttggtacaaaacttatattacaccttaagtgttattgcgaatgaattttctcaaggaatattacatttcttttctattacgcctttaattatgtatatgccttttcttttatgactaacacagacataaaattttatttattttttatttgtgtcttttgccgtgcgaaaatttagtttttccaattaataaattaacattttttaatgaaagcatttattgaattgaaaataataaccctttttaatttatgtgaaaaaaagtctaagaaatttttaagcgttgtggagacttttttttctctgttcaccgcggtaaattttgtgtgcggcgaagggtctgcccaccaccgaaatttttgaaaatcgtgtggattttaatgtcaaaaattcaaacaatgcaatgtttctaattcctaaattttaattgaattttcggt

SEQ ID NO: 75405 - DNA, 1088 bp, Heterodera glycines
gcaaaaaatcaagtttatataacaatgatttcggatttgtacttaaatgactcatcaagaaacaatgtaagccaacagttattaaagtaaattttaattacattttatttttttaagaattacgccatttttcaacgcgacggcgtccctttggcatttgtggcattgatagtcatacgatttctcattgccatcattggcattctgttcaatgcaagcttactgtatgtagcagtgaacacttagtaagaatgaaccatttaaaatactcattttgattgaaaaccaacaaattcagcgatttgcaagggtcgtgcaactttttgatcgcattcaatgctttctgtctggtcatttttatgccattcatgagcatctccgtcttcaatcacagcttaatgccagtccaaatatgcttctggtgggaattggtcccaatgttttttggcaatttgtttatggtctcaaccttggcaattgcttttgaccggctattgagtgtgctcattcccgcatggtaagtgccaaaaatggaagaacaatttaaatatttttttgagaaaagtgtgccggaaagttcccgattactgtccaatggctttttcctactgtaggcacacacgccataacaaagagttcaactatttgggctccctgctaacactgtgcattctgtacgccggttgcattgtgtacttctgctacaccgctttaccgcaattgacggctgactcaccgtaagaaaaagtcaaattaaacttttagggttaaatcattggggcgaggagcgcctcgagactctcggtcataatcgagacattttctgttttaagcattctgactgtatgaaagttcatacaattttagcactgtcatctgcttgaacccctccgattcgtaccaaggcggaattgggacaattttgtttgttgtgtcgctcgttgtggtcactttgtgcatcctttgctatgcgatcatttgggtcattgtgcgcagaaaccgaacaaaatgtaaaaggcacaacatttaatcatcattaaaattgcaaattgttttacaaatttcagggaatggcactttcacaatga

SEQ ID NO: 75406 - DNA, 1471 bp, Heterodera glycines
atgaccctcattagcaaatgttcgcttctcctccttttcgtcgcgcccttttcccatgcgtttttctccggctttgagtgagttcattacaaattttgtaatccgatgatcattgtcattgcttttctaatcatttggtcccctcaagggtttctcccaacgcggcacgtctccgtcggcagtgcggttgcggcgggtgccctcctccgcccagcggcggtggctctgtccaactcggcatcagctgcgactcgccgcgccctccaccgccccctccgtgctgcggttgtcagtcgtcttgcggctgcggtggcggcggtggcggcggatgtgagaattttcaaatttaaaactgagtagtgccaatctgatccggacaatttttgccattaggaaaattctcggcattttaaggtacagacggttttgtttagctttggaatttttccttttcgatttttacatttgttgcataaattaaattaattttcgattttttaaggtggcggcggttgcggcggcggtgccattaaacttacaattggctgcgactccccacgccctccgcctccccctccgtgctgcggttgcgggtgcggctgcggcggcggatgtgagttcatttggtgacaaattaagacaaactgaattaattggcatatttgcacaataattatacaataattctttcaatgaaaatccaaaaattacttttcattgctttcacatcgctttctcaaccaagaactctgactttgtgattttggctttttttggggtatattcgaattcgattgaccacgacattcctcgggggtcaattccctaatttaaatttgctattattattaaggtggtggtggcggttatggtgcaaatggcggcggcggctgcggcggttccattaagctgacaattggctgcgaaggcccaaaagccccgccaccgccccctccgtgctgcggttgcgggtgcggttgcggcgggtgccctcctccccccagcggcggtggctctgtccaactcggcatcagctgcgactcccctccgccccctccgtcctgcggctgtcagccctcgggcggctgcggttgcaatcgccgcaagcgcatggcttttctgcgccgcgccgttgctcagcgctctgttggccgtcattaagtgcaaaatgaagcttaattaggcactgcttattgatgacgtcaattgctgacccgaatgatccatttaattattaatattttagcatagaaatgattttaatttttagtgactcaatcgaatttagtattagtttttggaaaacaatccttttcaaatgtttatttaatgaataaattaatcactacaaattcggcgaaggttaaaagctattaaatttctttaaattgaaaaatttcttatttgatggatgcaattaagaactgtcatatttaagctaattggaaattaattttattcaaaaattcta

SEQ ID NO: 75407 - DNA, 874 bp, Heterodera glycines
atgagttcctcttccgctaaattggacgagttccaaaatgctcttccgttcggtgtttttttgaatgatttcgacggcgcagcgcttggaattgtcgcatttgaaattcattgtgccattggaacaaatgacgtgaacacttgcaaaacgatggtaaagtgaaacttaaaaaaataaatttgaatattttgaatgaaaaaaatggttggctacggggggaatagaacccatggctacaaaacaactgagatttgaatgtattaagaattttttttaataaaaattttaattttgtaggctaccgaagaaaaaagtcgaaaattgaccactcggggaattcaaacttccacaaccactcgggcaactccgccaaaaacaaagctgaaaattgtaactccattcaaaactgaaacaccacgcgttgtaatcgttttcattttttaaaaatttaaaaataatgcctttttctagtctgaaattgaaaattcatctgaactgaccaccttggaaacccatacaaaaacaaacccaaatgtcggaacttcatctgctgtaatcatttccctcaaattaaattaaattaaaaattttttagccgaatctgttcactccacgggattctactgtgaagcatttcggcacaaattgcgtccaaattgattttccagctgaaattgcccaattttcgctgaacgtttccgccgcactattcggcattgcctgtaaacaatacctaagaaagtacaaaattggacaattgccaaaaaattacgacgaaaaaatggaaataaaagacaaaatggaagcgtgtggaaaagtgccgacagagacaaattgcaaaaagttaaaaaaatggaaattaaaattaaattaa

SEQ ID NO: 75408 - DNA, 78 bp, Heterodera glycines
atgatttaccccgtggaaatggaccccgaatttttttattccaggctccgacttttttggacattaacatcacaaagg

SEQ ID NO: 75409 - DNA, 1095 bp, Heterodera glycines
atgagcatcaaaaccaaaaaagacttgttaattgtgggtaagttgattttgtaaggtaataaaggaaaagcatcttgaagcaccagaattagcttatgagtctttaaaaattttcatttgcttagaaagagtttcttttcatcaagagcttttgagtggccaactttatatatttttattgcgaaaattcattttaatttttttgaacaaaagaaataaaaaaacgatgctgtatagttttaagggctgccactgatcaatgtttcattttttacgggtgtatttaaaatgttcaggtcaattcatatatatttcctggactgtggtggcccgaaacgcacgaaaaacatgtttttagcttggttagaagcttctaggatggatttctatatccatatttcgcgatttatgtccatattttggcatttttccaaaaacctattagaacggcccccaacagctaaattggccgttttgacccctaaagacctacaatcaggtccaaaagttttacaccaaaaaatattttagtgaaaaacccgattttcttaaaaaaaggaatggtggcaataatgttttgtttatgccaaaagaaacgccaattagtgcactaattaattcccaaaacttccccgataactctcttagttgacaagaaaattttttcatgacccgaacaaccccctttttggcggtgcaaaagtaatgcaccaaaagatgtatgcacgattaattcaattttttatgagattttgatgctgatcaaacagtcttttggaccaacatgatcagaacacttcttcatggtgatctggaaagtcaaaaatagcttgaaatcggaaaaattttcaaaaaaaattctaggggattgaaaaagttttctggaagtttttgggaatttattagtgcattaattggcgtttcatttggcaacatttttgagaaaatcgagtttttcactaaaatattttttggtgtaatactttttcacttgactgtaaaaaatttccgaaacggacattttttagcaaaatttttaaaaaatattgattaaatttagatttttcttaaaaaattggttaatttatgtcaaaa

SEQ ID NO: 75410 - DNA, 2212 bp, Heterodera glycines
atggcggccattcgtggctatcgtttcattgctgtgatgtcctcgtcatatacaattgaacgagtgagaaaatactctatttaatttttaatttataaaaattttttcggttaaagtgtaaatggcacttttgctgctgatggcctcccaaaaaattcaatgggggacctttggttttgcaatttttgttttatcacaagtcgtggaaaacttcttcaatgggttttggattttttcaactaattccaaactctaaaaaagcccccccattggaattttttcggggacccccgacaacaaaagtgccgtgttatttcttattactttattagagaacagtgctgcgtgcgcttggtgccgaattggtgctgacagacccaaaattgggctttactggcgccgtagagcgagcggaacaattggcacgagaaattcccaattctttcattcccatgcaggcacaagttttaaaatttaaatattaaattattaatttggtcaattaaatttattaaagttttgcaatgaggcgaaccccgaaattcactatcggacaacggggcctgaaatttggcatcaaacgcagggaaaagtggacatttgcgtatttggaattggcaccggaggaacggtaataaatgaaaatattttaataaattatttgttgttttttcattattaagatgacaggcgttgggcgttatttgcgtgaaaagaatccaagcataacggttcttatagaaaaactataaatgcatttatcaaataacatttaaaaaaattatttattaatttttatcccataaatctactcaatgtaatacaaagaattgtaatcagtagggatgggatttttatgtttttacatattttttctgcggcttagttatggcgagagaagcccaaaaataacattttctccgaacaattttcgatttagagcgacttataaaaacataaaaacacatattttggcattttggcacataaaaacatatggcacatatttcggggttttggcatttttgagaaaaatttgcaatgaaaatacaagaaaattgaaaaatacaccgtaaaaatcaactttttcacaattcttatagaattttcaaatttttaaaattttttttcgaatgtagaaagtaacaaaatcgaattcattaattcgtcattggatttcaaaattctctgctggaactttcaatttataaaaatgattaatcaaaaaaagatcaattttaccccaaacactttgaaatgtatttgatttgcgttgtatgggcgaaaaatgataaagaatgagatttttgggaatttttatgcaaaaagacacttgatttttccaatttttaacacatattttagcacatattttggcattttttagcacatattttattacatatttcaggatttttagcacataaaaatcccatccctagtaatcagatatgggttttatatagggattatattggtgcaaaattcaaacatttaattattcggatagcaaaattgcattcacaaatattgcagttttacgccgttgagccggcggagagtgccgtgctcagtggatgccgtcccgaaggagcaaagcatcgaattcaaggcctcggcacgggcacagtgcccgccgtgttggatacgcacatgtacaaaaacggcggcggaattgtgcaagttcactcggatgacgcaattgcaatggcacgacggatggccgcggaggagggccttttgtgtggtaaattcaaattaaataaaaatattttaaaatatttaatttctatttaggcatttccagcggtgccaatgttttcgcctctctgcaaatagcgcggcaaaaacaaaatgccaataaactgatcgtcactgtgttgccaagctcgggcgaacgatatttgtgcgcaaagatttttaaaataactttattatcattttaaatatatttaatagatcgtctgaactctattcgaatgcgcacgaagaaacggcagcaatgtgccacacggaaacacttgaggaaaatttaaaacgtttgaaattggcatgaatttatctatttttcgtgtcagaaaatttgcaataatatcatttttgttgtccatttttgcccggatattaaaatcaaagatttagttaagttaagtttaaaatatgttttaattattttaaattatgtttcatttgatgttgtttatttaataaa

SEQ ID NO: 75411 - DNA, 211 bp, Heterodera glycines
atgatttgttataacggtgcaatgccctgtgttctttcacttaaaaatgtatgtggtaaataaatattagactttgacaattcttttcaggtttcactggggtttataaccaactgcctatcaattcttggaccgcaaccaaaaaagacaaattaggcattgttcgaacatgaaaaatactgtacaaaaagtcggattgccagttttgtta

SEQ ID NO: 75412 - DNA, 657 bp, Heterodera glycines
atgactgtccaacaacagcagcagccgtcctccactgccccccatgtgccgtcctcctccgcctcgtcgtccgttgccactgcaccgaaacgccaattccggccattggccgagtacagaaaggcactcgaagagttctcggcagagcgccagcagcagcgtgaagtgagtggggggggggggagggcgttggttgatgtggggacgagtcagcgaaacacgaccattcgacaaaacggtagcggactacttcagtctactcaaagtcaaataaagcaatgacgtggtaaaaatctacgtctcactcttcacctgcttggccatccgcgcccttcatttggaagtagcacgaagactactctgttgaagcattcctccgagcctttcggatattcacgggcagaagaggcataccatcacttatcatgtccgaccaaggtacaaacttcatgtctggagcaatagtcatcagagataactggaccgacgcgttagtgccggagtacatgcaacaactaatggctccaagcggaatcccgttggattttcaacacagcccacgccacttgaaaaggcgagatttgggaaatacttgtcggcatcaccaaatacgaactacaaaggacagtcagcagagaacttctcacattgtacaag

SEQ ID NO: 75413 - DNA, 452 bp, Heterodera glycines
gttacaacggtgacggaaaacggaatgcgaataacgggtaaaaatggacgagaaaaaaaagggatgggaattgttatcaaaccgaataaattaaggcgctgatgaggaggaagaagcggaaaaggacgcgccaattcgagtggagagcaatttcattgtcagcgtaagcattgcggaaaataattgagtaattagaaaaagggtatttttaaaggtcgatgaaatggacgaaccattggcattgaaattggagagacaaaaccgaacggagaaaaaggaagcgatcggagagaatccaaagtgggggagcggagattatcgaccgagattataaatgaattcgaatttgcagcaaaacacaacgccaaattgacgaggcgcacaccgaaagttcggaagagacagagaagcagacgaaggccaaagaaagcgaagcgcaagaaaaacaatga

SEQ ID NO: 75414 - DNA, 718 bp, Heterodera glycines
atgccaattttctattttctttgcttcactttttacacttttatggttgtttttgaaggttcaaaaggtgatttttgtcatttttctaattcaaaacaaatatttttaaattaaattttcttaattatcttttagtgcttcatcttgaacacattcccttttggttggctctgttaataagcattggagtcggatttagtgcaatgttaatttatttgttcattttgcgaccaaaactcattcgatggatcaaaaaaagtatgcattttcagtaatttttgcaattttatttttaatagacagcaaaaacgaaacatcgaaggctactgtaataccgatgacaaatgcccgcgtgcttacagtacccatcagtccgattgaaaaaacgcagcaaaaaatggtcgaaaataatcgttcacagccattcgaatgctgtaagaaaatgcgaagaaaatcaccaatacatttaagcaaattacaacgaaaatgattttcagctcccatgggactgattaattggtttatcccccggaaagacagaaaagaagacgaggacacattgcgactgttcagcattgtccaagtaattaaaaagcattttgttgaatatgttattttgcatttgatgatgttcgatttaattagataattacgggatgttttgcgggcttttcccacggggtaagttttattttttaaattaaatgcggtaaataaa

SEQ ID NO: 75415 - DNA, 1074 bp, Heterodera glycines
tatcgctcaatgattttcaagtaaataaaaataaatataattttttaatttaatttccaaaaattcagcaccaatttctgtggacagtcatcgccggctttatgtgctcatttttgctcggctttggcatgggcgccaacgacgtggcaaatgcatttggcactttggttggctcaaaagtgttgacgctgcgaaaagcaaatgtaaaataaaaagtgaattgaaaataaaatatttaaaataatttagataatggcgacgattatggaaacggccggcgcagttttagtgggtaatgaaatttcaaattaattttgtacaaaaagaattcattgaccttttatgttgttttaaaaattaattttgaatgaaattagctttttggacaatctcttcattaaaaataaaacaaattcaataattattttggaatttattttattttcttttgcgtttgctaaggctacaacgttgtggacactgtacggaaaggtattgtcgagattgaattgtaccgaggagcgccgcaggatttgctggtcggacaggtggcaatcctcgggggtcagtcacatgcatttttggcgcttgtttgaaaatgacatattttgaagggatggcattcaatggtttttggggtcatttctcaataatatgacattcatttcgattgattcagaatttccgaaccgaagtcgaacaaaaaggccagatttcaaatgttggcttgttgtcttaattcgttttcatggttttgagtcgaaaggtgtcagatcataatcaaacgaccccgaaactcacagaaaaaaaatttttaactaggaattaccgtacaaaatattatgctaaccaatttttcctcgcttttgtttataattttcaaaatttgtcattttaaattagcggccattttgtcctttttacaaaaagtttttctaaggctgtgcctgctggttacttttggccactatttttcggcttccaatctcttccacgcatgccattatcggctcaacattgggcttcactctgctgatgaagggaaatgccggaatccattggagcatggtgatt

SEQ ID NO: 75416 - DNA, 1416 bp, Heterodera glycines
atgacggtgagtcacagcacaaaacgatggatcaaatgaaataatgggtaaaacaaaccgcaaaattagggggagggaagcagggtctaattagcgttttaattgggtcaaagccgaggctaatgaaggcgaacgcgtcgcctttctgcgcgttcggtgtgctatggcctcgtaaagtgttttctgactttgataagccgaagtgactttattttctttgtgttggcctccggtctagaacagtcggacaattaatgtcgaaaaaaggaaaaaagcacccaattgtttagaatgaccgggagacgagtgcccgtgaactgttgcgggcaatttgcgaagcggagtcagcttatcaggttggcacggtgttagggtagttgctgctcccttttcaatttaatggattcgtttccataaatttcaaaattcaatctaaaaagacgagttttgttatttttcttgcccaatccccccgtttagacctccatccaggagtcccaagtgcaaatggagagcaccttcaaggcgcttcgccgtcagttgcccgtcactcgctccaagctgaactggctgaacttccactccttccgcatcactcaacaggacatgaaacagccgccgacgcccaccgtcgctgtccaacaacagtcccagtgaaaaacaacaaatgaacggactgacggacggatgaatgacaccgcaactaattggagagagacactttcgcgtcctcaccactcatttgtttagttgtactcattcgttcttcatttcattaggcttattgggtgcgggcatttattaaccgtttggaaatggtgctttgcgattccttccattaaatttgtccaaatttggtttccaattaaccctaaatttggtgttaatgctccgtcgtgccctgcctaattattcgctcatttgcagaaaaacatttacttatttctacagtaattggtgtactaaatcataatctgcttgtgtctgtttcatctccttcttcatttgtccgtgtgctttttcttcgttttgtgcccttcgtgaacattcgccatccaaaaattaaggcaagtgaaggcatttaaccgttcccaagtcgacttttacacttacaaattgaattttaattatttgttttgcagaatttggcgctatctcacaccacctctccgactgatcagtgatcagctttgtcattccctgctgctcgtattgactcatctccgccgtttgcgattgatttttgatggattttccctttcttttctgtttgtaaaacataccctcccccactcttcagcataaattatttaaactgagaacaacaaatgcagaaatacaaatttgatgtgtcaccccaaaattggacaattcgtcccaaattattgcccatttcagtatcgatgccataaacaa

SEQ ID NO: 75417 - DNA, 332 bp, Heterodera glycines
atggacctctttttaagtagcgccggtatgtatatatgtatatatacatatataggtatatctaaatgttattaggcatacttaacagagaaagatccaaaaattagcaaatttaaattaatcaatacaaatttacttttagaagtcgaagttgttcgatttggtggaattttttcaaaacgtctcttcattattaaaaattatatgcagtaaatatgttaagatttttagtatatgtgtaaaacgagaaacgaaactgaaaaataatgcttctgttttaggacagaaaatacgcctattaaaaaacgtaaaattcagtcccaggcaataaa

SEQ ID NO: 75418 - DNA, 1935 bp, Heterodera glycines
atgactttcaaagctttgcgtggcatttcgccgtgctccaacgaaaaactgaaggacgaagtgcgaaggcagcagaagaaggaggaggaagaggaagcgaaaaaggtggcaaaggacaacgatggcgaggggtggtcggtaagtaaagcgattaaaatgagaaatgaaagcaaattaaaattcaggacaatgtgccgataaatgtggcacgaatggcacagctgatccgccacttctacgccttgggatggatgcgcgacaacggcgccggcatggccgcgcgctttcgctgtcggaagacgggcgaaagtctgattttgaacacgtccaactcgttggccaaggagatattcgccgagtatctcaaatgcttaggctttaatcctaattaaaccctcctcaagaaatgagcattttgtgatgaaggccagcggcacagttgtaaagcgcccgtcagacccggacagaacgccgacggcaccgttttatttgctgcgcgataaccccggtgggttggaaacagaacggcacaaattctcattcaaaatgccaacgtttaagttcaccgtccacctatccaaaagtaaattcgtacttttcattcagatttggtctgcatcattcacacgcacacaaaatgggccaatttgatcacgcaactgatcaccggcgacgtgtttatgatttcgggccaagaaatgatccaagtgatgaaaagggagtcaaattagcataattgaaaggtttcagggcattgagaatcgtcagacaaagcgcagaatggaaaacattgacactgttgtggtgccgatcatcgagactgaaatcagcgaattcgttctttgtgtaagccgtgccaatttcaattcaattggaaattcaaatttaattttattgttagcattatttcattgttttttaatgttagcttaattagccgttgattaagctttttcagcctcagctgatgaaagttctgcaaaagttccccgaggcgagtggtgttcttgtccgcggccatggcttttttgcgttcggcagcaacacttggcaacgcaccaaaatgatgtgggaatgcctttttaaaattggatttttatttaaatttggaaacattggcattctgcacaggttggagtgttacgaatatttgtttgagttgggctgcgaattgattcgatatggcattccgctggtgaaggacgaggaggaggacaagaagtccatttccaaaagcaaagtcgaagcatagtgaagaaatgtggggaggacgaaacgccaaatgagagagagagaaagagaatgagagagagagagagagagttacagtatgccaaacgaccatttattaccgtatacactaacgtaaagcactgagacaccgtagaatagatcagcagaacggcagcaaacgcgttcaaataatgccctttgactttgggaatacagtcgatagtagcacaattacagtacctgcctttttttgttttatactgtttgtaattcatattttgtgaatccttttttctgttatttttttaatgtaataaattcttcacttttttatttacacttctttttgccgcaaataatttctaaacaaatagaattggtccgctaaaaaccgcctaaaactagttgcaatcaatctctaatgacctctaagcattataataatagtccctaggcgcggaaaataaaaaaacggttttttaaccggtttaaatcacgaaaaattgaaccaaaatcaaccataaaaacattttaaataaaaattttcagcaattttggcatgattcgaaagctcttgacaagttaagtctaataattggggatgaagtcgaacctgctgcggatcacgcgcggatttcttccggagcccgtagtctcgccccacctattggccgccgtagtcgagagtgcgctggtttttag

SEQ ID NO: 75419 - DNA, 1259 bp, Heterodera glycines
atgcgcgatcaaattcttgagttggagcgtttcccggaaaatgccacggcgcaagcgatggccaataaaattttacatttgaaagccatcgcgcagcaattggccaaattcacacaagcaaagttcgcgcggggagaggccaaactgatagacccactgcttcttgaacacgcgctcaaaatttgccatttctgcgacaattttctaatcggcggagaaagcgagagcggagaaagagtcgggaaaaggctacggcacggaattggcctcgtaaaggcgcgggtttgccaagtgcagcgactgatggacgccaatttggtcgaatggaacgacatttggcaattgctgcgcaatttcagcccaaccgaaggcccaatgggaggggtggaccaattggcaaagagtttggaacagagaattggcacaatgattcgccaaagcaacgggagttattatgggaaaatgccatttacgaaggcaattagccaattggccgaagtggaaagggacagaagcgaagacgaagcggcaaaattggtcatactcttcaaaattgtgctcgaattgatagtgggagccacgcaggaaatgctacgaaacatagcaacggacactttggaagcgaacggcgccacattttacggcactaattttttaattgtgttttcgaatactaccaatgaaacggaaagacaatgccaaggattaattggcacttcagaagtgccaaatgggcagctgatggtccgcttgtttgatggcgtgcgaaaggaagcgaacgaaatgtttgaaagacgaaaaacggacatttgcgcacaattcaaaagcattggaaaaatgttgaaaacggaaatggcacaatttagaattggtagaaaaattcgaatgagattgaatattaaattacaaatttagaattggacaagggcctcgagagacacatatcgaaacggcacaaactcttcaatggcaagccaaaactgcgaaatacgttcgaattgttgaaggaaacgcaaaatgtgtttatgattgtacacaacgcgttggatatggtagacttacagtacccaaaggaaatggtaaagaaaaaattggaacaattgggacggataatgcagcagggaattgtggcgaacaacacaatcaccagcgaggactatgaagagcacgatgaaattacgaactgtttaaaaaccgaagagattgaagaacaaatcgaattcgaaatttactcgatgggatttcgaacgattttctga

SEQ ID NO: 75420 - DNA, 331 bp, Heterodera glycines
atgcgactcgttcagcttctccatttggcactgcttgttcagcttttgctggcgcctgttcttttggccgttggccaaaccgatgaaaaagtcaaacgaattcaaaagagagaggggccccccgaggcgaatttggtcgacaaaagtgcggtgccggccgaagggaatggcatgaaaatgtaaaacgaatttaaaaatgagaaattgctaaatgcttttaaaaatgctcagacggagacgacgcggcaccaaactgaaggcaatggcaggcggtgccgcggcaggactcggcgcggcacttctctacaaagcatttaagggcaaaggctaa

SEQ ID NO: 75421 - DNA, 2371 bp, Heterodera glycines
atggctgatcagcagccgatcagcgaggactgtctctttttgaatgtcttcgcgccacaccgatcggttatttaattcaaaattaacaataaaaaaaataatttaaattttttgattaaaaaagacgtggcttttgtacttattaagccttctgctgagcagaacaaaacgttccctgtgcttgtggtgatccatggcggtgcttatgaaattggctcttcggcacgttacacaaagtacgaagtgatcggccaacgatttgtgacagacgcaaattcgcggggcattgtttttgtgagcattcagtatcgattgggagtgatgggtcggtagaaaatttaacaattttaaagaaatattttttaaattctgtgtaggatttgccaccaccggagatgaggaacttcccggttgtttgctgaacattttaatcatttttaaattcattttcaaatctgtcatttttaaaggcaatttgggcatttgggaccaaatttcggcacttcaatttgtcaaggacaacatcgcggagtttggcggcgacccgagccgagtcactgtgtttgggtacagtgccggctcgggaagcacggctttgctgagcatttcgccgaaaagccgaggcaaggaaattgaaaagagaaaagcaaaattaaagaagaagggaaagtgccgaatgatttggctaaatgacacccttggcacatttcaaatttaaccatggattggtaaatttcgtccacaggtctcttccagcaagcgattcgcatgagcggcacaccgttttcggtgtccggcagcggcacttttgtggcggaagagaccaaaaagttggccaaagcgatgggatgcgcagcgaatcggacaaagcaatgcctaagcgagaaaagcgtggagcaaattttcgatgggatagacaaaattgtaaaacattccaaacccaccgtattttactctattttattatttttatgggcctgctccgctttcggtttacattgccaagttcagtccacatcgcttggaccgggaactcttcccgcaggattatcccgaaatgatcgccactgcccctcccaagaaaatgattatgggttttgccgaattggactttttgctcttcagtaatcaatcaaaatgcatttaacagcagcagttataaataaattgtttttaggcttaatttcgagcaaaaacaacagcatttccatgttggcacttacggacgaacaaattgccaattacgaccaaaaagcatttgaggcatctgtcagtgaattcgtcgtcaaggaaaaatattttggcaatcagacaaatgaagtcaaagcagaaattgtgcacttttatgtgaacgaatatttgccagcggagacagtcaaagaccaaaaattctttgtgttgctttacacaacggttaattacataattaatcggacggagggaaaatgggggaaatgccaaaaacaaataaaacggaaaaatcaagtgccaactaactgatcagaaaccaacttttttgatcagcatgccgagcaggcattcgaagaatcgagcccaacaaatttgggcatctgatgaaatccaaaagaaagggcgttaaaacattagttttttggggtttcacatggtcgggaaaaaaatcgggtcgtcaaaagccaattattcacggggggagggagcataatgtataatttctttaagttttagttgctttctgatctgatggacgttgtgcctaccttatgggaggcgcaaattcgcctcgcttccaattggccaatttatctgtatgaaaatgtgtactttaacccggcacagttcccaaagcgtgccataatccaaggcaaattaattaaaatttgaaaaaataaaataaatttaaaacatttcagcagcttatcatggctttgatcactctctgattttttatgatgaattcactaaaaagagcgaagaagaccgaaaaatgtccgaatatttggtgacggccatcaaaaactttgtcattaacgggtgggtgttctaatatgataacataaatttaattaagtattttagtgatccgagcaccgaaacaattcgatgggaccaattgacagattttccatctattgaacgcgttgaaaaggttcaacacatgcgaatggaggcaaaaaagacggggatggtggacggaatgaaagccgaactgagaagagcgcgtttctggcgagaattggccaaaaagtacacaaactttgatttagtccgtggcactttcccagaaaaaagtggacagtcggcggcatttgtcccttcggcacaatttgctcaaatattttccattttcgctattgtcgcaatcatttcgctgaacaatggcatttattga

SEQ ID NO: 75422 - DNA, 1113 bp, Heterodera glycines
atgaaaaatttggccaaacaatttatgtactggcccaaaattgatctcgacattgataggtgggttagaaattgtgaagagtgtgccttagcagccaaagcgccacccaaagtgccgcttcaaccttggccagcatcaactcaagtctatgaaaggcttcacatggatttcgctggtccatgtgcagatggtaacaaatatctggtagtggtggattcattcagcaaatggccggaaatcattaaaatgaagtcaaccgaacaccttttgatcgaacagtttgtttggttattttcgcggtatggtttcccaaaagaaattgtcacagacaatggccccccattcaaatcgcacgaaattttcacgttttgcagttcgcatggcattcagcaaacattcgcaccaccttttcacccacaaagcaatggccgtgccgaacgattcgtcgacacactgaagaggcaaatgaagaaatgtgcgcgtgacgatccacattgggtacaaaattcactgctcgcgtaccgcaccacgccgaacgcaagtttaaatggtcgtacgcctgccgaattgttcttagggcggcccgttcgaactgttctatcgttaattaaaccaaattcccaaaaacaaaaacagggacccgtgttaaacgagcagaacagcaaaatggcgaaacaattcaacaaacaccatggagcacgaaatcggaacttttccatcggtgacattgtccacttcatcaattatcgcggcccttcaaaaatgtggctgcgagggacaattgtgtcaggaaaaggtgtagtttggcgaattgagtcgccacaattgcatgccgttgtaacccgtcatgcaaaccaaatccagaaattcgatcccattccatacaaggaaaattcggacattgacaatcaggcacaaggcgaacagcaaccggagacaccaaaccgatcacctcgtagagttcggttcgctgacgaacagaacgaaccgctcgaacagatacaaccgattgagccgagacggtccacgcgccaaagaaaagccccacaacagttggacatggacgtgaccaaacccaaatatgattatgtcaaacaggggaagacaaattaa

SEQ ID NO: 75423 - DNA, 119 bp, Heterodera glycines
aaagcgcacggttgcgcacgggtgtttcccgcacaaacccatgcctatgggaggggcgcagccctttgatgttgccgcccggggacattttcccgcacaatcccaagcctataggaggg

SEQ ID NO: 75424 - DNA, 670 bp, Heterodera glycines
atggatctgcctgcctccgtacagcgagtggtttcccggccggattggcattttctggtccaacaaatgttgcccatttttgtgccaaacattcgccacctggaattgattggctgtggcagcattgacatgttgttccacatttcgcccacaattctctccgatcttggcattgcatcagtggaaaccagcaatttgttcccctatgaagattggcaaaatgcgattgctcgaaaagcggtgaccgaatggttgcacattccgcgcaaagatggacgcccgaagcgattgcgttgcatttgttttcaccacaatccaccaattgacattgacgtcgacgaatggatcaacttattcaaagaggtgtggccacagcttcagtgtcacgacaacgcgtacaaaggcttagactaggcctaagctttaggtttaaacttagttctaagattaggaagaacccaacttgtactgccccaactcgtactgttttcaacaaaaaaaccgtcaaagtcgactaaattaaaaaatattattggtatcattcaatagcccttaaagttctctatctacatgccaagtttcagcaaatttgatcaagtttgaaaaaagttatggacgagaattttttttttttttgattttggtcattacttttttgaaaagcaataaa

SEQ ID NO: 75425 - DNA, 1065 bp, Heterodera glycines
atgaaaagaactttgaggaaaatgtgagtcaattcttttttttggattaaaaattaagaaaataagcatttcggttttgctacccccacccccctcgaaagatttaaaaaattcatattgcgactttcacggtcacattgatcacgatcggcttaggctttagtttgtaaaatatgagagcccaggtcgaagcaaccctaaacctagtcctaacctaacctaatgaattttttaattttttcgaggcggaggtagcaaaacacggaagtgcccaaaccgaacccggattcgaacaaaagtacgaaaattcaagttttcgaccattgacagtattacctagagatggaatttgcccttatttttaaacccaaaatcatttttaccagtgatatccctattgttttggaaaatttaaaaaattaatgtttcagttggatttgtaacgacgttttgatggacattctgccgttttttgaccatgctcaacttggtctcaaattggcactgatttcgcctcattttgatgcactggtggacacgcattttgatggcaaaagcgatttgacaatttggagaagaataacaatttgggtaataatttagttgatattacccacagagatggcacggaattccgacatttttggggtcggaattacgatttccaaaaacattttggacaatcatcggaattccgaaatttttgataaaattggaatttttaaaaaaaaaatttttttgaaattccggttgttttcgaggtcgctgatcacgaatctgactcattttgactaattccgaattcgaatagaaatcaaaatcatttaaaaactgttgctacaattttcaagggcttcggcgaaccgaaaataattgtcgaacgcaaatcggaagaatttccattgcccgaccgtccgctgcccagcaaaattcactttaaggaccttcacattcggtattcaaaaacaaaaaagcatataagcaattgaaatgggtaataatagtacagatggtaccccctcccccaacccttttcgaaaaaatgaaaattttttccgaaataaa

SEQ ID NO: 75426 - DNA, 82 bp, Heterodera glycines; identical to SEQ ID NO: 71853

SEQ ID NO: 75427 - DNA, 761 bp, Heterodera glycines
atgaacgattatgtcgaaggtgagcagtcgaaattccccgttaattgcctcaattatttaattgctttactttttcggtcgactcgccggccgtcgcatttggtggtgtccgagtggcgaaggtttggtttcgaattgccgtaattaaattatgcctatgttttggcatacatcaattaattaataattaatgccaggttatttggcttattgtccccagcccacggacttcgaccagtacacttactgttgtctgtactaccatttgggtgttgaccgaccttcgtgctgtcgcttcccatttcataccggtaatgggcaagtcattttgccagctttgaagttttaagtaaaaattttaaaaattatcccccccccccccttgtgaaatgccctcaggcaaaaagacataagagaattcagcatcaattagcgatgcattaattgtaattcattcaggtgtgatcattgcactgtttgtttcgagtgttgtcgcctttttgggtaattacggtcaatttacattttatctaatttcattttagttaattaattattatttttagttctattgtttctaatgtgttggttttgcccaatttgtccgttggccaaaaaattgagggaaagaaaagaagaggaggctgaaaatagtggagaaatggacgaataaatgaagagaaaagagggaagagagaaaaaaagagaaatgatcgaaaaatgaccaattgacgatcagaagaagaacagaaaatgagaaa

SEQ ID NO: 75428 - DNA, 81 bp, Heterodera glycines
atgataataaattatatgggtgaaaaagaaggaaagcaatgtgaaggaaaggagttcaggatcaaaaaagagagcgcaagg

SEQ ID NO: 75429 - DNA, 694 bp, Heterodera glycines
atggcatcgacaaaaactggttttacaaagagcggattttggcagttacaaatcttcctggggagcacaccggtttagcaattgcgatgaaactccgtagcattttggaacaatggcgcctcgaaggagaaaatgtgcattgttttgtgactgattccgcaaaaaatatgtgtcgggtataaattatcctacaaaaattttataataacataaaaattttaaggcctttaaagaagttgacgaaaatggcagtgcaattctcccctttttgaatgcaaattgtgccgcccatttactaaatttggttgtgaaagaagggctaagtgccgaccttgatattgaaaagcttttcgttaaatgccgtaaaatcgttggccatttcaaaaagagcaacaaagcactcggaaaattgcacgaaattcaagaatttcttgaaattcccgagcattgcttgttacaggtatgtataatgttattagatattggtaattcttaaagagtgtatttttcaggaagtttcgacacgttggaattctggtctgatgatgattgaacgactttacgagcaaaaaaaggcaatcaacgaatatgcataccaaaactgtgactttggtctcactttaacaagcgacgaatggtcaattttagaagaacttattgcgggtattcttttaaagcaaaattggtagaaaaa

SEQ ID NO: 75430 - DNA, 571 bp, Heterodera glycines
atggactctacaaaaccgatcgtgtttttgaaggtcagcctaaaaggaaagccggcaacagttgtagggcgagtcggtgagttgtaagctcttctgtatgaatgattaaaaatggcttatcaaaaattctgggtgattgtttgtattttttcagatacgattacgtccgttttgtcagaagcttttgcctctaaaattggtgacattgattcgaacctgcgtggccatgtgacgctcccaactgccgatgtgcccgttgtaggatggtaggaaatgttcgtacttgtcaaaaaaaatttaatttgttagggtggatgacgtgtcagtcgctttgctcaatgccgaaccatatgtctttgcacaacgttttggcgtcgtggcggataatcacatgatcgcgtaagtttttgaattaagttaattttctgtgcgacatactgtaaatttaagcttttgcgaacgcaaggtcgatggcgtctttggagccgacttactcaaacgcatgggcattttgaacgaggaacagattgacgccattccgctcgcttctggagatgttcctgaggaataa

SEQ ID NO: 75431 - DNA, 889 bp, Heterodera glycines
atgaatagtttcaatccgaatgaaaaagctgtccttcatgaagtccgggttggtcagctcggttttacagtacggatacgcattccacgcgtgttcatggaccgacatcgaaccctttggcataatcgccctcagaagagacggcacttttcttgaaaacgctggattagttgccgtacattttgccacttcccctcccccaaactcacgaatcgaaatggtaaattttatgcgtatattgtccggaagagaactggccattgaacagactctcaccttcaaaaggttcgttgcgcaacacctgaacaccttctccgccgcccgtctccttaaaagtcgtataaattgttcacactcctcctccgccgacggccatcggttgacaagcggttcaagagcttgaaaccgttgtttgttgcctacacttttctgtgcgcggcgttctctgctgggtgcttgaacgccacaacattcgcatttgtaaatattgccaattttttccggcactaaaaatagaaatttaaaatttttttaattgtgtatctgtgatcagcgaaaccattgggactgactcagccaggggctgatccctgcgaattttcttagggttttcaaggccaacgacagaatgtgcctaagtctaggcgactgggaattgtctttgatcacttttactgtgtttgtttgggttgatcaaaatgtttttttttctaattgtacaaatgccaagattcactatctaattaaaaagacctccccccaaaaaaatttctcattaaatgccaacaaaaaaaatataaatcaaaaattcctaaaatttacaattaaatgtgccatatttgtttcagatttaaattaaagtgatgattttgtttttacactaatatta

SEQ ID NO: 75432 - DNA, 1850 bp, Heterodera glycines
tctctgatcactactcactgctcaccattgcatgtcggtgtacagtcgataccgtacaaaggccaggtacagtaaccaggagttgagcaaagtgcaaccgatggtgtaccacagcttaataaatcaatttttaaatgaaaaaattaaatattattaaacacaatatgtgtccaattaccgaaagtaatgtgtttggttgaacacggaatacgcaggttggcattctcgaaaattggcacttacagaagcaaacaatcaaaatttattaatattagtgtaaaaacaaaatcatcactttaatttaaatctgaaacaaatatggcacatttaattgtaaattttaggaatttttgatttatattttttttgttggcatttaatgagaaatttttttggggggaggtctttttaattagatagtgaatcttggcatttgtacaattagaaaaaaaaacattttgatcaacccaaacaaacacagtaaaagtgatcaaagacaattcccagtcgcctagacttaggcacattctgtcgttggccttgaaaaccctaagaaaattcgcagggatcagcccctggctgagtcagtcccaatggtttcgctgatcacagatacacaattaaaaaaattttaaatttctatttttagtgccggaaaaaattggcaatatttacaaatgcgaatgttgtggcgttcaagcacccagcagagaacgccgcgcacagaaaagtgtaggcaacaaacaacggtttcaagctcttgaaccgcttgtcaaccgatggccgtcggcggaggaggagtgtgaacaatttatacgacttttaaggagacgggcggcggagaaggtgttcaggtgttgcgcaacgaaccttttgaaggtgagagtctgttcaatggccagttctcttccggacaatatacgcataaaatttaccatttcgattcgtgagtttgggggaggggaagtggcaaaatgtacggcaactaatccagcgttttcaagaaaagtgccgtctcttctgagggcgattatgccaaagggttcgatgtcggtccatgaacacgcgtggaatgcgtatccgtactgtaaaaccgagctgaccaacccggacttcatgaaggacagctttttcattcggattgaaactattcatctgaacgaccgcggcaccactgaaaacgtaataatgcttcaatttgttattttggcattttacccatttttaggcgctctgtctgacgacggatatgctaagtaaacgcgaagtcgtgcgcattgacatcgcgaacgacaaagagtttataaatgcagccgacattcgtgaagacacaaaaccctcgacgttccactcggagaggacaggccgaggtccgttgttgcagtcgtggcagaccaactgcgagccggtgatgtgcgcttacaaactggtcactatcaacttcaagtggttcggcttccaaaaactggtcgagacttttgtgcaaaaggtgagcgaaaaatataaattagtgacgcgttttctgaacggtttttactcaatttgagtttttgggctattaaaatttattcaaaatcggcattggcagtgtaaaaatttccgagtacactttccaatttgtgcatccctttagcaatacccccgccttttctgcaaattccatcgcgagttgttctgttggatggaccgctggtacggactgacactgatggaaatccgtttgatcgaagaggagacacagcgggaattggatgaggtcggctctcctgtcactgtccagtttcccctttacgtcgtccctccctttggctcagatgcgttcgaccggcaaccccgcggggatgaccgcc

SEQ ID NO: 75433 - DNA, 72 bp, Heterodera glycines
attttcgcctctcgtcccaaaaaacgagaggtgagaggcgagagtcccaaaaatgacgagagttggcgagag

SEQ ID NO: 75434 - DNA, 734 bp, Heterodera glycines
atgacctttgagcgcggaaaaaccaattttgggtgagattgtctatggttgaaaggtatgtttgaagcgccgcaaaaaatttatttccaaactattcaggatttagattcacacaccactcaggaaatcgctgaagatgcacaaatcgattttttctcaattatcttggccgtcttctcctggaatgccaatgttcttcctttacttctctcgaacatatatcggcttgacacagcgccagatgttggatggtgttgacgcattttgagataatcgactcaatttttcacccatcggcaaccattgtttgtttaaatttatgcgtttagtttccaaaaatttaaatttttagctgcactcgggacaataatttcgactatcaactcggaacaagctatgcggctacccctagagttcggcaccggctcaccggcaccatcaactcttacatggccaaccactgtgagtccacgtgagcagcttgttcaatatttgttgagtccgctatcgacttcgatagcgccttcaggcagaattctttaatcaattaaaccgtttaaactcaataaaaagattcatttacagcatgggaggacgaaatcgttcggcaccacattttccaattccgccggcactctcaaattgagggatatgcaggaaaattgaaggatttgaaaattttgatgattcaattgtccatgtcccgtaatgaattttattgaatgtttaataaa

SEQ ID NO: 75435 - DNA, 712 bp, Heterodera glycines
aaaattagaataagtttaggggtggtatgtgattggaattagatacatagactcagcttcacacattgaaaaaaataattttattaaacattcaataaaattcattacgggacatggacaattgaatcatcaaaattttcaaatccttcaattttcctgcatatccctcaatttgagagtgccggcggaattggaaaatgtggtgccgaacgatttcgtcctcccatgctgtaaatgaatctttttattgagtttaaacggtttaattgattaaagaattctgcctgaaggcgctatcgaagtcgatagcggactcaacaaatattgaacaagctgctcacgtggactcacagtggttggccatgtaagagttgatggtgccggtgagccggtgccgaactctaggggtagccgcatagcttgttccgagttgatagtcgaaattattgtcccgagtgcagctaaaaatttaaatttttggaaactaaacgcataaatttaaacaaacaatggttgccgatgggtgaaaaattgagtcgattatctcaaaatgcgtcaacaccatccaacatctggcgctgtgtcaagccgatatatgttcgagagaagtaaaggaagaacattggcattccaggagaagacggccaagataattgagaaaaaatcgatttgtgcatcttcagcgatttcctgagtggtgtgtgaatctaaa

SEQ ID NO: 75436 - DNA, 1175 bp, Heterodera glycines
atgatggcactgatcgaatttgcgttcaattcggttgccaaacaccgccaaatgttcatttacgtttcaaaggtgttggacccgcactttgacaaagtgatgccacccgtattggccaaagtgagcgccaaagggcccgtggaaacgcaccaaaaaatgccatttgcctaatcatttatttgtgatttattatttttataattgccaaaatttaattatttttaaaaatcgataaaaaaattcttctccatttgttttgtcgctcgctcgtctcatcatttagtttaaattattcaaaaaaaaataataaattcaaaaacactgtagggatatttgccattttgttgttcacaacagcaagaagtacggaatcggataactggtaatcacaccggaaactgtgacccggaaataggggaatcagtgtccccgtacggtgagaaatgtatgaaagttttaaatttaacacagataaataactgattaagattcttctaatttaactaaattttccaaattatgaccaaaaaggacaaaatttacctaaaaatggaaaaatgacttaaaagttaaaaaaagtgaatatatttttattttttatctttttcatttaatttctttttaaatttttgaaatctttgaaattattatttttagatgaggcgttaaggaaaaaatcgaggctcatatttttgtataagattttagggtttttgattttataactattctaattgaaaacaaaaatttgtaaaaatatttttcactaagatattagcgattttttagacttattcattatgtaaatttatttcaacggttttacttttttatttagttcatttctccatttttgctcatcggtcatttttactattttttgttctcgttgattccctaaaccattcatccgtttggccgtgtgcatattgtagcggcattaatttcccattttagcctggccaaacccctcaaacggttaccatggcttttccatttaatttaattggcattaaatcaaaacatctttttattaccgaaaaagcgtaattattcatgtaaaatcgtaaagtagatttatttcgcttttctcattaattttccgaagaaaaatccattaagcattcatttgatgagcatttttggcgtcttctcatttgcccatcctctcccaa

SEQ ID NO: 75437 - DNA, 719 bp, Heterodera glycines
atgtccaagtacggcatgtcaatgtgtgtgttgggaatgcacgaagagttccgcaaagatggcatcgcagtgaacgcactttggccacggacgaccatttggacggcagccacacaaatgctcacttcgggcagagggcagcgcaattcgagaaaagtgagcgaaaggagggggaagcaaactgatgcgacaaaaaaaatgatgaaaccgaaaattgggtaagaaataattccctttcaaaagggtcctccctttggttccccccccccccaaatttaaaatataaaaataccaattaattcgtgtttttaattttatgttagccgaaaagccggtttttaagtgtcgttttgaaaacaatggcatatattgataggattgttaaaatgcttttgtttaagcctgaaattattgccgacgcggcttatgtgattctttccaaaaactcgcgcgattacacgggaaatttcgcaattgacgaagaagtgctaaaggaagtcggagtcaaagacttttcgcaatacgccaacgatccgagtaagtcaatttccattgggtaattacagttttctaaaacaaaacttagtcttgaaaatattcgttaaaattcagcggctgaacttttccctgacttttttgtgcccggtgtaaattacgaaaaagcgatcgaagcggcctttgcagcggcaatgggcgaaaagaaagggaaaaaagtctga

SEQ ID NO: 75438 - DNA, 486 bp, Heterodera glycines
atgcgcaaatacaaagcggaagaattgagcaacgcaaatggcaataatgacgagggacaatcggcacagaacggtggggaaggcattgactatcactcggccgacaaacgccaaaaaattgtcatcgatttcatcaatcagtgggcaaagctttccattgaggccgaaagctcctttttcctggtcgcctatttacgctttttggtcgttgaagtcgaaaaaatatctcaaaaaggcaatttgagcggcagagactcagtggtcgcgttaatggccaattatgacggttggtttggggtttggggacacatttttgcatatttcgataaaaacttttaaaaatgcaccccctacgaagcgagccttcaatttttcaacattgctttctaatgaaatattttactcaaaattccattctgaaaatttaatagcgaccaaatttaaaagatttctctttttttaatcacttttgaatatagaaataaa

SEQ ID NO: 75439 - DNA, 321 bp, Heterodera glycines
tttacagttaaattgttttttacatatttatttacttttaaaagcacttgtttttcatttgtcaacacctttctgagtcccattagtcatgctcaacacggggttggtcattcccttgctgttatgaaacaaaataatttcatgtttagaaaatttctcggcaaaacttttgtcataacgggggcatcgcgtggcattggcaaggaaattgcacttaaattggccaaagacggcgcgaatatagtcatttgcgcgaagacaactcagggcaacccaaagttgccagggacaatttacagtgcagcggaggaaattgaaaaa

SEQ ID NO: 75440 - DNA, 529 bp, Heterodera glycines
atgggactcagaaaggtgttgacaaatgaaaaacaagtgcttttaaaagtaaataaatatgtaaaaaacaatttaactgtaaaaaattaatttattagtttattatcactgattaggtacttaacatcatatcattgataagttattcaattgtttacgaatcaaaaaataaataaacaaaaatgtgttacataggatattgattgtttgttttcgtataatttcaatttgtcggttgcatcactttggcaatttcaacctcctcttttgtaatgtccaaaaatgacaaaataaatgcatcaaactttgctaaaaaattcattgtcagatgaattaggtaattaagcaagagcaaataagcgagaatggttaatatgaaacgaatgggttaaggaaattgattgtacagctcgagggataccaacaggagctcaacgacatccgagtcaaggctgacgccgtggtcaaagagaaggaagtgttggagtatcagctgaccggccagaaaaggaggggaagcaaacaacgg

SEQ ID NO: 75441 - DNA, 2575 bp, Heterodera glycines
cgccaccggaacaacaagacgctcctccggcgccgaacatcgttttgcgtcagcagtcaccgccggcacaacaacaccacaggcgtgacgacaggctgaactttgatacaccttctccgctactgcgtcagcaaagaccgttggtgcagtcgccgcttgtgggtcagcaaccagacactcctgttgcaccaccatcgccaaacgcaactttgcatcagcacccgttggggccaccgcaacaaggacatcgtactcctgcgccaaaacaacagcagcgtaaacatcttgtcatctacactccatcggagggtacgccatcgccagttcggccgccgcaacatcaacagcagcacgacaaaaatccaaactttcgcaatatttcgtacatattttcattttttatattgaactttaattcgttctaggcctagttaggtcatttttatgcattttgtgcctgtttcaccctttatgaataatttttttccaaaaaataaccattttaaaattttgtttcgtacatattcctgggtttttgtacataattcatacatagtttttacattttttatttacatatttgctttttttcttacataaaaaggaatccttgtatattagccttatttttcagcgaacatgtaattggtttgcacgcttcattctcgtagataactttttttatatatataaaaaagcaatcaatagaaaaattgattttatggcatattaaaatgaatattatttttcgcaaaaataaaaatgaattattcagttgtaattattcttaaattaatttattcggcaatttttatttgcttatcactgaagctgagatttataaatatttatgaaaaattccgaaacatttaaataaatatttacgaaaaaaccccaaaggccatatttgtaaaaggggacaattgggtgcgatttgggaaatggttttcgttaaatttatgttttattgtatttttgttaaaattgccgaaatattctcaaaatattgaaatagttaaaaaaacatattcgtaaatattttatttatgaaattaaaaaaatattttttacatttatggatattaacgttaaaaacgtcaaaacaatctatttccggctaaaaatgttgtctttcgtccattctcattaaaattaaactgttgaaaaaatgccataattacttttcactgttttttaggtgtaattagtaataatcttttcctttttattctacgacagtaataaaataaatgcgtttccctttttttgttggcctttttatgctcccgtttttggcgttctgtttcgccaagaaagaaccggagaatattttgtttaattttgatgccatttttgaaaggtttgctgaatttcagcacaaacaaaacaaccccatgacagcttcttccagcaacaacaactgcccaaattcaaacggtactacttttgaggaacaccagcaaaacggaggcgaaaagatacgataccgagcgacggtaattaccgtaaagcacagagtgaattacctaattgtttgacagtgtaaaagcgaaaatatcgacacaaaaaatgcttaaaattttaaaagaaaacgcccgagaattcgatgaaatttggcgttccattcctcttaaaaatggataagttgtgcttggtcgtttcttcaattccgcaacttttcctaaatcccaaagggaaataaaatttaaaaaaaatcctaaacattcttaaaaacccaatctaacattcttggtatcgttcctattctaggaatggttctaatgcacttctttatgagtccactcaattaacaattcatggtttttttacgcaacatttcttcatgttcgaataaaccctattttttggttttttcgaaacacaaagtacaaattaataatttgtgaaaacgagaaaatgctaacacttaaagaaagttacaaacgaaaatttccaacaattacttaattataatattttggcaattgcctaaacgctgagattttatatagcttagctgctttagactttgtgctttcgaatgataccaaaaagatagggttattcgaacaaatatattgtataaaaattgtttatggttaattgtaaacattaaaataatttctctcagaagcaggtaaatttttttttgaaattaaatatttttatcatcgcctaaatcagatttctccgcctggccgatatgccgtgattgcctgggacggcattttgaatgaagaggacaatgaatgccaacaaaaatttgtgctgccaaccaaaagcgtggaaaagctgcatttcttcaccaatgtgttgaatgcgactgatcagttggccaaatgttttaagcatttttacatggcccgctccgatgcgaatggccaatttgaattacggcacaatttattgacagaaaatgcggctaatgatggcatttggtgtaacattttcagctcggcagattggctcagtaaattatggtttggccgaggagaaaaacggcaaaaaattgacgatgacgatccactcagaattgttcaacttcagatacttccactcaattctaaaggggttg

SEQ ID NO: 75442 - DNA, 201 bp, Heterodera glycines
atggtggtgcaacaggagtgtctggttgctgacccacaagcggcgactgcaccaacggtctttgctgacgcagtagcggagaaggtgtatcaaagttcagcctgtcgtcacgcctgtggtgttgttgtgccggcggtgactgctgacgcaaaacgatgttcggcgccggaggagcgtcttgttgttccggtggcgctataa

SEQ ID NO: 75443 - DNA, 960 bp, Heterodera glycines
atgaaggagacgaaagcgaattttgtcgggcagcggacggtcgggcaatggaaaatcaattgaattggcatggccaataaacaaagctctctaatcaaaatcgcaacacaatcatcaaacatgtggccatttggtgcaagggaaagcaagatcaacgtcttgaggttgagcaaaggcgtcagcagctggaaggagaagtagctgcactggtaaaagcttgtggacgcctcaaaaggaatgcgcaaaagaaggacatcgcgttcaagttgaaaagccttgaaatggtgaaatggcctcctgcaaaagccttcgacaatccttacatcaaacaaggtatataagcaactttacaagctctaaattagtgttctattgatatgtcgcaagttttcctattatgtaaggattccttacatgtgattgattttgccctatgtgtaacaaatagttacactacgcttgaaacttactaagttggaagaatttttacatatgagcatgcgtacacacaggctaatcaataaatttcatgtaaagcctacggccgaggcaccgatcaccaattccaaaaagcagcaaccatcgctggccgcttccgcgcaaacttcttgggatcgtcgaccgcacggttggcgtcagccgcgtggtacgccacccgtggagtttactacccaatcgaggactgcccacccattcctgccgacaaggacgggtatgtgccaccagaacagcctggactcaacgcggacgaccaacctgtcactcttgcaaaggcattgcaagatgttagcaattttttatgtcttcagttttgactaataaatttagcctttgtttggacctgctgatcgtgaggccatcatcggccaacagccgacagatgaaattgcgtcagcattcgacgcttttgcgcaaaaggctggtgactttgcggaccaactgcgcagacggattgaggaa

SEQ ID NO: 75444 - DNA, 2002 bp, Heterodera glycines
atgccaacgcgaggagcatcgccagcgaatgcagctgccatcaatgaggcatttggcttgcatccctttttcgtcgcttttttgatgattcagaatttgagcgattttttttataactgtgagaatgacaagtttcttggctgagtgccaatcatcgatagtcattggcatttattagcggtaaatctcttcgctgtgatcacgtgaaatgaactaataattagtttacatacttaaattcttaaggtgaattttatacaattgtttaataattccttaaaaattcaatttatatattttataatttaaaaaatttattatgttgacgtaatatatgtatagaaagcattattattgatatgcaaataaataattgaatcaaatgcgccatcattttcccggttaaaattatgcgctagaaaaattcgcagaacaacatccggcgccacattatgttttgaatatatttctccgataaacagttgaataaaacaatatataaggagaataataaattaaataataaataataaaattttcgacaaaatattcaaacataaattttggagaattaatatttgccaatttatgtcctgctgataatgttctccctccgcttcatcatattcatcttcgtcgcttcttcaacacttttgttcaaaagcgtagacaccaaagtggtggcagtcaaaattttaacagcgtactcaacagagtataattcttataattctgattctcaagccgagagctgcttgctaatttgccttcaaaatggttatgaaatcgttagtaatgctttttaactaattggcttggtgctatgtcgttatataaaaaaaccatcaaatgaaaattttcaacaaaaaaactgtccataacttttgtcattgttaaccaaattaaacattcttgatatcattcgatagaccaaaatttcaaaaaatttcatacagtttgaacaaggttatgactaagggtagagcggtaccggcaccggttttttcaaaaataaatgtaccggcaccggttttttcaaaaataaatgtaccggcaccggttttttcaaaaataaatgtaccggcaccggttttttcaaaaataaatgtaccggcaccggttttttcaaaaataaatgtaccggcaccggttttttcaaaaataaatgtaccggcaccggttttttcaaaaataaatgtaccggcaccggtttttcgcaaattttgctttttatttttcaatttggcccatccctgctaaaaagtaataccgtttttgcacccaaacttcccccctcccattcactattgatataaaataatgattttgaggtctgctcgcaaacattccaagcctggaactgttggatgaaataagcaaggaaaatgcattggcaaaacaacacaatgtatgcagcagttgaccagttttatttagttttttttcaatttttacattttcaggaaccccagtatgagctggagtgttttgtttcgcttggcactggcaaggcaccgactgaaccggttggcacaacatcgttggagattgggattattggagcaattaagaatctggcggggattttgatggatcaggtacacacacacacacacacactatatatatatatatgtgtgtgtaaagcaaatcattttaaaagtaatttcaagctgggtttgtatatttccccttcctcacaattgtttctgaaataattgtttttttttggaattagactcaaaattttcaatcgaaaaaatttgagtgcgtttcaggcctcccacagtccaggaaaaaaatatggatttccatataattggaatccctaattatgacccctcgaaaatggtagaactttgggcgccatggtgccgaaggcgatgccagaaaattttgattttattgaatttagttaagaaaatgttgcacgcactttgaagtcataaaacgaaattttttgcgatttttcaaaaaaaaatttgtttgttttttgaataaa

SEQ ID NO: 75445 - DNA, 1550 bp, Heterodera glycines
atgacacccggaacatcaactccatcgacaatgcttttcatagttccctcaccacacaaacagactctgcacaccaaacgtggcctcaatctgacgatgcttcacctacaaatgttgttgtctgccaaccgtgaccggcaaatgccatggcccatccatttgtgtaacttcccctcaacatcatccgccgacgacggcaccggcggtgccgacgctggtgctgttgcggaagtgcacgcactttgtcgtatgcgattgaacacgctggacagcacgcgatgcgtcaccggcgaactgcacaccgagtcgtacacggagttgttcccggagttgcgcagcgcagacaaaattgtctacctgagcccgcactccaaggactcattgacagtgcgttttttggcattttactctgcccatgttattattgcatttttttttgttttctctctctctctctctcttcccatttctctttgtctctttctttcttccgtccgtctatctgtctgtcttatttctctctttgcttttcatctctttctcgctctcgttctttcatctctctcttccatctttctcttttttcatctctctctctctttttccactaattactccctcccctcccccttcacagcatattgatcccgacgcctgttacgtgatcggtgccattgtggacagggcacgtgagccgcgcattccggtgaaggcatcgctgttggtcagcgaagaagagcaactgccatgccgacgctttcccatcccgcccgagttcctgcgcggtggtaacccaatgctgaccctggtccaagcgatggccattctgcagcacgtgttccattcgcccggcggcgacgattggcacggcgcatttgaacagtgcgtttttgggggttatgcaataaaacgaacgaagtcttaattatttactattaccagcttcgggcacggatttggcactagaaaagtgccgagtcgtgtacaaaaatgtcgggtcgtgttggctttcaaaaatatgaggttgtttcaagattcgtataaaaaaataattttggattggggaggcaatcctggctatttttgtaatagtatcccaatttgagcggagctaatttgccggaaatgaatcaaaatagcccgatttacatatatatatgaaattaaaaaattacaaattcaaatcggcacagtttagataaaacggaagttgtaagactcgggacgaaaaaaatttcgtatttgggggaggcaaccccacatttttctttatctctacagaatatcccttttacaaattcaaatcggcactgtttaggtatatcccaaaacggaagcgtttggcgccggccgagaagaacacggtgatccgactccgttacgacaacattcacacacggaacagagaaatggcacgcattgttgagcagcgaataccgacaacagcagcagcagctaaagttgatcaacaacagacaactaatggcggcggaagaagtgatcaaaaaatggctgttggaatgcgctttttgagtcggattttcggctga

SEQ ID NO: 75446 - DNA, 262 bp, Heterodera glycines
atgcggctgaaaacggagcagaaaaaggcgcaaatgcaattgatgagaagcggtggtggcgatggcacggcgatgccaaaaatggaagaagaggaagacgaattggaagaggaattggaggaagaggaggaggaaggaagaagaacagtggaagaggaggaggaaaaggaacagagggacgaagaggaggagaaaaagggcgatgagcaaagaacagcaacacgcaaaaccaaagcctttacaatcccattcatctccacgg

SEQ ID NO: 75447 - DNA, 247 bp, Heterodera glycines
atgcaggtgctgtattcttttgttttgtattatattagcagaccagacattaatgaagggggacgtgggaatcttgaggtgaccactgttttatgcattcatttcatcccgaaatggcccttgctaattgtaagtaattgtttgtttcgtttcagaattgcaaggcttggctgagtccgtacgatgtctattggaagtgccgatacaaatgaactacggaattgtttttgttctttattaattcaaa

SEQ ID NO: 75448 - DNA, 1534 bp, Heterodera glycines
ttcgatttatcttatggcttttctgtgatgcaaatttttggggaggaagagctcctttccgtcccattcaaatacgtcgtcctttttgccgtcggttgtcctttggtcgcttttttgctttgtttgtttctcagcatattcctccattatgagcaggtaacaaacagctaattgaacgtaatgctttcctgtttttccccttttaggctgtgtggacgcattgcgaagtaataaattatataaataacttcgcattttgtgggttctttaaaatgtctctcttcctttccggttcctaattggcttccctctttgtcggctgctgtttccacttttgcgcctgaacgttacatttggcggctgttcatcggactccatggaactccgaggtttcaattctccccccccccctccattttcgtgcttctctcttttccctcagattggtcgctgcgttcgccttcaagtgatcgcttttgctcttcggcctccgaatgttccatttttttcctccttcagaaactttctggtcacttccagcctttggcctttcccctttcgtccatggtatcgttgggcttccaaattcgcttgttcgttgaatttggccgaaattctgtcactgattttgctctcgtcggtttcttcaacggaggaccattgtgagttttgttttctgatgaccgctggtcagttgtcctttctttaacagtccttcacgccctttgtttctccgggttcactttcttcgctcatttttacatgtttgtcaggttcagcccgtgttggttttgaatttcttatcaatttcattatttaagtatttggcttttcgacttctccggaagacggcggtccagcaaattggtaattttgggcagattacattcaacccggccttttcaagaaggggcattcctgtgttcatgagtttgggatgaaacttaatgcgtagcttaccgcggttagttttgtaaaatctttggactccgaggcttctctattagcaagcacaattttgaaaaaaaactcaaatcaaagtcttgattttcaaacaatttcgtcatgatatatttcatgttaatagagaaacctctgggctaccaaataatatcaaatatattggaataaggcaattttgaaaggtctgatagccaaaaaactgggatggcgcccattcaccttcgcttgggatttagtaaatccatttgcccttcctttttgtgtttgctttttcatcccttccctcttttgttagggtgaactgtccttccaatacaaagtgttgtgctgcgtcggttctgtgctttcgctgcttttcgtcctttatttttactaccgtcacaatcgcttctgcgagcccggcgtttacactcttttcgcgctcagcgagtacagtctgattctgttcaacattctcttccactccacgctttactacgacttccattcccgcgcactcactttgaacaccgcggcactctcttccgtcgcggggtacgatttgttgccgttgtacagcgagaaaaggacg

SEQ ID NO: 75449 - DNA, 399 bp, Heterodera glycines
atggatttgactcgccccactgatcaattggcaaatgaccggtcaaactcttcggaggccccacaacagcagccatttgttgtaaatgtggtggcttctcgccccagaagtaaaactgaccccaaaaattacgacccgaagcctttgatcgtcccgccgggtgctgccgctgatcagcgaggcccccgtcggctttccccggtcccgtgcctttgtatggcgcgcaattcgtcgcccaccggtgcctccccctctcaactcgtctaccaaccgcggactgtcccttctccgtccgcgagtctctccccaactgatcaaaaggggtggggcacgctgaagaattcgtcggatccgtcgacaataaatgtgccgataaagacgagtgtttgcacggcaacg

SEQ ID NO: 75450 - DNA, 581 bp, Heterodera glycines
atggaagggaaaagcagaagcgggcggaggagagactgtgagggattatgggagaagcaatcgctgctcgaccccaccccccccccccttcgtcttgtacataaactgtccgtcgttgcccacgtctatctgctgcgcaaataataaaatgcttactcccccttcccccggcgcatttgcccattcgattccatcgataaaatattgagaaattctaattaaaaataaaaaagagagagagagaaagtaattaatcagtagacggcggaaggaaagcgatgtgagagaatggataatgattgagcaatgaatgccaaagggcactttcactgatttggcgatgcctttgaaaactcacgcaaatgctccccctccccctccgtctcttccgcccggccctttcggcggtgtcctcgcccaatttcttctcgcccattggccgcgcgtttcgtcgccaccgccccaacaatttgcggggaattattatggaggtgaagcaacagaacgaagagaacgatgagaagcgggggaatttgggaaggaaaagcgaagaattgtgggaaaaccatcggaaaataaaa

SEQ ID NO: 75451 - DNA, 906 bp, Heterodera glycines
atggctccgcttccgctaccccaccgtccgttctctcagccgccgcgatcgccacgtgccacggcacaaatggcaacggaaagccaacagcaaaatcgggaggaggagcagcaacagcagagacaggaacggcacaacaccgtgccaaattcggttagccaacagcagcaacagactatccgaaaattatccgcttccgctacttcgacgatcgcctccgccaatgattttgtgtgcaagttttgcgggaagcgttacgcgtacgcgagttcgctgtatgtgcacacgcgactccacacgggcgaaagaccgttcaggtgggagagagtggcagagaaaaaggggaagcaattttaaaatgcaaaaaaaaaaaacagattatttagatgcaatttttgcgacaaatccttcaccaaccagggcaacatgcaggtccatttgcgagtgcacaccggcgaaaagccgtaaattcgaaattggaaataaacaattattttttaattccattttcacagatacaaatgcgacggctgtgggaagggatacgcgcagaaagtcgggctgaacattcaccaggagcagtgccaagtgagtaattgacaatgctaatgactatactaattaacctactaggaatccctcactcatcatccctttgatgaatttttatgctttaatgcgaaaaaaccctctaatgtccacacccgttcattaaatgaaccgatcagtgatcagaatggaaaactgaattcattggccgatttttttattgctaaacttcagaattggctgagccgtcgcagttctgtgtccacgtccgctgagaaaggcgaagacgacggaatggcaaacgaaggccaacaaacggtgccgacgagaagggcatctcttcaggaggccttttaa

SEQ ID NO: 75452 - DNA, 1321 bp, Heterodera glycines
agttgttcagctctgttcagcgcctcttcaacaaattcctgccaaaatgtctctgcacagagagacgaagacgaatttgagggggaggaggaaatgtttgaagaatgttatgaggaggaggaggatgacgaattggtggacgtggaagggcacgacgaagagacggagatgaaccaggggagagatgagcgtcgggggatcagacggaggccgggcggaacggccacgacgacgccggaggggacggtgccgcgaagggataaagtgccggtggagaaacggcacaagtgcgacgtgtgcggcaaagcgtttccctacctgtccattcttgaatcgcacaaacgctgccacacaggtgggcaaaaaaaaagggggggggggagaaagggccaacaattattggcacaaaattggcatttttaaaaaacgaatggaaaaaagtggcattttgaatttacaggtgagaagccctttttgtgccatttctgcgacaaacgcttcgcccaaaaagcgacgcttcaagtccacgaacggacgcacaccggcgaaaggccgtaagtgcgaacgatttgaacaattaggaaggcattagcaaattccaatgattcgcttaagtcttttgatcactttgctgattgatcagttgcaattcgtttctcctgatcagatacaaatgcaaattctgcgacaaaacattcgctcagtacggcacaaaaacggtgcacgaaaagtcggcccacctcggcattcgcaactacaaatgcccccactgtgacaaggatttgtcttccccgtcagcgctttacactcacaaaaaaacacacggcgaaaaaatgttcaaatgccaacattgtccgaaaacgttcactctaaagaactacctgaagctgcacgtcaagcaggtgcacgagcagaacgaacgcaaacacagctgccgcttctgcggcaaatcatttgcttacgcggggagcctacaggcaagcggaaggatgggaaggagcggaactgatcggagatatcgattgatcagggcagaggatttatggccggagcctatgcgatatcgattgatccgggggtttgaccggatatcggttgggttaattgggataatgataggacggaggcactgattaaaagaaagccttctccctcgcttggcagtctgatttgtctaatccctttctatgatcacttctccacactgccaacctcagccccccttcacaggtccatttgcggacgcacaccggcgagcggccctatcagtgcaaattctgtccgaaagcgtttgccagccaagggaattgcaaagccacga

SEQ ID NO: 75453 - DNA, 2162 bp, Heterodera glycines
atgttgaccggcatggtcaaggagcacatggcgcgccagcacttgcgccgtgagcagcaggaaaagctgaagaatgaggcaattgtggcggcccacgagctgaccgaggcgctggtggaccatctgaaccacaggttttgcaaaatccatcctacggcattgccgactcgtccaattattttccggactttaatatcctgagaaaataaaagtcggtgtttctggctatttgtaatcgctgatttctaattggcattcactttggcctatttaaaaatgtgaacaggaagtctaattcaaattggctattctcagatggtgggcttccatttttggaaaaaaaaaccaaatttttcctgagaaaatatttttcgggttttcatggtcgagaataagaatccggcatcgctttccgggttcgatttaggccgagaaggtggtcggtttaagattcttcgaccccgaaaacccgcaaaatagtgtagtttacctcgagaaaaaaaattatttttcaaaaagtggacccaccccaccatctaaaggtttaccttcaaagtttccgtttgcattttttaaaattaaaatggattaaaactagcaaaaacgaatctcaatcatttgcaacaccaaaaatgtcatgtttaatatggtgtttcgccttcttgttcgaatagggtacgggatttaggaataagcacaaaaattaccgatttgtggaataattttttgatttttgtaaaaacaattatttttcagggtgtcccatgcctacaatttgcagaaacggttggatgtcgagtgtaaaaagttggagacacaaagtgcggcgttggcacggcacgcggacgcatgggtggcactggtcggagacatgaaccaggcactgaaggtacacaccggcaaaggcgctgaatatttaaacgctaatgccaagggagggctaaggcccagcaaatttaagcgaaacaaatatgttttattttttaatttaaaaatgttagaattatggctaaataaatgaaatatttttaaaattcgctccctttttattggcaaaaaattctttttttttcaaaaaaaatttttttcggaaactggccaagacacagttaaaaagtgtaatgaaaacttgcataaaacgcattaataacttgaaataaacaaaatctttaaaatttcatgattggcccgattttcatttacgccaaaattcgattagaaatgaaaaaatgcaaacaaaatttttctggctattcacctgcctcaacccctgtcgaattttttaaatttattgttttggtctggccaatttcttgcttgctaaatatggcgagttttcatttgtattttcactttctaagaccatatttgaaagtgccagaaacaaaaaattaacaaaaaggggtgggggaaggtaaaatttgaactattaaaaaaaacattttaaaaatccaaaaaattttcctgcccgctcctaaaaatccttatttgtcttgcaaagatttgcccaaatcgcaaaatttgttcatttttggataaaaaatatttaaacaaattcatttaaaatcacaatttttcccatggcgcgtgtccgcaccaccggactccctcttgtcgcccagtattttttttttgaaaaagtgggctacaaaaaaagtcggtgttcaattttttggtgggagtttttttttttgctacaaatataaaaaatgatggaaatttttctccttttttgattctcaaaagtctaaagctttgtgccttttctcaggaggttggcgacgtggacaactgggcacgagcaattgaggccgatgtgacacaatgtgccgccactttggaacgcgtttatcggacccggggcggcgctgggcatggaccggcggtgggcgcgggaggtaaaaattattggattggaaaatttttattagaaaaatcatttgatcaccaacattcagccccacctgaaaattaaaaaaatatttttcctttcgagttttttctcgttaaaataaatttaacgagtcgattcaaatgttttttattaaaaaaaacaattataattacaaaaaaatttagaaacaaaatttttttttcagtttcttcaaatcagtgagcaaaattttttttggttttaaactagtattttcaacaaatttgca

SEQ ID NO: 75454 - DNA, 3015 bp, Heterodera glycines
ctctttttctttcctccgttcggaggattttgccgaattccgtgcaaattttgacgcattgcagcagaaattggatgcggtcgaccgagaagaatgcgaaaataaaatgcaaaatgggataacgattaggcacagatgtttggatggagaagcgatgggcggagagccgcgaaaattgctggaccggaacggatggatcagcttcagggccacgtccgcactgcattttcaacgaagggccgagctgaacaggagagccaaggaggaaaagtgagtggcaccaaagggactgcctgaaatttgaccttttaagcgtgtttacatacttaagactgaaaaaacgcgaagcattgttggctgaatcggaaattggtcgctgtgaactgctcgcccatgatgacttccagcgggacgtgctaagcccgtacaaccatcaaggcatcgcctttctttattgtgccaatgcgcgacgcgccacgagccgacgcgtcgaagaggcgtcgcgcattttctgcacggggccatacgttttgcaacgccaattttaccacggcaaagacacatcgctgggagcctttttgcttaagtaaaacgatgcacagattgggactggaacagccataaccaataattcagctgctgcttcaactcggacttcaaatgcaaaggctgtgaacggccaatgttggaccatttccggcgcattgtgcacggcaacacgcgcattgaggtggtgacgcggaatgtggccagcgggggcggcggcggcactttccgtaacagttcctcgtcctccttggccaacgcggcggtggccaccgtcggtccattcgtcagcgggggactcgcggccgcaattccgtcgtcctcgtcgggtggtggcgacgacgagctgaacaggacaatgccactggacgagttgccctcctccatccccaacaacaactgttccgccatcatttgttggctccgttgcaatgcgtccgctttttgtttttatggcaaaaattgctctgtcatattttaagttgttctgcaaattcgtcgattgccaaaatgacggacgaaatgttccatttgagttttgctaaatttgtcgattatttggccaatgggtcccattgggtcgggttttttttgcttattgtcttcccatatttgtccattcatcgctctttgccaggtgtccccctttccttcgtccatcgacttggccgagtgtcaccactgcacctttcactgccattcccacttttttgcccttgacaattttgtcgcgcgtttctccgtcaacccggtcctttcctccctttcttttcccatttaatcgtccgttttcatacgtccctttttggctcagatttacccattgaatgttctctttgctccaattccgtgctctgtcgactcgacgacaattactgaatcgacgcaacagaaaagtgtcatcaaacaaaataatgaatgtgtgtaatttcacaaatttaagcactttccgaaattgccttgcgctgcactttggacgagaagggcggcgggaatggcactcaaatggtgccggacgtcggctcggtgattgcccatgcgttggcccaaccgtccgagtcgcggcacccgccgggccgtgaaaaggaaaagggctctttcggttcgctgggcgctttcagcgcgacagcgaacaatggaagcaaattcgccgactttgtggaaattgtttacgcggaagagaattggcagtacacagtgaaggtgccaaatcataattggcacatccaattaagtgtccaatttcgcctttaggtctatttcccggaacaatttgagcgttttcgttccctgactttctgtgatggtgaagaaaggtttgtttttgaattcagattgtgttttgttatgttatttttatgcttttagctttatcaattccatctccacttcgtcgccatggtttttctcattttttattataattttccattttatttttaatttaaaaggtatccccaaggaggaaaaagtggcgccgttttttcccgcactgacgacgaacgctttgtgctgaaaacgttaaaccgtttcgagttggacgcgttcaaacaaagcgcactcaaatacatcgattacatttcgatggcactgatggagggcaaactgaccgcgctttgcaaagtctaattagtggacatcaaattaattggcgtagggtttaatttagatttttggtgctttttccgtaaattgcactaacaaacagacgggccaatcggtgaagagtgatctgatcgtcatggaatttctgttctacaggaaggacatcaaacagatttgggacctcaaagggtcactaaggaatcggtcggtcgacgtcttttgaatggcatttgtttccaccgacttttcttcacattgccctctttttaggctcgcctccacaaaaaatgacaacaacggcgcctcttccgtgctattggacgagaactacattcagaacatgtggcggaaccaaatttatattacaactcattcgaagacggcactgaggcaagccaagcaaatgccaaaataatcgaactctaatacactaactgtgacgaccaatttcagtcaggcgatcatcaacgacagccacttcctggccgaccagggcatcatggactacagtctgttggccggaatatgtcggggggaggaggacgaagtgatcgtcggcatcgtggactatatggtgggcattttcatgccaatttcatttctaatttgtgcccatcatccgcatgtcagaggacattcactttcgacaaaaaagtcgaaagtgccatcaaaaatgccattcctctaaccaattcgtccactgtcatttcgcctgagcaatactgccgaagattttacgaagccatcgacgggtttattcccgacttttacttttctatctccctaaccgtaacacctttaattttcaggtatttcgcggttgcgcccgaccaatggaccagcgaatcagtttttacttagaac

SEQ ID NO: 75455 - DNA, 375 bp, Heterodera glycines
atggcggaacagttgttgttggggatggaggagggcaactcgtccagtggcattgtcctgttcagctcgtcgtcgccaccacccgacgaggacgacggaattgcggccgcgagtcccccgctgacgaatggaccgacggtggccaccgccgcgttggccaaggaggacgaggaactgttacggaaagtgccgccgccgcccccgctggccacattccgcgtcaccacctcaatgcgcgtgttgccgtgcacaatgcgccggaaatggtccaacattggccgttcacagcctttgcatttgaagtccgagttgaagcagcagctgaattattggttatggctgttccagtcccaatctgtgcatcgttttacttaa

SEQ ID NO: 75456 - DNA, 371 bp, Heterodera glycines
atgatggttaatggagttttctgtttttgtctggtaattgtcttacttcaattaggtaatcgttggtaatttaattatttaatcagggaaagggtttttaggtgttcgaaaccgtaaaataggtaccgaaataagtgccaaaaaagtggcaaaatatgtgctaaaatcgcgaaaaaccctaatttttgttgaaaaaacatgtcgaaaacccaaatgttcaaaatgactaacaatttttttttagtttttcctcgtcggcgcctaaatttctgtgcttttgactttgaaaatttttagtcacatttgctaacagagttttttttgttgtattttctttaggaatttttcgaggattgcgagaattatgaaaa

SEQ ID NO: 75457 - DNA, 1099 bp, Heterodera glycines
atggttgtagtgttgctgaaagttcaacttcgagtaatgagacggacaacgttagcgaagaaacaaagccaattaaaaatttttggtaaataattttaaaaaattaaattaattattattatataaaaaatgatttccaaataatttggctatttgaaaaatataaagttttaatcgggtaaaattttaaaaaatacaaaaaaaaataaatataaaaattttcatttaagaaactgaacatttgaatccaagaaagcgaaaaaaaccagatcttcaagatacggttaattacgtgaataaaattaaggtcaataaaatattatttttatttaaattaataaattaaattggcattttatttaatcaaaattgaattctataaattaaattgacatctttaggagcatttttgtgataataaaaatgtctacaaacagtttctggacatactgaaaaagcataaaaatgaccataaagaattactttggcaagttggccaactatttcatggccatggtgatctgatcgacgaatttattgactatttatctgtgatggacgggaatgatcaaattcgccaaaaaaccgatgattaaaatgatttttcaaatttttctgtttaaaaaaagaatatccattcgttttttatgttgttgtttatttgttgctttatatatggtaaatctttggttttagtcttgttattttcaaaatttttgtgatttatcccaaaaatccaaaaatgctcaaaatttccaaaaaaccacaacaagtctaattttgagaatttagccttaattgcctctacattttgatttgtttataaaaattaaaatctgatagataattttgagttttgtgaattttttaagaaagttaactggaaggccaaaaacaatactgaaaaattttaaaaatattaaattgattttgaaaattttaattatttttgtgggtttttccgaaaaactaaaatttccaaaatcataaaaagtctcattttgaaaatttagctttatttgcctctaaaaaccacaaaataaggctaaagcctcgcatttgagagttctgtttttgaatgtgtataaattgaaatgta

SEQ ID NO: 75458 - DNA, 431 bp, Heterodera glycines
atgctgatcactctttgcttggcaattttatttcaattcggtaaaattttatatttaatatttcttaattgagatgaattataatttattcttccaatatttttcatagttaattgtagaaaatttaaaaatccattaaaaattaagtgaaaccaatgccaccaatggaaaatgaagcgccggcggaagagtatgacggctcattgccgagttcaattgctatttccaaggtgtactgctggcttccggcggacaaacagccaaaaaagcttgtgaacatcaaagcggcgccgccaccgccgccggctaattatgacataaagcgggtggcatcagaggcagccgaaagcgtttatagttggctgccaaaggagcaacagcctaaactgatggacacaagtgcgtattaaaaattatggataaaaaataaa

SEQ ID NO: 75459 - DNA, 63 bp, Heterodera glycines
ttcatgaggatgtgaagcttgatttcaatgatgacattttcggccaacatgttagtggagaag

SEQ ID NO: 75460 - DNA, 965 bp, Heterodera glycines
atggaaaatgcaaaagtgatgggccaactgaaattgaagccgattggcaaattcgaacgttcaagccaaagctgagctgcacgaaaaaggatgattcatgcgcatgccattggcaaataaaggcaatttatagcaaatatttaaaaaaaaattaaaaagaaaccaaataacaaataaaattaaataaaaaacattttatagccaaaggatggcaaaaaagtgatcaccaaactgaaatggctgaacgaaaaggtgctcagctgtggcaacccctgcggcacttatcgagtcgaaataaaataccgaaaagacaaaagagcgcggggtaatttaatttaaataatttttaaagtattttatttttgtaaaggtgcatttgtttgctgttctgcccaaattgaagaagatgaaacaaagaattggattgaagcggatgcacccgacgaggacattctcatttcggcttatatcaatccgtcgaattttgagcaattgacggaattgttcgaattgacttatgaaacgggtaagggcacataataattattattttatgttaatattgctttaaatttcttagatggtgctaaaattttgccagcgagcgattgtcccgacggtgtgaattggaaccgggagagatcacccggagtggtgtttttttgcgagcatcaagatacaggagagagtgtcgagtgctgcactaagggacacaaatgcccattaaaggccaactcggcatacggatgtcaactaattgtggtaaaaaccagtgggattttaaacagtgtgccgaaaataggtgccaacaggcgcagccgtaaaaaattgaaaatttggccatatttttaatagttagatttattaagctgaacggccaataccgcgaaatcagaggcgtaaatgaaagcagaatgttttgtaagttcttaaataattttaaaaattaattaattaattcttaa

SEQ ID NO: 75461 - DNA, 650 bp, Heterodera glycines
  unsure (1)..(650): unsure at all n locations
ttcaaatacgttgagcagctgaaccggcaccancccaattgtcctacagggtgctgttcccgatggaacttcggttgcnccaatgtggtaagtttaattaatttgggtgaagcatcacatggagccacaaacnccatgcaaatcgtaaccgacagaattatagagacaaattgaggatttcttttttcatttactctgtctaaaaatttttttcaaaagtttatgtttctttaaaagattatttcttcttccttacctccaagggtttgatttgcttttaaaaattctcttcagaaagatgcttgcgcccacagtgaccacatttacgacttggtcgccgtcgtggtccattgtggttccacgccgaaccgaggccattacattacgctggtcaaatcccattcgtattggctcctcttcgacgatgacattgtcgatgtaagcgatggatttttaattaaaagctaacccccaataatttgctccttaaagaagttggacgagtcatccattgaggactttttcgggctttcggacagcaacgcacaaaagaactccgagtccgcgtacattttgttctaccagcaaagggcaaatactcgttgaatttgtcccacccatttcaatttgttgcgaatgggcattttgta

SEQ ID NO: 75462 - DNA, 1947 bp, Heterodera glycines; identical to SEQ ID NO: 11942

SEQ ID NO: 75463 - DNA, 1183 bp, Heterodera glycines
  unsure (1)..(1183): unsure at all n locations
ttaggtcagctcaattngcgatcagttcncccgaacgacttcgnaagtccagtgatgattcattttttacatttatttntctcattcctttccctcatttctttcttaaggaaaccatcgccatgtgctcacttttacactttttgccttctttctgttgggtcttccgctgtgcacagcggtagaaaacaatacaattacctacaatcattttgtttttgccgattaaaataaatttctttttttaggctggcatttattggatcgttttgtttgaacgcttttccgccacttggcctttgatcatcatcggcttcttcgaggtcatgactgtgtgttgggtgtacggtcagtcatttgcttttttcattaaataaccattgaacggttcatttttctcgtttcaggtgtcgacaactttcttgacaatgtcaaatggatggtgagaaacactccaaagagagaaattatatgccgttgggtgcaattttcgatactttcgaatttacggcatttcaaatttattttatacaattttccgattaacctaaaaaaaaatttgacggctaataatgccttaatttcttccctttattttagattggtttttaccctccgttttaccttttgtggaagatcctctggaagttcctttgtcccattttgcttttggtatctttgcccattaattaatttgttaatcgttcctttgcccctcccccttcccccgaaggcgcttctgtcgttggtttggctgcaacacaacccgttgcagtacaactccttcctcttcccccgctggtcccttctgctcggctgggccatctctctgtctcccgtcttcatcattctgttcatgttcttctaccaatttgcctctattagcggtcccttttcaaaagtaattggctacagtacaattttttgctatttacagtacctaatatagtaattgttcaatgcgaatgcccttccgttaagcgtctcagagagctgttgtgcccgacggatgactggggacncgcgttggcggtgcaccgtgccgaattgtaccccatgcaaattccggaggcacaaaagctgatggcaccgccgagcagctgcgtgtatcggaacgcaacggttcattcattgaccatgaaatggaattaccatcaatttgttgaccctcccccncttttta

SEQ ID NO: 75464 - DNA, 167 bp, Heterodera glycines
atgagcagcgaatgggcggaagtgtacaaaaattggtggacaaatggacaaaatggacaaaacgaatggatgattcaccacttttggcacaatgctaaagccaatttctgctgttgggcaattggggcggaccttcggctaacggacgaactgacggagggacggac

SEQ ID NO: 75465 - DNA, 303 bp, Heterodera glycines
atgatgaaaataataaaaagaaataataaaattggaattgagtgagaacaataataatatttacagaatgattttaaaaaaggtgtaatgagatgatcaaattaattcgtatgaattagtagtgaaagatgagcaatagatatttattaatagggataagaaaaagctaaataaaattaggcaaaaaatttattgcatttgcagggaggaaaccaaatttggaatcattcaagaagaaataaacaaaatataattcttaaatttgtgaagactggaaaaatttttgaattaaaaaaaaattga

SEQ ID NO: 75466 - DNA, 769 bp, Heterodera glycines
atgaaaataaattctcatcattttcgatatattaatgtaagtaattaataataatttgtttgtcatgctgttgcattcccttaatagtatttttcattatttttatgaaaattattttttgttatctaaattaactcgtcgacatcactgatgttgggcgtgttgaatacattagcaattacaaaatttgaaaaaataagttgtaataacaagaaagttgatattaggggatgtttttttcaattttctttctatatttttttatcctcattgaacaaaattgaaaatattaatcaatgattacttttttatatttattaaatttttaactttttttttattattccatgctttagcaaatagtatgaaaaagtatactcgggttcttgaaatagatattatataagcataagaccagatttaatattgtaatattgatatactgcatttaaaactgtatttactttgttattttaaatttatttaatttgtatcaccattgtgtgaaaccaactcgtctaattaaattcgcttttttaatagtttctcgaaacttactcaaccttttcgaatactgactgtttgttatttgttttatgttttcactttatatttcttttttaaattgatagtaaaattcagtttttaatagaattgtttgaattaataattataatattttcatataattattattccttgtatatattgtaaaaaccggtccaaagtaaaaattctgaaaattccattaaaatgacaaagaaataaa

SEQ ID NO: 75467 - DNA, 2470 bp, Heterodera glycines
atgactccttatagaatagtggcatacgacttggaatgcacggtaattaaagattttttttgcaacaaattacggtttcttatttagacgaacactgttttggatgaaaaatcattgaaaaaagagactattcataagcccgattttattagcgcccgatttacttgttcaatatgtttgggagaaattaaaaattgtgaaatttgcggtgatggcccacggcatttaaaagggtgtagtaaggatggagttgacccgttaaactgttttgttaaatggattattagttttgaaaaatatgaaacgtatgcgtatgcacattttagcggtaaggattaacaaataatttaaaaaagctaaaattttatttagggcgttatgattcacattttgttttgagggaacttgctaatttgggatataaacagccggaattaacgatagcggatttaaaaatttacgaattaaaatttaaaagaggggaaaaattcccgaaaattcattttcgggacagttggcttttaatgcagaataaattagctcatttaccaaaaacatttggattggattgtgaatcaaaaatgtactttccccaccaatttaacaaagaagaaaattacggtaaaaaaaatacaaaaataatagaaatataaatttttaggcataattttgagtaccctccctccttttgaggattatttccccgatgaaatgagcgaagaagaatatgagaaatttaaaaaatggtattatgcaaattatcataatgggtttatattaggtaaaaaaactttttgaagaccataaaattggaaaattttttagaagaaaaattggatgaatattgctcaaacgatacggatattttaatgaacgctctattaaaactgagaaaaatatttattgaaataacaaaagatgaggaaacaccaaatgggatagatgtaatgagattatcgacaacgattgcatcttcgtgcatgaagtaagttttaaaaaaatgaaaataaataagtaattttttttagcatttttcgtgccaaatttttaaaaaatagtgagaccttacccatcattcctgagagtggctttgaaccaaaagacagccagagcaatattgcgattaaatattttgaatggattatgcatcgggacggagttaaagggaggcacgccgcaaatgggggagaaatatcgcttttgggcgacaaaaaattaaaaatcgattgcataattggggcgcaaaagagaataattgaatttcaggtaataatggaaatgaaataaatattaaaaaaatttaagggttgcgcttttcatgggtgccaaaattgttataaggggtatatgattcaagcgaatggatttacggcagagcaaaattatgaaagaacacaaaataaaatggagagattaagaagtgtagggaaaaagatggggtatactgtagaagaagtttgggtaagtgttattaaaaatagaaataaaataaccaaatttttaggaatgtgacgttaggaaaatgttaaatagaaagagtgaattttatgatgagcaaatgtcaaaattttttaataatttaccggaaataggaccaattatcccgaggaatggctttgcgggaggccgtacaggtagatttaaacattttttctggtttaatgattaattttaggcccattatgtctttttgctaaggcctctgaaaatattgaaatttcaatttatgatattgttagtctgtacccttgggtgaattattccaccccctatccggttggtatcccaaaaataatcattccgaagcaatatatagtaaaatggtaatttttcggtaaaaaaatacaatttaaatggaattttaggacaacccccgacgatatcccttacgatggacttttaaaagtacgagtcattccccccaaaaatcaattgttgcctgtgttaccgttccatactgtaggttaagaaactttttgattaaatggtgatcttttttaggatgatttattattatttacaaattgtacttcgtgtgccaaaaaatcaaaatgtgattttgtttttgccaaaaattctaaaaaatgtagacatagtgccgaacagcgggcactaaccggggaattttgttctttagaattaagaaaaggtgaaataaataattaaaatgaatcatgctcgttttttgcagcattagaatatggggcagtcatcgatcggttttatcgcggttaccattacgaaaattttgatggaaatttgtttaagaattatgtgagaaaatttttaaaattgaaggttgaggctaccgggtggcctcaggatgttaaaactgaagaagaaaaaatagaatttgtgaaaacatatagagaaacatatgaaattgaattggacccaaaaaaatatgaattttaatcctggattaagacatattgccaaattagcattaaactcattatggtaagaaaaa

SEQ ID NO: 75468 - DNA, 236 bp, Heterodera glycines
aaatatcgcttcaaggacgttatgttttggatgaggaggaagcaattggcctgggaaagagaatgagggtaattaaataagaaaataaaaaatcatgagagttaaaataaaaagtaatataacaaattaaataaatctagaaaataaaattcattagaaaacagaataaaatggaccaaaccgaatcaaatacttaaaggtctacaaggtaggaaattattgcaaattgttaatta

SEQ ID NO: 75469 - DNA, 485 bp, Heterodera glycines
atgtcaaaagaatatgaggattcagaaatattagaagttgtctgtgcgggtaatgaatgaaaaagagataaaaataaatgagaattttagggcctaaacaatacgctttgaaattacaaaaagaaaatggagaaatttggtacaaaacaaaaattagagggatgacgcaaaataaaaacaacaaaattgattatgaagagtttaaggacatggttttgaattatgaggaggaaaagaaaatacagtttaaacatccaaataaattcgggtatgttttcaaatacttagctaaaattatgaattttatttagacctacgagggaaagttatgtgattagcagaaatattacaaaggattatagaccgattcaaaagaaggggttagtttgacagttttattaacgaaataatatttcaatttaggattattttgaacgatgaaaatttaagtgttttgccttttggttgttggtgattttttttga

SEQ ID NO: 75470 - DNA, 622 bp, Heterodera glycines
atggataatcaaaataagccaagaggaaggcctccgaaaaaagttgagaaaaaggaaactcctcaaaacctggagaaaaaagaaattcatcaaaaagcaaaaattaaaattctaaggcccaaaatacagcttaaaggaagaaaaatagaattggacacagaaaatggtacaaattccgttccaactaaaataaaacttcctcctatttatgtaagattgtaatttgcttgtttaataattaaaaactttagaaatgatgaaaaatattctgatcagtaaagttttaaaaaatatatttaaaacaaaacttgaaaagtatagtcatattttatcatgctcaaaatacatacagatctttgtagttgtaatagtgagagaccaatagatgactaaaaaatgagagatcgggattaacatatgctcaaacagtgaaaaagttaggtgaaaaatcgttgatctgtgtgtacctatgggggcatgtgatcgagtgactacgaacaagtgcatgatcaaaagtgattagaaatgtaaagagagagagagagagagagattgattagagttcgagggaggatgttcgaaataatgattagagtaagtatgtgagtgttttggtatgaca

SEQ ID NO: 75471 - DNA, 192 bp, Heterodera glycines
gtaaatattgatcataggccccaaactcaaaaatgcttaaaaacggtcagaatcgatgtaaaaaggtttgaaatgggttggaaaaatagaattaggggcgcgcttgcccttttccaggatgaaaagtgccgaaaatggagtgccaaactcagctgggactcaagtgaccgcactataaaaagcacacaaaag

SEQ ID NO: 75472 - DNA, 571 bp, Heterodera glycines
atggtgttagccgacttgggcaggcgaattcggaatgccattggcaaacttggccaagcgacggtcatcaatgaggacgaactcaacgctatgcttaaggttggatggactggccaaagtttatgagatctgcacattccaggccttgggcttgctaaccgctggaaatcaaaattaatttcatccaattttagtggattttttgaaaatttacccctttggggttagccgagtcaaaaaatttctcttttaatcgcttcattctcctgttttttctttcaaatcaacaaaatttgtataaatttagcgtaaattctttagtttttcataaaaaacactccgttccatggacagggagacaatataaaaaatttaaacgtttttttttgttgaaaactgaaagtatattacctcctttgttcaggaagtctgttccgcgctaattgagtcggatgtaaatgttcggttcgtttttcaaaatttaaattgcataattttactatgcccatgcaaaattatgattcgaacatttttgcctttaccaaaaaaagggaaaaaatttgacagataa

SEQ ID NO: 75473 - DNA, 1704 bp, Heterodera glycines
  unsure (1)..(1704): unsure at all n locations
atgcnttgtgccaacttcccaatttccaaattgcacaatgtgtttttggcatttaaccaagcgcgccattttgaagaaaaggtaaaaaattattgtcatcagcagagatgagattttttggaaataaaaaattgccaaagggtagccaaatacagaggaaaaacctcatcccgatgactctttaggttagagccctaaattgtatgttttcatttttcatggtttaaaatgattttgcactgtctcaaaatttaatggtttaaatttttgagtgcttaaattcatttttaaaaaattttcatccatattttgggatttttaccatattataaaccattttcgggtattttttatatataaacatttactctaatgagcatttacatataattaattataaatatgtgcatttccgttaattcgtaggaatttgctctccgttgcttggatcacatcgatcagaatgcgtactcattgctcaaatccgatgcttttcttaaaattggcacaaattacctctgtgaaattctggcccgtgatcagcttcaggctgaagaaatcacaatttggaatgcggtaaattaaacatttggtgattttggcactatttcgaatttttgccaaactataggctcttcgctgggcggacgaacaatgccgtcaaatgggcaaggagtgttcggcggagaatcgtcgtgccatgcttgggccggcacttttccaaattcgttttccgttgatccaattggaagaatttccaagaaacattggtaattaattaaaatttatcatcacatataaatattttcattttatattaattggaacagacaggtcggcactgcgttttattaaagaaaaattctttggcatttttcacaatgtctttttacaaacccaaaactgaccaatcctttcaaaagttttccggctgcaccgtttgatctcaaaaatctcataatttaaacaatttatcgcggctaatcactgatcgatatcattgtagcattaatgccatttcaatttattccccattaatcccctccaaatttaattctttttttcccttcaaattttaaaatttaattgctccttctgctgcagctgtttctggtgtgttgacaagtgacgagttgctcggtgtgctgcttcaccttgcccttccttcagttgcctgttcgcagcctccgctttacccactgagttttccggccaaacagcgaaattataatggtaaattcagtagtctgaaaaagccaagttccgacaggcgccaggccaaaaagtttggacctgaaaaagggcttttgtcccgttaagctcatcccggcccattttccaagtccgggtcctgggctttactgttcatttcaaaatttgtctttatttttaaatgagaaatgcattgaaaacttttctatcgcggaaattctttgtttttaattccataattactttggatttattaagaataagcaaaaacgcaatcgctttaagtgagcggaacagttactctgaaaatcgacaaattatctgaatttggaaaaacgactgacaacaccgaacggcacagtaatgccgtgatcatcagggaaatcccgtggaaaatttcggcatcatttgacacaagcgatatttcctgtccccatcatcgtgtgagaagctttgtagacttttggctccattgtgatgtggaagagaaca

SEQ ID NO: 75474 - DNA, 2119 bp, Heterodera glycines
atgccaaaccaacctgtgccatttcctttctcaaagggtcgcttcgtcaacgatgtggcagagttgcatcgggtgcaactggcgattagtcagctggaagcggaacaacggcatgaccacctgaagcacttgcaacagcaaatgtctctgggagggagcgtaagggggggggggggaagtgatcggaaaaaaccgatcggaaaaaagtatgggaaatgaattccgaccaatggccgttcacctgaattcggtaccaatgactaacaaaatttaggatagaaatgcagcgccgggccggtcatttgtacgaacagttgaccgaatgccgtgccaatttagtaagtgccaaatatacccactcaaaccaattttccatttccttccaaatttacaggtccatcgcctcaacgacggcgtcaaactaatcgcaattatgcaaacgcatttgatctctgagcgactgttggagtggaaaaacagccaaaagttggcacaaattggcgtttcttttgagcagcgcgaacaaattttggacgaaattcaaagcgagtgagtcacaagaacagacaaagaattctttggtcaaaaatgccaatgtcttcgcattgtccaaggttcgaagtgctggcggagaacaattggactttgcgcgcgtgcgcatgttggcaattggacttgttgaaaaggtcgccacggctgaacgatacggttgcccacggcttcaaaacccacttattattatgccaattccattcgcagactgtgcaaacgcacatttccaatctgaactacattttggaaacactcaccaaattgctggtccgttttttactacatttttatttttatttatttgttggcaatggcatttttctctctcatctgctttcccctccactctctctctcctctctttctcctctccttctcctctccatccccccctctctcttctctctccttctcttctctccttatcttcctctctctctctctctgccccttttttctctttcctctgtcccattctctctctgcctctctactctctcttatctctccgttctatttccctttgtccttcccttaccattccctcctcctccatattcagtgtatgttggtcactcaatcttttgtggtcgctgttcagcctgatccggtgctgaaaacgcagcataaatttgttgcggaggtttgggggggggggggagagaaaccgaccaaagcttctgctgttgcatctgtctgttaattcttttgctaaggtgcggcttctgatcggagaaagacttggcatcaaacaacaattggtaagttcggtaaacagcggaagaaaggagaaagggagggcacggcacagacaacagtgaaatgccaacgtaaagcattttctgattggcaccgaatgggtccttttttgacaattgcttattagtcactcctttatgaaatgattattagccttctcatcctcctcttcctccttttgcttttctttcctttttcagatcaacacaaatgtcactgtgaaggtcaaccgaatggaaagtgatcggaacagttcattaattcgaaactgatcagatcattgccgaagaggaggccaaattgctgtccacgggccaactgaatgagaaggacatcaaaacggtcggctcaatttccaatgactttgagaagctaatgttggacgagaggggacacatggcctccaaattcaacaattcggtgcccaattcaatcatttgaatgtcttccaaattcgatttgtcagaagttgtctcgaattgcgcatcggaaacccccggccaaaggctctttacagtccaaccaatccgcggcagacggccaccgaccagaaatacgcgctgttgtttcacattacgccctttcagctgggcaacttgggcaagttcgacgtgtggacgctgtccttgcccataatggtcagaatcagcaaatggaaattgttcattttctccatttctggtcaccgttcacgggtcccaggactgcgatgctcaggcggtcatcctttggcaggtgagtcatccacccgggcattttgccaaattaaaacaatttgtttgaatttcagcgggcgttttcttccgtt

SEQ ID NO: 75475 - DNA, 264 bp, Heterodera glycines
atggctgcatttttgaatggcaatgctcacagcagcattgaatgcaatggtgtcgtccatgacaaaaatggcattgatcagaatggcaccaaattggctgatcgcttacaacattcggtgcaaattgggaccaaaaaagcgccggtgtcaaaggggagcatcaatgtcaacaaatatgtgctggaagtgatcagtgacactgatcagctgcacacattggaacaatatgccattgactacgctcattcaattggtcagtgtgct

SEQ ID NO: 75476 - DNA, 1178 bp, Heterodera glycines
atgacggaatatgaaaaaatgttagatcattctttgtccaacctttcatttgtgctcacagcggaggactcacattttttcccacaaaattggtatgttttggtgaatattttcgggctctctgacttggaattacacgttcaacgccgatttgagtatttagaatgttctaatagacaaaaggtgaacctataattttgtgtcacattgtaatttaaagggcaaaaaattttttaaacagaaatgaaataataataatagcagaaattaatttaatttaacgtttaaattaataaattaacgaattttctttctgaaaatcatatgcaaaaatctattgattttcagataattagcgaattatcatatatttttcgaggaaacttacaaagttatatttgggaagggtgctggcggggccgggatataggtcaaattttgaaaattttaggggaatttcatccctcattcttaggcgtgtaattcgcgtttcgcgccaaaatgcaaaacgcgaaagcgaaagtactgaaaaaagcgcgaaagcgaaagccccatccctgatacgtaccccttgtactccccgtgtccatgggaatgtgttccttctgttgaggtcaaaaagtctcgaaaatcccgaaaaataatttatattcatttttatttttaggctatgcccgttccagagaatcaatttcacgttaattaaatataaaagtttggcaaaaactgaggatgaacaaaatttcacagaccaattcgtggcatttttggccaatattccaagcctaagccatgaaacgattgaattcgtccgagcccaagcgggtttgaagcttggccatcacacttcgggatcggccgcgtacaaatttgtgaagaagcgcatttatgaaagcccatttttgatggaatttcttgtgcggatgttttactgggacttcaaagtgttgggctttccattgccaaatctttttgaaatgcgttatggaaatgattagacccaatgtaattgaatcaagttcgatcaattttctgtaaatttgtgctctttctatctttactttttgttttcgcaaacttttccaatatttggtatttttgaaaaattcttgcgtttcttgattatttcagaaaaaaacaagtaaaaatcgagaacatttggatttttttcaaataaa

SEQ ID NO: 75477 - DNA, 1098 bp, Heterodera glycines
atgaccggcgctgctgcaatgaccggcattgtcatctgcttaagcctactccatctgattttcgtcagcactttgatcagtgacgagaaaatacgttccgaactgtactgggtggtgttaatgcctccggtgggcaattgactatttaattaccctaattactatcccctcccccctctcttcaggtgatcgtcgtttgtggcttcaccggcatggttctgccgagggcggcacttttcctgtacgcaattgcgctcgtctattacatgatctgcatttttgtgctcgtctgttttatgaacacggtcagtttaactcattaatgctaattggttttcaatttggtgccaatttcagctgcacggttctcgcaaatcgatgtgcgaaaaactgatggccaaaggcgagcgaatttcgatcagaatttatccgtttgcttgttggttgatccgcttcgaggattttctgccgacagagtgcgttttatatggacattggaatggattactgatcagagaatagaccaaatattttgaaagtgatcggaacgttcagagaatgtttgaaattgatcggaaaagtgctcccaacattctctgatctaagaagccctcggaaatgaaaaaataattttttttttttttttgcaaattcaggcaaaatttccaccgctttgaagtgctcgtgttccaatcgccgattgtacgaattatgctcgaaattttgaacatcaccgtgtttatggtgaacatcaactatttcacaattacattttttaaatgtttcctaatttggcattctgtcactcaggaactgagcagtcgtaaacacatgtacttccaaatatccaattttgctggcatgatttccatgttcattggctcctacagctcttacgtaattgtgccgcttggtgcttcgatgttgcacgaatatcggcacgtcacatttttcaacaattttatttcaaaaaacgaaatttttcagttttttgctgctcttccgtatcgtcgacttctgccaactcttttggtccgtgcaaaagttcgtcgccgacatcttcggcattctcgacatggtgccgagcatatcgcatga

SEQ ID NO: 75478 - DNA, 1741 bp, Heterodera glycines
atgagtaatgccaatctgtacggtctgaatgggcagctcgtgcagcaccatgcgacgacgggcggcacggaacgaatgtcagcgcatttggccacactaatggcaccaattccattggccgaatttgccacacatatcgaccgacagaagttgaacagcaaccagggctttatccaagtagcaagggaaaagcaaggccaataaagcggttttggatttaaggagtttgaaagcattgacacggggcaacatttcacttgggagaactcggccaccgaagtgaacaaacacaagaatcggtgcactattttatcagtgaatattaatcaccaaaaatgccgactttcaattagttatgccaacgttgtcgcctacgaccattcgcgcgttgtgttgccgccggaggacgacgcggaggaggaattgccgggcacggattacatcaatgccaattacattgacgggtacggcacaccctcacaatttaaaattaaatatgttaataaaacatatagttacgaccggccaaaagcgtacatcgccacccaaggcccactgccggaaacatttgcggacttttggcggatggtttgggaggagcggtcgatggtcattgttatgctcacgcggctggaggagcggtgccggaccaaatgcgaccaatattggccagggaaaggcacttccatttacggaagttacaaagtaaaattgggaagggggtaaaaaggcaaaattggccaattactgaacaaaaagttggaataaatctgactgacatggtcgcattactattagtggttgaacatgttcccgataattagcttactgattaacaaaaagcgttttctaaattggacattttccctggtttaaatgtgccattgcccgccaattacttttacaattgtttgccaaaaaggtgaccctcgtggacaccaccgagttggcccattactgcttgcgaaccatgaggctggagaacacgcgacggcaccacgacgccccgcgaaacattcagcactgtcaattcacggcttggccggaccacggagtgcccactcatccgacgccctttctgatgttcctcaagcgggtcaaagctctgaatcccatcgacgccggtcccatcatcacacattgcaggtgaatgccgaagggaacgggcgaagggaggggacgaaatgccaaaagccgtttttgacacgcatttaaaagttaaattaattttagtgccctaatggcaaatgatagattttgtttctgaatttctttggcatttcgagaattgccatattttcccttatttcttaaatgaatctacataatttgacgtcaaaatagtttcattgctaattttggcactttcagcgcgggcattggtcgtacgggtgcatttattgtcatcgactgtatgttggaacggttacggtacgaaaacacggtggacatttacggctgtgtgcgttccattcgggcacaacgctcgtacatggtgcagacggacgaccaatacattttcatccatgacgcggtgttggacgcggcacagtccggctctacggagataccaagctcaaaattgtatgttttcaccaaatatttctaaaaatttatttggcatggaaaactttccaggcaccaacacgtgcagacgctgtcccggccccagcacatgcaggaatactcaggcatcgacatcgaattcaatgtaagtgccgaaatgcaaaaaccaaattaa

SEQ ID NO: 75479 - DNA, 2391 bp, Heterodera glycines
atggtcggattgtttgggaacaatttaaatggcagaagcaacggaagcaattcgcagcagaaaagtgtgctgaccgcagtgattgaatcgctgctaaaaatggaaatggacaatgccaaagaaaagaatcaaaattgtaatgaaaacgcaaaaaaaagggggggggggggaatggtgggacatttggcgattttggcgatgattggccatcgccagcagcagagatttttactcaaactatttgtcctgttatttgagtgaacttccattttaataaacaaatttatattaattattaaattaattaatttttttggtccataattaattaatgagtcaatttcagctgcgattggaccgcccaggaatatccgagtgcagaccatttctaacagttccgttgtggtccaatgggacttcgacgactccgacagcgatgttggtggagcaccggacggattcatggtgaagtacatgcaggagccaagtgcagttcgggaacaccaaatggacaagtggcggactcagccggtgatggacccgaaggcgcggcatttggaagttcacaggtgggggataagctaattagctagctaattagtgatcgggaaatgaccgggatagttagttgatcaaatacaaacagcagcagacactccaactaacaaaaagatgaaacttatgttcaagggggtcgatagtcaaaatcggacccaccccatgtgaaatgggcaatttcaaggagaaaattttgtaatttaacgaattatctgatttaatcaccgataagttgatcattaatataaattggccagcaaattgctaataactaggaaatagatttaaatttgttgacagatatattacgtttttgatagttttaagtcaaattttgagttcacaaagtgatacaaaactgatgacaaattgtttaaaaaagttggcaacttcgcttactgacttgatcgaattctatgaaaggtcgactcccccctcccccgcaaatatgccaaaatgggagaccctttcgaagtgaggaggagggctcgatttaaagcataataatccattccttgctaataactatgatcaaaatttctatctccgtgatttaacaaaagtgtttggtttttatcattaccttttttcaaccaaattccttctttttcagattgctttcacataaatcatacgctttttgcgtgttggccatgaaacatcgagtatctttggccattttttctaattttattaattgtccctcccttttagcgtcttggcccctgctccgaccccccggtgaccattcagggcccactgacgccaacttttattgtccaaaatcttcgattggattataaaacgagtcaatccgtgaaaatccgctgggattacgacggaccaatgccaatcggcttcttcatcaaacagatgggccagaagagctatttggaccaggaattgatcgagaaatccatggtgtcgcctcaatacgaaaaaagggtcaatggcacggagagggaacttttgtcagtgaaaattcatttggtaattaatattctgctgatcatttcggttcagtctgtccaaccttcgtccccatatgaattacactttccaagtgggcgttttttcgcctggcgacggccgattgtattggccgcgcgaattgtccgtccaaacggaccctcgtggcccaccctttgtggagccacccgaatttctccaatcggacgggccaaacacggcacaattcaggctgagctgtgccaggtgccaaccccaagacaagattcatcaaaaagtaaatcctttagcgaggaatacggtccgatcagtcactattggctgatcgttgtgccaggcaacttttccaaggaggacgtaacacatgccgaccgcgcacaacttcaatttgcgacgcgcaatttcaaaaatattaaaatggccttcctccagcagattacggtacgaagtgccaaaagcgacagtgaaaaggcggaggaagaaaaagggaacagaaaatatggggaaaacaagcaaaacaatgaaacgatggtgcaaaatcatcacaaacgaagacgaaggtcagcacaacttggaacaatatcagcagacaatcagcataggcaccatcgaattcatcacaacacaaagtgatttcattatccattggaaagcgatttctttaaagcattattatcaaaaaagcattcattcagagtgccgtcatccgattatcggcccgccggtgacacgcgtggccgaaggcacgtgccggtggacggcgtttacatcgccgctcaaattccgtccaacgaaatgcaacggctttaccgcgatgaactgaccttcactctcggggacggacttgtaaattcgcgaaattag

SEQ ID NO: 75480 - DNA, 631 bp, Heterodera glycines
atgtattatatgcgaagtacttggcaatgtgacaaaatagcagatggatttaaagaatataagcggacagaatgccaaaaatatcgtaaatatttggacattttatatgaatatttgctcagagaatacgtaggaattccaacagttaagccaaaatttgtatttaaagaacgaattgaaattgaaggaccaataattcatgcggtgcattgtctcgtcaaaatttcgcaattttattttaaaccaaattatagtaaacatattgaatacaaattaaagaaacttttcatttattatttcgaacaaaaattgttgaatgagaagagcttaaattatgaaataaaattggaaaatgaaccaaaagtgtcaattaatgaaatgatttttcaattggcaattgaagcagcgaataattataaaacaaatgaaagtgctgaaggaataatccaacaaaaacttgaacaaaatttggaggaaaagtttaaaaaagcggaagaaagggcgaaaaaagactatccacgggaagccaatgaaataaaatgatgacaaacattggataattaattatcaattcaaaattcgatgataaaaagacatgggtgagaattaaattcaatgaaaattaaataaa

SEQ ID NO: 75481 - DNA, 72 bp, Heterodera glycines
atgtgccgagccagacaaaatccgattccgattaaatcgccgattccgattatggccaaaaatccgatacgg

SEQ ID NO: 75482 - DNA, 685 bp, Heterodera glycines
atggtggctttcaccattattcctcatctgctgctcttcactgtcttcatgtccatcatcctggtgatcctctctcaatgttgcggctgtacgccttcaaagaagaagcaaactgcgacgtcaacgaagaagaagaccacgacgactacatccgaagcgatgaaaggaaagaaggaagagaagccggccaaaacatccgagacggacaaggcagcgcagaagaagccaactgtgacgtcaacaaaggcatcggaggaagaggcagaagaagaccacgacgactacatccgatccgacgaaaggaaagaaggaagagaagccggccaaaacatccgagacggacaaggcagcgcagaagaagaccacgacgactacatccgatccgacgaaaggaaagaaggaagagaagccggccaaaacatccgagacggacaaggcagcgcagaagaagccaactgtgacgtcaacaaaggcgtcggaggaagaggcgcagaagaagaccacgacgactacatccgatccgacgaaaggaaagaaggaagagaagccggccaaaacatccgagacggacaaggcagcgcagaagaagaccacgacgactacatccgatccgacgaaaggaaagaaggaagagaagccggccaaaacatccgagacggacaaggcagcgcagaagaagccaact

SEQ ID NO: 75483 - DNA, 64 bp, Heterodera glycines; identical to SEQ ID NO: 51065

SEQ ID NO: 75484 - DNA, 993 bp, Heterodera glycines
atggatatcaatcttgaaaatgccccaattccggcaacctcgcacattgtgtctgaaaaaattgacttcagcactgtgccaattaatttcgccacatcgcgaaattttgcctgtaaaatttggagatgggcagcaattggcctttatgagcgtgatggcgaaacagcacttggcccacgctctggcccaagattcattgagacctgttggaacagaccaaatgaatggctaaatgacagctttattgttgcctatttagcttacattgcaagcatttcacaacgaaaaacagtagttgtggattctttggcatcgagaactgatgtttctcgattttccaacgtgaagaattacactttcggctatgatccgaatgctgttcctgaagttgtgcttatgccgcttcacttcccaaatcattggactctcatcgtctacgatgttgcacatggtgcatacttccttgactcgctgcatatgagcagcttgagtgatgagagaatggcactcatccagtcaataattgctgagatagtgcccgggaatgcgtcattcgctgttgaatacgtgcagcaattgacaaagcaaaatgatggtaacagctgcgggtacttcgtgtgcctgtatgctgaatcctggctgatgaacaaccgtacatttgttctgccggatttgaacatcaattatgagaagaagcgcattttatggcacataaatgagctttatggctcagatattgtgccgtttcatccaagggaaggtgtttcaacatctttcgctgttgtgtctcatcacaatggggatgtagcgcaaacttcctccaaggtcataatgccaatggaagtggatgattcaccagtgcttccttcctcggaagatactgctgttcttgcgcaagcaccagtgatcggcgaaaatcaagctgacacacccacggtgttgttgcggacacaattgtccagcaagaaccaatcgcgcaggctgatgatgtaa

SEQ ID NO: 75485 - DNA, 1218 bp, Heterodera glycines
atgaagcacacaacccgcatgctgctagtgccggaggaactgtaccgctccttgttggccaggagctcggctcctgttgccgacgcatcctctgcgaggggcggcttaccgcagcacaccacgccaattgagcacacggcaaagcgcatggcgcgtgctgcacgcagcaacgtcacccggagcacggacggcgtatcgccgtcatcggggcaacaacctaaacaccttctgaacgatgacgaacggttgatccattaccaacaggagttcaaacggttcaaaaaatttctggaggatgagcaggagcgtccagcaccagttcgtctcacccaactgcccaccgacgaagcctctaagggcctgctgcgcgaggcactttccgaggtggcgcgaacaattcaacaacaacctcaaccaaaacagccggcgctgcaccaacaacaacagcagtcgtcgcagtctgattcgtcaacaatgaggcagcctccacgtcgcagacaacgaccagccaaaaggacacaccgtacgacatcagcctctacggatggcgccgaagctagccgcttcccgtcatcgtcatctgccgtctcattgttgacacgcactgataatggaggaaaaggaggagctgagacgactgagcgtgaagacagctccaacgacgaccgaccccaaaatgttgcggcagttgaccccgcaaggaaaggacagcgggaagaagcggacgtgcaactgcatccatcaacatcgacagcaccagcagcagcagcagtcttacgtgacactgagcagaggaaacgacaagccattgactatgcgttacgcaacgcgggcacgctgggcatcggagatggacagcaggtgtaccggctgatgcaaggcgcgtaccgtccgatcaagaacagcgatttggatgctttactcacttttcattttgctgagcccaaaccggagaaggcaccgcctgggtacaaaacatttattggcaatgctcggcaagacccgcgcatggtacggatcctgttcggcaacagcggcgcggaaagtgggaaaaagaagaagatgggtggtggcggctgctgctccaccgctgctaccctcttgcatgcatttaaaaagaatggaaagccaactgctgctgttgctgctgattacgcgaaacggtccaacagcactaccaacaacaaaacttttttgtttaaacccatgttatggtga

SEQ ID NO: 75486 - DNA, 1886 bp, Heterodera glycines
atgacgaagctgagcagcgatagtaatgatgaacatggcggtggcggtggtggtgatgatggacacgcgttgccgaccgaggatgacggggtgggcggtgctcatctcccgcccctcttgttcatcgatgaggaggaggaggaggagagcgccgagtcgcgcactggggatgacgtgggccgagacggtgacggtcaaatttacactgaaaaagtgacccaggaaggggaggaggaatcagacgacggcaacgctgacatggattctgtcagcaatgacacgtacagaagcagcagcaacagcagtagcagcaccatgagttcgtcgttgttcttgctgcatgactgtcatatgcgccaccactaccaccacgacaacaacaactgcaacagcccgccacgaaaacaagcggcgacagagctgctcaagcttccgctcatcgactatttgtgtgggcttaacaacgggtgcagtgtgagggagcttcacacgctgctccagaccaagggcccacgtgcacacatgttggcccatctgcaacagcgctgtctgctgcgcaccgtccatttgcggcccgccgagcgcaacattgcgctacatgcgcatgccctaagtgccctaagtacaaacctgacctttgcatgcggtggttatctcaacctcacagtaataattttgtttaaagaagcgccgcccgcattctgtttgttttttttgcctaggtgcgtcagtacttctatgccaaacacggtgtccgtttgcgccacccaaacctgccggcgctggttgagcgcggtggtggtgcacacatgtcctattatccgctagagtgtgtgcaggtgcacgtcatggtggcatcgcccacggaccccaacgagacggaggacaataaagaggagagcgcgggctgcgcagatgatgagtgaaaatagacaagcatccatttttctcattttttattgcgtcaatcacactgagataaaactataattcgtattgattttaagcaagcctgtttcaaaatgacatatttggtgcaaaatagtaccagcacattttctcttttcaaatcatgtggcgctcaagcggcctcatctccacggcagcaacaacaactacgctttacccgcgaccaattcttggcattggcacgcaacggtgcgtgcaccgaatatgcccctcgccgttttcacgccattgtgatgcgtctgcgcaccggttcaaccagcaccatcagcaccggcgccgtcaccatcaccaccacaaccaccgccaccacaactcccactggcaccacaactgcgcttattttccaaagcgggcgtgtggtgctaactggcattggtggtggtggtggtgtagcagtgcagcaaattcacgcactctgtcgacacgaagcgcaccgagtgtgccgccgtgtcgccgatgcactccggcgaggtggctttccgacgctcggccgctcgcttcgcgtcaatggggtgcagttgcgcaacctggtctccacacttcatatgccctaccgcttgaacattgaggtgatggcgcagcatcttttgcggcggatgaccatccatgggaagcagcgacccaatgacaaagacaacaacaacagcaaccacaataacttggccgggcagattgtgcgggtggcacgcgcgtgccttgatctgtgcacattcccaggccttcgctgcgccttgcggattggtggccaacaaaagggcgggacggaggaggggagcatgggggaggcggagtttgtggtgacagcccttttcttcatctccggcaccgtgattgtgacgggagtgcgcgaccctctgctgctgaaacgcgccgttgacactattcaacatttatgtgctcaatacattcgagcctag

SEQ ID NO: 75487 - DNA, 612 bp, Heterodera glycines
atggctataattttgcatgaaagtacgttagcacaaagtctgaagcctggaacaggacgggattttgtgggatcaatcccttgggatatcatcccgcaaaattaagttttaatcccggagagggatcagaaaatttgaaattttcggactctaataaggactaccagcctacaaatatttataaatttgaagtacaaaactcaaaacctaccccaaaattagtgaaattttttgttaatttaccaaaaatgtgtcaaaatcaaattttcacacttttttcgctttgacagatcgctgcacgggtgcagccaccttttgttggcactgaactcctttttcgagttcctgcaccagagcggccattacattttcctgttcaccatattcagcgggcgcaatttcatcccctattttaccagtgctgtctttcagcttcaatcaatcttcggctacaatgccgcaattttcacgatgattggcacggcggtggaccgactgttgtccgtgctggtgcctgatttgtaagcgatatgttggcaaaattaaaactttaaaatctctctttatcagagagaatttctctcaaattttgtgtaagctattaataataaa

SEQ ID NO: 75488 - DNA, 1036 bp, Heterodera glycines
atgtgtgaacggtaagcgctttttttagattatgtgccacaacaaaaagccttagttgataaaaactatacatataaattaccaaaaataattgaaatcaatttttctgaaaaaaaaaaaaatcgggtttctcagagaaataaatatttttaaaaattttttccgaaaaaattaataaaaaatttcgatcaaaaataaaattccttttaatttgctatttgatcggacggggcttatatgtgatttctttcatcagcgatatccagcaatctagaatgttttgttctggaacttaaaaataccgtaccaaaactagtatggtaaagcaggattttctattcgggaaacctgtcccggtactggtccctataattttggcaccacatttttgtcaaaaattgatcaattttgccatcaaagtgattcagcttctaatcactgcacaatctgttaacattcagactgcgatttgagcgctcctgcggcatccaatgtgccaatttggagccgtttggactgccgttgcaccgcgaattgttgtggagcgactttcgcgggcggttgagcgccgcacaacggacgaaaagccatccgtttggcattgcggcgcaaattgcgatgctaatgattacattgataatcatcccggcccaattaattgaccgaaggcatttctgctttaggtggtggtgttgagcattaattattttaattgcctagcattttactttatttttttattccggtaaaatggatttttggtttgcaaatttttattatgatttgctagagctcagacttgaaaaatttcaaaaaaagtttttaaaaatgtgtgagactttttcatgtatgaatttcttgatactgtattgtatgatacagtagtacctttcttgtgtatattgtaaatatttccattaacatattttatataaagatctatgtatagagaaataattcttcttttttattatactagcccgaaagcgcgctttcggcgcgcacttgggctagttataaaaatgaaattctctca

SEQ ID NO: 75489 - DNA, 518 bp, Heterodera glycines
atgtttctctctctttgcctcctttcctctctctctctctctctcgttttttctctttttatcgctcctctgtatttttattctcaccttccttttttttcccatttttccaaaccaaaattggcataacggctataagcgcaaattcaaatggcgtaaacatcgcggacatacagacacacagaaattgtcaaaattatatatagataaattgtgaaatgaattaatcatattttatagagctcgacctggacctggatccaggcctggatttttcctggatccagttccaggtccaggccatttttcggtaacttggatttttcctatacctggatttttttgtgctttccgttacccgactatcaccgcccactccccgagaattgcttttccagcggtctgggagcaccccgaactaaaaagcacgaaagaattcaaaatcatcagtgtttacactttaaaagcatagaaacatttagcaacaatagttccgattaagatttataggacattta

SEQ ID NO: 75490 - DNA, 1154 bp, Heterodera glycines
atgtgcgattcgtttaaggaaatcgatgcgcgtgaggagcagaccacgtacggattcggggacaccatttaccgcccattaatcccgcggcttggaaatcatcgcgtgttgacttcctttgtcggtgaaatatccggtgctggccagtattttcgttacgacgacgacagcggccgtttctgtgtggtgtcaatcaacacgcatgaagctaacgtaattataaatcaaatgtgattaatcgatgacttttttcaacaaaaaactgaattttaattatatatttcattcagccccttggtagttacaaaaatggaaaatgagtacacataccaacaaaataaaatgtcctctctacagaatttcgaaatgcttttcgtagtcaaattcatgttagcgttccccgaaatctccatcccctctgctgaagtggtgtaaattggcaaatgggcaccatcgtagtcaatacttaagaatcatttttcttattcgatattcagagagagatggtccgcactttctttcacgacaacgaggctgggttcaccaaaaaatattatttctgcgaactccaattttttgctatcaatgaattggtaaatgggatttcggcgtttttcgcaaagcatcatttgtccattttgaccaattccgtacaccggatccgaactcgaacaaaaagtcgaaattcaaatttttctaatttcagaaattgaaaaatttaaattttcgactttttgttcgatttcggacccggtcttcggaattttaatcttcaggatttagaatcacagaatgaaacaaaataattgtgttgaattaaattgaaatattcctttttcagccttgggacattgccgtgttgaagttctacgcagaaaccatgggaaatatttgggaccccctttttacgtacttggacgaagtcatcacttcggtgagcctatcatttacagcaaataattggcattattttataatggacaaataagcaaagtgtacaattctttattttccaaaataatcaatcagtcctatttaacatttagctcgagaatggtgacatgccggcgtacattatcgaatcgtcgccaagtaattcggccaattctctcgaggacctcccgtcggttgaggcaccgcaatcggatgattag

SEQ ID NO: 75491 - DNA, 366 bp, Heterodera glycines
tatttccctaattacctaattaaaagccggctttcagcccttaggctggcaaaattcaattaggcataatctgtcgctgaacgactgcttccgaaagctgcccagagagccgggaaatccgggcaaaggttttctcaaaaaaaatggcaattaaattttaaatgtctaagtcaaggcaattattggtatttggacccgaatgccgaaagcatgttcgacaatggcagttttttacgacgccggaaaaggcaagaaacaaaatgaaaatttccaaaaatttccaaaaatattttcacaggtttaagcggaagcccacgccaccgcctcagctgatgccggccggcgttttccctccgccgccggcac

SEQ ID NO: 75492 - DNA, 647 bp, Heterodera glycines
atgtctggtgttcaagacgaacacgatttgtcaacgccatcgccgccggtaagacaacactcaaattgtgcgttatgtcgagagtgtttagggtcacgaaacagtcaacgaattgccgccaccaccaccacctccgctatctcttcatcaattgatggcgccgcaggacaatgatacacctcatccttctccgacgtcgcatcttggtatgacagcgatgccaatggctccggtggtcgttggcgacgcgcaggctccgtcaaatgaaaacgaaatttcgcaaatggatgtcactcagtgtttgggcgccagtccctctactttcgttcggccttctgtttctggtgtgcaaccgcaggtgcaaccaaccggggtaattaagagattatgcttaattaaaaacctcaatacaaacttttgtttagtggtctaaatttttagtatgacgcattttagtaccaaggagcctgaaatttcagaaacttgcactttaaaatttcattctttcttgtcgacctccgtacataaatccaattttaaactatttattcattatttaagtttatatttgaaataatgaatcaaagatagtgctgataaagttattcgcatggttttaatggtcaatattgtgaaaaatttgaaaa

SEQ ID NO: 75493 - DNA, 144 bp, Heterodera glycines
gaaaagccaatttcaattaccgtattttctctaattaaggccccggggggattatttttcaacctcttcagaaagggggacataattggagacagggcctttaatggagacggggggattatttttcgacagatttttaatgac

SEQ ID NO: 75494 - DNA, 290 bp, Heterodera glycines
atgattgagtcccagtggaactcggacactttagtacagagactgaaatctgttcagaattgtcgccgtgctcttcaagtggctccgttcgaattcacccattgacgaaaggaatcgaatcgtttaattattaaaactaatcaaattttaatgtatttatagacaatatactcgggagaaagcatgctttatattatgaatctttgattgccggctttaattctttattcttgataaaattacgataatttttttcggaaaaaactttatatacttgttcgtttaataaa

SEQ ID NO: 75495 - DNA, 383 bp, Heterodera glycines
atggccaatttggacaacttcgacaatgatgcggtaattaattggtaaaatattatttaattttacaatatattttcagttttattggccttcaaagatgccaatcccagctggtctctgattggatgcgcactgatttatggaatcattacaacatttggaatcatcttcaatttttctgtgatttttatcacagtcaaaacaaagtatgaaatgatgaattattatttgatcgaaattataattttatattttttagatcactcaatggcaccgccaattatcttttggcactttgctccttttttgaactggttcatcaacttggtcattttctgtttgtgtacaccgcattttctggacaaaattttaatataaataaa

SEQ ID NO: 75496 - DNA, 1075 bp, Heterodera glycines
  unsure (1)..(1075): unsure at all n locations
atggtaagaaaaaattgcgcattttaccatggaatttctcatcaaaattttgttttaacgaattttcatatgaaaccaattaatttgtgggaaaaatcgaaaaattatgactgtaaactgtgcgaagcatttgtattgcgtgacctttttgtgtaaattattattttttaatgaattcattagaatattaaattttaaaattttttaaatagtataagaaaagatatggttattaattccaaaaatcttaagtgaaagttttgtgcataacttttttaaaattcaatgaaattttccgaaattttaaatgtaattagagaattcttcggctttagaatatataaatgaattttggctcaattattttaaatgtttataattatatacagggtgtttcaaaagtgattgaacacacatatttattcatcttttagggatgtgcgagagtctcggttctcgattcccgactcgggaaatttcccgggtttttcgcttcccggtctcgggtttttagtctcggaaaccgagaaatttttacactgttaaggatgaccattgtggggagtgagtcgccggcaaagtgggaaaagaggaaaattatatgaaattttaacatattttcttaacaaaattcataaaaaatctccaaacatttccacaaaattcccttaagatttcaaaatctgacctaaaaattgcctattttaatgaaatcttaagcaaaataggaaaatttccaatttttctcccgcgggcctatcgcggnaaagggggtgaactccgtctcagcaaagttcaaaaatctatcttttttctttgttgataaaactcaacaaaatattataattcgaaagctntaaatgattcgaagattcgacattttctgtaattattcttaggctaatagagccttttaaaggctttcgaatgatacaagattgttggatttggtcaacaactntaaaaagttatattgactcaattttgttcggatgtagttggtccgttccggtctatcagtaccgctggaccccaaaaacttatacattttttgtgtaaaatctactaaatctca

SEQ ID NO: 75497 - DNA, 1045 bp, Heterodera glycines
atgtttttcactggcattgatcgactgattggaattgctttttcggaattgtataaaaattaataattcctatcgttaattacagtaattttcagtcacgataatcttcaaaagcgactgtatttggcattgttaacaattctttctggtggtctatggtttttgcttctctggttccggtgtaccaaaatgcaactaggggatggtgatcagatgaccaccggatcatattttgattttttaaaggttcttgtgtgatcctgatccgataataattaaatatttctctgctttttagagcgcacctatttttgacaaattaagttttttgattacttcaattacttgcattatttatctgcttcttggaattgccgtacgtataaaagcttcaggtaaatcagtctttcattaagcatttctccggaaaatggtcataaaagcagaccaggattttttgtgccattggcaaaaaaatttcggcatcttttttcttaaaatttgataagttttctaatttttgcaatttttgagttaattctctttttaaaacaatgattcacttgtgcaacattgctattaattacctaattaattgatttttataggttttccgtccgccgattcgttcaatcgtcgcacttttcgcgcaattttttgcattatcactgttaatattagcggctatttctttgcattaatttgttacattcttttaattcccaaaatttcgtctccgatcactgcgtggtttttacatgcaatcacttcaattcctttgaacattggcgcagcgtcaaacggacccattttgtattttaccaggtttttttaattgaaaaattattaaaaaataattaatttaatttttcattttttagtacggagtatcggcaggcattccaaacggtgtttccatatgtgttcaaacgaatttcaaatccaaatcaagttattccattgcaaaatgtgcctccattaggcgctacacaatggtgaatgatgtcattcataagatactcttccgtatcagcccattattaaa

SEQ ID NO: 75498 - DNA, 3562 bp, Heterodera glycines
atggcgctgactaacggagtcgcggagggagaagtggaattggaggtgcagaagatggacgacggcacaggcgaaggggcggaggaagaggaggccacgctggtgaagaagggcatcaaactggacgagggtgaagccgaggcagagggaggcggagaaggtggagggagaggaggagagagggggggggggggggtgatcaaatggcagcttgtacaaaagccaacgcgtacaaaaaaacaactcgtacaaaaggcaacttatattttacaataaagcctaaccttaagcctaagcctaggcccaagcaagcctaagcctagcctaaagcttaagcctaagccgaagcctaaaaccaaggcctaatctaagcaaatgtacgagttgcctttgtacaacagtgggggagggggcttctttagagaaaccaaacaaaaatcagaaatgtacctaaaatcgaaaaaggccattttcgtgcccctcatcagctactcatccccatgtcaaagctctgctgggataatttttgggaggggaaaagggaagggaccagggctggccgtgatctcgtatcacgggtcacggatttttttttaaagccccgtgatcacggctcacggatttccgtgattggaaattcaatcacggccagcccttcaagggacacaaaagcgatcagaggaaagatcagtgacagaagggaagaagagggcgctgaattacaatgattgattcattcagaagcagcagcgaatgaaagtgtcgaaaaggaagcggcggcagaggacaaaactgaagatttggtaagggaaaattttttagataaattcaagtattttttgaactcctcccatttcactcgaatttatttctctccgattatctctctgtttctttctctctgtccctttctcgttttctctattcccttctctctccctccccccctttctctcaaaattaatagcaacttctcggcttttcctcttttgctttatccccgggtgggataccctttgctctgttcagattcttagtaaagtgtgtgtgagagagagagagcgagagagagagagggaaggcaacctgaagagggagaggatgagagagaaagtgagagagagaacaagagtgatcggatggttctctctgacaaagaagcagagagaaactgatcacacaaagagagatagtgggacatagtgagagaagagcgacacaaaagggtttttcctctcgacgattcgctctcgagggattcgatcagcgaaaagctttgtttattttgtcctgatcttgacaagtgttctcttttctgagctgcgcattatttttggcaattgtttcccgtttcttttttgtgtcaaaattgattttttcctttttttcaatttgcttccaatttgttctctgttgctgatcacaggtgcccgacataacaaacgaagacccaatgaccacatcgatggaaggcatcgacgacattgaggtccttttttgaaggggggggggagtctcatttaggcacaattaaagaaaaaagtgccgtgactttctgccattcaattaaaatttaattgacatcatttgtaatttgtgctataatttgaatagaaccaaaaatgattcatgctgcgtaaaaaattatggcatgcggcgaaggaggacaatttaataaatatttcaaaatgaattatagaaatagccatcatttttaatttgaattcgaattccctcggcacaattttgtgccgttctgtgctgttctgtctattgattgcgcatgttttacccctttcagcagcaacagaaggaaggcgaagaaaatgaggcgcctgaaaaggaagaagacagcgcagcggccgaaatcccggtcgatgtgtacgacgaagaggcggccgaggcaccgcccgcggaggaggcggaaaaggcggaagaagcggagacggaacaaccagaagcggaagcagcggaagcgcaagacgaggagggggccgttgaagtgcccgtggagaacgtcggaggcggagaagcggctgaagaagaagcgccgcccgcggaggaggcggccgaagcggagccaccggcggtggatgaggaggcgcttccggcggagtcggaaacggaggcgcccgaggaaacgcccgctgagacggaaggcgacgagccgaaaacggaggacgaacagcaaaagtttgaactgcaggtggacgcacttttagtcattttgtccaaaataggcttaataaagtaaaaaagttcacaattacttggcgctttagccgaagaatgccaaattatcccacagagtcaatttgtgccaatataatccgtgctgtcttttcggcattaattttaaatttttaatcgacctttaggcaccgcccaggggacggccgcgcacgccgaacgaattggacgaagtacagcaagtggaggtggaggtagaacaggcggaagaagtgccggaagacgtggcgagtgttacgggcagcagaaaggcgccgagtgtcggtgagagggacaaatggccgacactttttgaccatttgtcatccatttgatcattttttcatcgcaatcattcagtttcacctgtggcagtttcgccggtgccaacgacgccgaaaagtgccgcgtcgactaagaaaacgtgagccattgctaacatttaccgattttttcaatcgagcaattttttgggatttggacaaattgatgcccaaatgaacaaaatttctgctattgtcctgtctttatcattgtgttcagcactttcgaagacgaagtgttgtcagtcaaaagcggcagaagtggaagaagtatcagaacaaaatcgccgagaagccctcggacgccacggacgccaaagtcaccgaaatcgccaaagtaagcgcaaaagtttaagctgatcagtgatcggaaacgaagtggaaaaagagatgaattatttaagaaaagcagtcgaagtggaagatgagggagaagcagcgaaagaagaggaggagaaacagcggcaggagagcttcgatgcacggatgcgtgaaagggaggaggaagagtcgaggtgatcggtgaagggaggggaggaggaaatggcgtgggaaaacgaacggacaattgatcattgatcagtgggaattagtgaaaatggcatgccaatgggaaacaaagtgatcgggaagaatgatcgggttaaaccaatcggaggggagggaaatgccaacaaattattcagggaggtaagaggaaatgccagtgaaatgaacggcaatttgttaattgaaaaacctgaatttgatttggttgattgatcgcttttctcggaatgataatcgatcactgctgcctttcccgctgacggatcacttattgacagatggaagcgcatgaccagctgggacaagggcgaggatgggacggacgcggaacggaaagtgtcagcggtggcggccgaaactgtggacgaagtgccggaggagaaatcggaggccgagccggccgagaaggcggaggaagaggagaagccggccggggaggaggagcccaaatcggaggttga

SEQ ID NO: 75499 - DNA, 3648 bp, Heterodera glycines
ttctcccgccgcttccgccccttccggttgctcttccgttcgttcctccggcaccgctcccgcgtccgctgcgacaggtgcttcctcaacctccgatttgggctcctcctccccggccggcttctcctcttcctccgccttctcggccggctcggcctccgatttctcctccggcacttcgtccacagtttcggccgccaccgctgacactttccgttccgcgtccgtcccatcctcgcccttgtcccagctggtcatgcgcttccatctgtcaataagtgatccgtcagcgggaaaggcagcagtgatcgattatcattccgagaaaagcgatcaatcaaccaaatcaaattcaggtttttcaattaacaaattgccgttcatttcactggcatttcctcttacctccctgaataatttgttggcatttccctcccctccgattggtttaacccgatcattcttcccgatcactttgtttcccattggcatgccattttcactaattcccactgatcaatgatcaattgtccgttcgttttcccacgccatttcctcctcccctcccttcaccgatcacctcgactcttcctcctccctttcacgcatccgtgcatcgaagctctcctgccgctgtttctcctcctcttctttcgctgcttctccctcatcttccacttcgactgcttttcttaaataattcatctctttttccacttcgtttccgatcactgatcagcttaaacttttgcgcttactttggcgatttcggtgactttggcgtccgtggcgtccgagggcttctcggcgattttgttctgatacttcttccacttctgccgcttttgactgacaacacttcgtcttcgaaagtgctgaacacaatgataaagacaggacaatagcagaaattttgttcatttgggcatcaatttgtccaaatcccaaaaaattgctcgattgaaaaaatcggtaaatgttagcaatggctcacgttttcttagtcgacgcggcacttttcggcgtcgttggcaccggcgaaactgccacaggtgaaactgaatgattgcgatgaaaaaatgatcaaatggatgacaaatggtcaaaaagtgtcggccatttgtccctctcaccgacactcggcgcctttctgctgcccgtaacactcgccacgtcttccggcacttcttccgcctgttctacctccacctccacttgctgtacttcgtccaattcgttcggcgtgcgcggccgtcccctgggcggtgcctaaaggtcgattaaaaatttaaaattaatgccgaaaagacagcacggattatattggcacaaattgactctgtgggataatttggcattcttcggctaaagcgccaagtaattgtgaacttttttactttattaagcctattttggacaaaatgactaaaagtgcgtccacctgcagttcaaacttttgctgttcgtcctccgttttcggctcgtcgccttccgtctcagcgggcgtttcctcgggcgcctccgtttccgactccgccggaagcgcctcctcatccaccgccggtggctccgcttcggccgcctcctccgcgggcggcgcttcttcttcagccgcttctccgcctccgacgttctccacgggcacttcaacggccccctcctcgtcttgcgcttccgctgcttccgcttctggttgttccgtctccgcttcttccgccttttccgcctcctccgcgggcggtgcctcggccgcctcttcgtcgtacacatcgaccgggatttcggccgctgcgctgtcttcttccttttcaggcgcctcattttcttcgccttccttctgttgctgctgaaaggggtaaaacatgcgcaatcaatagacagaacagcacagaacggcacaaaattgtgccgagggaattcgaattcaaattaaaaatgatggctatttctataattcattttgaaatatttattaaattgtcctccttcgccgcatgccataattttttacgcagcatgaatcatttttggttctattcaaattatagcacaaattacaaatgatgtcaattaaattttaattgaatggcagaaagtcacggcacttttttctttaattgtgcctaaatgagactccccccccccttcaaaaaaggacctcaatgtcgtcgatgccttccatcgatgtggtcattgggtcttcgtttgttatgtcgggcacctgtgatcagcaacagagaacaaattggaagcaaattgaaaaaaaggaaaaaatcaattttgacacaaaaaagaaacgggaaacaattgccaaaaataatgcgcagctcagaaaagagaacacttgtcaagatcaggacaaaataaacaaagcttttcgctgatcgaatccctcgagagcgaatcgtcgagaggaaaaacccttttgtgtcgctcttctctcactatgtcccactatctctctttgtgtgatcagtttctctctgcttctttgtcagagagaaccatccgatcactcttgttctctctctcactttctctctcatcctctccctcttcaggttgccttccctctctctctctcgctctctctctctcacacacactttactaagaatctgaacagagcaaagggtatcccacccggggataaagcaaaagaggaaaagccgagaagttgctattaattttgagagaaagggggggagggagagagaagggaatagagaaaacgagaaagggacagagagaaagaaacagagagataatcggagagaaataaattcgagtgaaatgggaggagttcaaaaaatacttgaatttatctaaaaaattttcccttaccaaatcttcagttttgtcctctgccgccgcttccttttcgacactttcattcgctgctgcttctgaatgaatcaatcattgtaattcagcgccctcttcttcccttctgtcactgatctttcctctgatcgcttttgtgtcccttgaagggctggccgtgattgaatttccaatcacggaaatccgtgagccgtgatcacggggctttaaaaaaaaatccgtgacccgtgatacgagatcacggccagccctggtcccttcccttttcccctcccaaaaattatcccagcagagctttgacatggggatgagtagctgatgaggggcacgaaaatggcctttttcgattttaggtacatttctgatttttgtttggtttctctaaagaagccccctcccccactgttgtacaaaggcaactcgtacatttgcttagattaggccttggttttaggcttcggcttaggcttaagctttaggctaggcttaggcttgcttgggcctaggcttaggcttaaggttaggctttattgtaaaatataagttgccttttgtacgagttgtttttttgtacgcgttggcttttgtacaagctgccatttgatcaccccccccccccccctctctcctcctctccctccaccttctccgcctccctctgcctcggcttcaccctcgtccagtttgatgcccttcttcaccagcgtggcctcctcttcctccgccccttcgcctgtgccgtcgtccatcttctgcacctccaattccacttctccctccgcgactccgttagtcagcgccatt

SEQ ID NO: 75500 - DNA, 814 bp, Heterodera glycines
atgatcaaatcattcccattgagtgtccttttcctcgtgtttggcttcaatcggctgctgctggtcaccagtggaccatgtctaagctgtgttcgtagtatgttttttttttctttaaataactatataataagaaataagcaaaatgctttaaacctcgggtgggaatcgaacccactcgtgcaccctttccatgggaagctattccattgagctaccgaggcacatccgccctttcttttatggattttaagctttccgcgttttaatcgcccagcccgcttcttccttacactattattaaatttatatttatttttattttggttagccattcccacaattatttgtcgttttgttttaattgggcaaaattaaagtgaatgaagattggcacgactattgcaatgcaatggcaaagtgttgcgactcgttgcgaattaaaccgtgtgggttggatgacagcgatgtgacggatgacagcgacagcgagctgtcgccaacctcgtgccttcccatttacgtgttcaatgcgccacccggtaattaattgggcaattaacacataattattatttgtctacaattattaactaaaattataagcactaattaatttattaaattcagtggaccaatattggagtggcatatgtgaaaatcaaccgactgacaaatgcgattcttatgaagtcaatctatgctttttggacgcaaaaaagcggtgtttaccgcgcatgccatggccataaaaagaacgaacgaatgttttgtataaaaatttcggctattaatattttggcaaattattaaa

SEQ ID NO: 75501 - DNA, 1449 bp, Heterodera glycines
atgccaatcgctgaagcgtgagcacaattaaaatagaaaaataggcacaaaaataggcaaataaaattttttgttaaggattttttgggagcaaaaaacccataaaaacttattcaatattttggttagtattaaatattttaaagttttttttcgaacaaggaccaaaaatttttatgaaaaaaaaaataattttagggaaaatttttcatttataggggagtattttctgaatttttttcggatcatttcataagggtttattttttgttttattgcatttttgtcgaggatttttccgcaatttttaaataggaacaaaaataggcaataaaagtcatcttagacaacacaaactaagctgaaaacgcgtttcgtgcttatctgagcgtattaaatgcgcagaaattttaggcatttgccttaaaatagaagcccaggtaattaattaagacggactgtgacggggctgcaaaccttcgttctgttaaatgatgtggcatttttaatttctgagtatttgtcttgattttgtatattttaaagagtcaaaaagattttttaccaatgaattttgtggtttttgagaattttcatttggtttttttaccaaaatttcaaaatataaatttttggggtaaactctgttgtaaatttccttcttttttgatgattcttataaaaattatatttttagtttacccaatttttaaatttaacttaattttatattgcagtggtgaaacgcgtctttgttcacagacgacgaaattgggcgaatttttggtggaaaaagggaccggagtggccgttgatgtgtacagttttcatcgaaacaaggagttatggggcgaagatgcagacgaattccggccggaaaggtgcaaattttgctattaaaaatataaattaattaattaataattttaattattaaaaaataagagacttaaaagttgaacgggatttaaataaacataaaataataagtcatttatttattctccatatttcttttcttgatattcgcttgtatttaaattatgccaaattaggcataaatacacacgtattagccaaatagggatcagtaacaaatataatatttttattatatagactcagagccaaacttcaaattcatagtctgtaaaatttccatgctaattgtaagaagattcatatactttactacatttatggcataaaaaattgttttaaatttaattatattttaattttttggaagcatactaaaactaacttagcttaaatttaatcaaatcaaaaaaaaccttggcattgagcgatagaacgcctttaaatttttgtatgaccataaaaatatgatacatttttaatttcttcataatatgtttcagaaacagccaacttcaacttttacattatatgattagacagacgaaagatgatttttctattctttaa

SEQ ID NO: 75502 - DNA, 859 bp, Heterodera glycines
atgcgatttgcacttttggaggagaaaatggcacttgtgcgactgttgcggcgttattcgctggtcaaaactgagcagacggaggtggtgaaggggggggggggggggaaattgtcaaatttaataattatggcattttatttttaaaatatttcccattttttagaaattgctcaatttcaattcgcaagtcgtactgaatcatggcgctgttatggtcaaattgagtcaaagagaagagaatttctaggagaaacagaaagaatttgaaaactttttaactgaattttggtttaatttaatacaaaaaaaaaattaattttttaatcaattaattaattaatggtgatgctctgatcatttctttatatgctaatcattacattcagctcaaaaactttaattagtttttggcaattatatagttgaatcaaaattaaggcacacatgatttcaaaaaaacacaacaagaaacattgatttttaaattttaaattttttatctgagttttaagaaatttttgaaagaaggatcggtcccgggttcatttttctcggtctcaaatagcgaaaaaaagtactgaaaagataggcgaaagttaaaaaaatcatattttaaattttttataaaataacattttgatcggatttttaggcacttaatttttttaataggtacctaaaacaggcataaaaaagtgtttcttccaacaattacgaaaaatttcatccaggtttaattgccttttcaccgatcgaaattttaatttcggaatttgctttgtatttttcggcattttctttggtgaatttcaaattttttttttcaaaaatttttaagctttttaggctctaaaaa

SEQ ID NO: 75503 - DNA, 897 bp, Heterodera glycines
atgttcaaaattctttccttctttcttctttttattgccccatttattgccgcttatgcaccaaattgcatagtgagtagccataaatgttcatttaattactttactaaatttgctatttcaaaatgttttttttccaataattttaagtgccccgaaaatgagcagccgggccaattgagttgcaaccgatgtgagccgagttgctacaacccgagaccgaggatttgcactttaatgttctgcacatgctcatgcgattgtgtggcgggattattacgcgacgaaaagacgaaaaattgcgtgtccaaagagaaatgcactcattaaaatgatatggtaattaagagctgataaggaggaatttggtgaaaaagattggttttaaaaaacccatgacaatgataaaacggcaaatttacaatgtgttgatcaattgcttacttttcttaaaattaaaaaatgtaaaaaagttgaatttattaaaaatgagcaaaatgttaggacatcgaacccacgcctcagcacaatcagttggaaaataattcaagtattaaatttgctcttgtctattatttttctcactgtttcattatttttacttttaaataataatttctaaattatccaaaatttttcggaaaaagtaaattacttaaagtaaataattaatcttgaactatgaaatttattcctaacaattaattagtctgaaattaatatggtttttgttgacattaattagctaaattgaccaatataaaatgctgaatacttcggaagaaattattaggtcaagcgtcaaagtgaaaatttgtacaaaaaatcaaatctcgaacaaaaacaaaaaactaattaaaatatcggaaattcatttttcaaaattttcaaaataaa

SEQ ID NO: 75504 - DNA, 2247 bp, Heterodera glycines
atgtacaaaaagtggtccaaatatgtacataaatattaaaaattactttttttggtattttaggcaacattttcaaacttattttttctttataaattttcaaaatataaaaaaaatgaaaatatgtacaaaaatatttgccgaaattttggattttttttgaggatttccaaaaatttccgtaaaaaatactcaaaccgaaatatgtaaataaaagtcccggtttttgttcgcaaacacaaaaaagaaagtgtttttcctgctatttagagcaaggagaagccaggaaaaaaatatgtatttacataaaattggcagccctaattatttgtatgaattatcaatgcaaacttttttcccataaatgttttaaataaagcgaataaatttgcgagcctaaaaaagtaacaatgatagtaatatttaaatccaattttactaaatcttattaatttattcctgttttttaaatctcataaaactttttgaaaattagaatcataataaaatttaaatttgcttgtttctgaaaaaagttatgaaggaattaaaattaattaatttgactaagttttgtgctaattatgatttattattaatagagctcgcattttgaggcatatgcctttttttctgcgaagtagtttcgatatattaagcataaaaaacgcattttccacttggtttgaggcttctccgttgacttttattatgccttttttttgcctttttcgggattttcgtgccttaaatgcctttttggcattttgccgttttggtgccttttttggcgtttttttccgaaaaattccataaaaatgcaataaaatcggcaaaatacatccctaagaaatgacatgaaaattttttagaaaatacacccctaagattgaaaaaattttcttaaaaattgatcaccaaaatttattttatttttttcttgtaaaaaattttaggcttaaaaattttccttatttgaaaaacactataagtatttaataatcatttaaaagaccaaaattatgttttttggttaatttttacgtgttttgctccctaaaaatcattaataaaaaaattttaaatgccttttttcatgcctttttcgggattttcgtgccttttcatgccttttttttcaattttttggtgcctattttagtgcctttttcgcgatttttggtgcctttttttgcgagctctaattattaagcaaaataagattttaaaaaattaaatttaattcttattatcattgacacttttttttatgggacatagcaccaaaatgcagcaaaagtgttgctactgagatagagaagaagcttccccgagggaagattaatggatcaattgtggcatatatgatcgagcaacgtggagagctggagagtgcagggtaccggaaagccagagacgccggttcaaagcaggcctgccccattccctcaaaagcttccccagctcgttcatatatttcatggcgacccttggcggcttccagttcacccagcagcagcagagaagcgaaaaagatgagagagaataaagctggcactggaagtgatcgaatctgcaaccttcagccgagcagcagctgacgcagagaagaagaagaaaatggacgaggacgtcacataagagaggcccgggatgagaaagagaagaagaagcttccccgagccagagacgccggttcaaaggcggcccgcccaatatttcccttaaaagcttacccagctcgttcatatatttcacttctatcgagaataaataaataataaatttgtggcgattgattacggaaagggaagaaaggaaatgacaaatgatgataatgaaagataaattcagagaataaaaaattgaaaaaaagttaaattatattatattgtttgaattaactatatttaaaaatcattactaaaaattcattaaatttcagataatcaaaaaccagccaatcactgggggtgtaaaaaagtctcggtatagagtctcgaaagcctcgaagaccgagactgaaaacccgagaccgagaccaaaaaaggatgtgaaccaaaattgagcaaaaatctttcctcttggttccacctttgatctcagatcttttctctgcaaattccttcccgagatttcccaggccattatcatttttccattcttttccattcgatcattcacattttcctttcattttcacatttcataagcaaaggtttaattacccaagtttgagatggaaca

SEQ ID NO: 75505 - DNA, 143 bp, Heterodera glycines
aaaaaagtttggcacgtcatatctcggcactcagactcatttcgcagaaaataaaaacacttttcttaagaacccatgggtgctctatccacccaccaaatttcattcggaaatcccacggacacccggggaccttcctttgt

SEQ ID NO: 75506 - DNA, 1332 bp, Heterodera glycines
atggaaatgccaccaattctcacacaattaatgttaattttatttgtttgttcaacgttcattgaaaaaacaaagtgcggcaaaaaagaagctgctgctactccgatggaaaaagttagccaaaaaagcgacgaaacagcaaaagcatcaaaaccggtggaaaacaaaaacgaggagctaaaaaaagaagtgaacttattttcaattgttaaataaaggatctttttgatttaagtgaaggttgtttcgtataaattgccatattaatgtgatcaaaaattcctaattaaagcaacaatttttatttgaaatttgcatactatagagcagggatggcacggaattccgagttccgacatttttggggtcggaattccgacttccgaaatttttgataaaaagtaagttcgaatttttcggaattctttatgagtttttttttaaattagcaatttttgtacaatttctgttaatacattgcactgaaattatcaattttttcccggcggcgcctatcggcaccgccgcaccttaaaatccttaattttcttgaaaaatttgcttaaaatctctaaatttgttttttctacaaaatctgttaacaaatcgcattataaatcactaaaattttaaccgacacctccggacccctccccccagttccccaaattttcttttaattacgcttaatcaccaataatgtaaaaaatgaacaaattttgggtcaaaagtgcaaataaattggcagtttgtaaaaacgagttcgcatgtgcatgaattttaaattaatattaaattttatttaaagattgaaaatatgaaaaagcaaatggaccaaaagttaaagaaaatattgcaagaaaatattcccgcatttgcacttcaattgaatgaaattgcagcacaaattgacaatgaagaaaagcctttggagaaagaatttattcaaaaattgatagacaaagtacgaccattgtacggtaagtgaatataaaataatttaaaatgaatttaaaacataaattatttaaaaaagttgatgcgaagagggctcatctgcatttctggtcgaaagtgcgcattttgaagaatgacaaacatataaaagaagacgtgacgaccgtggaagtgttggtaagcaatcgaaattaatttacataattaaaataaatgaaactgacattaatatgcaaaaataaataattatttactgattttattagtttaaaataaattctggcaaatgagcccttaattatcactttgttttctcaggatgctgttgaggatcaaatttctgccaattataactgtttcaacagagaactcgag

SEQ ID NO: 75507 - DNA, 1787 bp, Heterodera glycines
atggatcttttcgacatttttgaacacataaacactaacgaagacgttcagtttctgcgtagttctggaaatgctggtgccttggcaccacagccgttggtccccaacactgtctattcattgtccgatctgtgttcggcattcagctctgccgcttctctttctgcccctcctatgggcatggcttctaactccgatgcttttgggctgcgttcgacaattctccccgcggctcctctctctgcccctcccgtgggcatcagtacgaactccgatgactttgggctgcgttcgacaattgtccccgcggctcctctctctgcccctcctatgggcatcagttcgaacatcgataacactggcgcaactcgcgaacgcaaccaccaatacttttttggccatgactttacgacgggttagtatctcgaatgaaaattgataaaatttttcagaatctttctcgagcaattccgggacgacgcgcataagaaaaccgcagccgctgaacttctcgttgaaagtctttttgggtggtattcctgctaatatgacgacgagtaagtggggatttgcagagcatttcttatattaacaaattggtcggctttagatgttttggaattgaactttgcccgattcgggaagagtatcatcgactggccgaagaagacggcgcagcaagatcgccctccgaatggtaaatgacaaagcaacggttaccagatacatattgggattgcttaggttatgcttttgtggtgtttgaagaggaggagtccgtcttccgaatgctccgtctctccttcgtctccaacggtcgtctctttttctacgtctacatgcttgggcctgagcagacgcagcatccggttcattcctcactttccatctctttattatcgtttaaggtggaagtgaaagtgtgggagatgaaggacacgacacacgttggcatcgtcggatggcgaaaattccggcgttactccgtatttgttggaggcattccgcgtacatgcactgctggttggtggttaatgtcacatttgtgtgctaattgtttgttcatcgaattaactcattttagcgatgcttgcgtatggcatccaagaagcaatcggtgagtattcgtaattggaacgttaccgaaattaaaaccaaggtcctgttgcatattgtgccatcgagcttgaccggctccattactaccctaagggtgcggcttgcgtcgttttcgactctaaggagacctacgtacgggcgattgcagcgcatgatgttgtgctcagttttgggacattcgaacgaaaggtctttgtaatgaacaatttttgatggaaacatattcaaaaataatttacccctccaggtggaatttaagccattcctggccagcaacatgccatgtgagaagtgcggctgtacaagcgggacgcgtttctgtgcggaaatgatttgcctggcctattactgcaacaattgttggaaatacgcccacagttcgcgtccgtcgctgaatggacacattccatccaaacggttcatgcgtgggagcagcagcagcagtgggggcaaatcggagcaaatggagcgaaagtgaaaggcttacgggaaacaacttcattatttgctatttttccaatttcattttaccatttactcaagtatctggattattctcgtcgcaaatctaaatccaataacttttggtctaaaatctatgcaatttgttaatatctttcgaaaaatcactattgtttctaccgatttctgattgtgttttgaataaa

SEQ ID NO: 75508 - DNA, 525 bp, Heterodera glycines
atgaatccgcggctcgatggcatgtgtattagtgcatctcgttcagatgccagtgatttcctcccatcatatttttttaaacatatttttgtaaaatgcgatgattccaaatttgttgtttacaaaaaggcatggaatgtatcaattgtgaaacgtcagctagggttttgcccacacttcctcgtcacattcgtttctccttcaagtttcggatgttgatgcggcattggacgttggcgcggcactttgcaacggttttgcaccgcctgatggagagtgtctcggcgagttcgccgcgaaaaaattctgcacttgctcttcattcaactcagttgatgctccaaactttttcgcaagatcctcaattacatcctaaacagtttctcttttttggttaaaaatgtaaatgacataactttttgctctattacgattctctccgttcgttttttgcattcttggagcaacgcccttttggctttttcatattcagccaacaattttggtccatgataacctgactaa

SEQ ID NO: 75509 - DNA, 859 bp, Heterodera glycines
attgaattgtttttacatttgaattttttataaatgtcatcaccgtcgttgccagctcattggccagccaggacagcgaaagacatcgaaataatacgtgaaatttagttatctaaaaaaaattaatttgtattattttgatgatcctccatttgattttgtaagttttttcagttttacacgaggcggcgcaagccaccgtttgtcacgcgcttggatgggcagtaactggtatgcgttttacggcgcaaggcggagtggtgatctaatattttgtcttttaatttcaataaaaaaaagttcaggtggattggcacagaaccaccaccttgaataaaatcgagacgcttgaggatttaatgaagcggatttgtattcacatgagtggtaaaatagctgaggaacaattacttaaaagcaacaacactgggtctgagacagacattaaccgaataagcgaagtaaaaaataatagtattcaggttgagaatttttctttttaaggagatggagaaaattgtagagaatggtatgttgccaggcctaccgaaatggaacattacggtgatcgagtttttttatcgcatttcctcaattatttaattagtcaggttatcatggaccaaaattgttggctgaatatgaaaaagccaaaagggcgttgctccaagaatgcaaaaaacgaacggagagaatcgtaatagagcaaaaagttatgtcatttacatttttaaccaaaaaagagaaactgtttaggatgtaattgaggatcttgcgaaaaagtttggagcatcaactgagttgaatgaagagcaagtgcagaattttttcgcggcgaactcgccgagacactctccat

SEQ ID NO: 75510 - DNA, 1374 bp, Heterodera glycines
  unsure (1)..(1374): unsure at all n locations
atggaaccaaaatggatttggaaaggaacacatttggcatttgccaatgaattgttatgtgaccgaaatggacttttgaaggaaaatagcacaaaagaaattcttacgttaaattctgaacgaaagaaaatggaaattgacccaacgtttgtagttgacttttctaaggcaatggtcaaagacaaagatttggaaaagctgaaggcattaatcgaagaattttcagatgtttttagcaaattcaggtacgatcttggacttttcacagccgctgagcatcacatcacaaccacaactgaggaaccaataacatctgcgccaagacgaatgccgtacaaatacaaagaggaattgaagaagcacattaatcagcttttagaagcaggagtcatggttgagtctgacaccccatgggtaactccaattgtcattgtacagaagaaggacggtggaattcgtccttgtttagactttcgcaaactcaacgaagttacggtgcccgacaagtaccctctcccacgccttgatagcatcatggaaagggttggaaattgccaattttacagctctcttgacttggccagtggctattttcaaattaaattgagtgaagaaacgtcaagaaaatgtggaattataactgaagacaaagtgtaccaaatgattacgatgccatttgggctgaaaaatgcaactgcagcattttcaagggccatggctatcgttttgtctggattggaggatacttcattggcctacgttgatgatgtgcttattttcacgaaaagcccaaacttttcagaacacctgacggcggtaaggaaagttttggagcgttttcggctttataatctgaaacttagcccgatttggcgtttcgcatttcgctttttggcgcgaaaagcgacttttgcacccctaagaattggattaaattcccataaaatttttcaaaatttttttgcgacaaaattattgggatgccaatgtttgtcatgagaatctccaaatcattggccacaaaagtctcattgtccattataagagaaatttttctgctggtattttttcataatttactttactaattcttcctaaaaaggctgttgttcgtctgtttttgctaaacatccgattttgctggacaataattcggctgacaatttttactacgaaatttcaattggaaataagaaatggtaagagaattatttatttttgaatataaaattaatcataaatattaaaattttatttatttgttattgttatttctttattattanaattttcagttgggtcatcagcatcggattcgtactcaaaaaacagaaagaattgaaaggaagaatgggaaatggcgcttttgcgtat

SEQ ID NO: 75511 - DNA, 91 bp, Heterodera glycines
aaattttgaaaaattttatgggaatttaatccaattcttaggggtgcaaaagtcgcttttcgcgccaaaaagcgaaatgcgaaacgccaaa

SEQ ID NO: 75512 - DNA, 729 bp, Heterodera glycines
atgaggaattttatggggataagtaggacgggattatccaaaaaatcctggaaagtaactaatatttaacaactattttatccattgattatttatcaactttgcaaattcgactatttcttctacctagttaagtgggatggatgtttggtggacgcggggctgggccccggcattgcatacattggcgaggacaacattgtaattgttttttatagtggtagcaattttttttctgtataagcatgacaaaaattacttcaaaactttttataattatttagccgccgtgtgtccttggggaatttggggagcaaattcagtcggagcttagagatgccgaatcggtgcttgaatgtccggaacttatgctggacaagattgaagagcatatggaggacgacatacaattgggcgatgatgtaagctctcagcttaagtttttcacaccgagtcaaacaaaaacctctcttaatttaattaataactttaaaattttaataaattataaatattttgtaatcaaactttaaatatggcttagaacaaaacgaagagtacccgaatatcgtatcaaggagttcaaaataaaaaaatataccatcatgataagaaatggtaaatagctgctgaagtgaaaattatatctaaataaaataaaaataattgcaggcaaaaagaattagctaattagttttgaaattttcattaaaagggcattgaaataaa

SEQ ID NO: 75513 - DNA, 252 bp, Heterodera glycines
cccagtccgatcagcaaatcagtgaaattgactcgaaatgtgccgagtttggcattggcatagccaaagtgccatttgacgcccccaagggtaaaactaataagagacaataattcattaattatgcgatctattaaggagatcactcccaacgaaatgtgcctggcacggacagtgtgatttctatgcccggattgcccggctcacacaaacaatgaaaatgagtcaatgagatcattttggagttcattt

SEQ ID NO: 75514 - DNA, 983 bp, Heterodera glycines
atgttcgtcattgccgcctctgcttcttcccatgccagcaacaacagcgaatggcaggcattgagtgcccagtttggtcagcaaatcagtgaaattgactcgaaatgtgccgagtttggcattggcattgccaaagtgccatttgacggccccaagggtaaaaaaaaattagagaataattcattaattatgcgatctcttaaggtgatcactcctaacgaaatgtgcctggcacggacagtgtgatttctatgcccggattgaccggctcacacaaacaatgaaaatgagtcaatgagataattttggagttcattttgttatttgtccgtcaattagttgttggatttgtaatttagcaaaaataaataattattaaaccgcttaattggaatacattttgcatagacttatttaattgaaaatacgattattaaatcattggcatttatttgccggcattttctgcttgcaaattcatttatcgcccactctttccaacttcgttcgccaacgaattgaacataatttgttggctaagcccaacaaattaaattggaaaataaaatggctaatttcgaagaatggcattgttttgtcggcattatttgtaaagcaaaaggaaatgagtgggcgaaataatttttggcccaaattcaattgcaaaaacggaaatgcgtgggttttgcaaaggtataaaagggcaagaaattttaatatttcgacaattatgcaaataaaattattttgccattcctttgattttccgccgctaaattcaccaaatttccaaaatttaaaaatgcttttctccttcggcagtttctccagcgaagaagcggaggccatcgttgtcggagtgttccctccgctcagataatccgagaggaaattcaactcaaaatggaagtgtttgtgctgcttataacgaaagaagaagcggagagatggcaaagcaaagcaaagaaagacgaagaaaatga

SEQ ID NO: 75515 - DNA, 631 bp, Heterodera glycines
atggtcatactgctggtggccaatgaaatgtgagttagtggaaagagcatctaacgaatacataatcaatattagccgtaaaaaatttaaatttaaaaattgaatgtaaaagaatttaagaaattcgcgggaaggaaagggagtggcgactaaggggaaaagcagcaaaattatgaaaaaaaaccggataaaatttaaattctgtttctttttgacaaatctattaggtaatatattgcacgcaaaatttcaattttttttctccgcgatgcctgccgcaccgccgtacacccccccccccccgcacccaaaattttttcgggacatagcgttgccgcaaaatttgttttttaaacaagaaaatatttaaaaaaatcgttttgaagttttttggagacctagatgttacttaaaagctcaattttcagaaaaacaactatttccttcaattttcttacatagtaaatttttttcaaattcggctgggctaccgtaggctattgaaatttttttgtgacgacaaaaaaaaatttctaacgttaaacaaccaattattccaattcaaagcatttttgaagtcagtgctgcaaaaactatattaaaaatttattaacggtcgtatcagaataaa

SEQ ID NO: 75516 - DNA, 1322 bp, Heterodera glycines
atggttccaaactcaaagtttggaacagctcataaggatgggtaagtttgaaccattgcgcaattttttttaaatttggtgaaatcccgttagggagtcagaaaagacggccgtctataaataaaaagagaaaatttgagaaggaatacctctaaaagagaagagacgtctataaataaaaagagaaaatttgagaaggaatacctctaaaaaaagagaagagacgtctataaacaaattagaagcgctagtgatcagggatgaaaagcccaagtgatcagaaaatgaaaagcccaagtgatcagaaaatgaaaagcacaagtgatcagaaaatgaaaagcacaagtgatcagaaattatgagccctacagatcacaaattaatgagacaaactgatcagaaattgaatgtaagggcgaaacgggctaaaatacagatgtatgtggcgaatattagtgccaaaaggaaaccgccagaacttacttacagtaagaaagaaatacagtaattttatggggactgaattaactaaacagagcagaaaaatttgaatttgggcgccctcagcggagaattagcatttttgctcataataacgatttaatctccacagctccaacagacgcgacattttgccccccccctttcccatttttccccattttctcctttgaattgtgttgatactgccctccctctgtttatgcagaatttgcaattggatgatgggcgttattcgttggccattgaacactcatcagagtgcaaagaaacaaatcttttcatttgttgacattaatattttttttcattttgttttcatctctaagaacaatttagtgaaggacaaatttatttacaaatttatttttgagtttcgaatcacttctccgagttcgaaaaggtattaatacttaattaatgatttaaataagtttatgtttggcgttaagttaaaatttatatagctattttttctcctcaaaaatcgccgaaatcgaccattaaatttgtctcttttctctatttttttaattgtttttgttcgttgtgcgctatttttatataaaagtttattttgccattttcctatgagatttaacaaatttataagcgctttgctggtggcgtagaagcattttcggcaactgtgaactttgcggtgctaaaccaaggccacctgccacctaacactaacaaatatgtgaacccccccaacaaacagccaaggggcggccgagacagggttcagtggtcgttactgtggacatgccaccattagaaatgaattacatataagtaaaataggttaaatggcaaaa

SEQ ID NO: 75517 - DNA, 1290 bp, Heterodera glycines
atgtcaagaaaatccgagcaaatcgacggagaaaatcacagtgaaatttcaaagagacgcatttgtaaaggtaaaaaatggaaaacaaaaaatgcatactgtacataataaatacagtacacaaatgaagaaagtgaggagggtcatgagaagggattgttcgggtggcatttggtaactttcggtggcattttcgaatttgcgcactttgaccaattgcagcgacagctttggattgccggtgaattcagtttaaaattacacaaattaattattaattttaattgcccttttacaataaaaccgttttgcaaatttcagacatcgaattggccatccgaaaacgaaacccttcacttctttgtcaatttgaccgtgcgaattccttcagaaaaattcccgaagaaattttaatggaaaaattggaaagcgaaaaaagggaattagaaaaagcattggaaacggaaagagaagcattgggagacgaaaagcacaaaagacaaatgggaacaaagtgagaaaagaaagggcaaaattcaaattaaaaaggcatttaatggaaagaaagttggaggaagagaaaaacagaggagagagactgaagaagacagtgcaaacactgcaggaacaattggagacggaaaagaggcagagaatggcaaatgaacgcaggtaaacgagagagtggcagagagacagagcaaaagggcagagaaacaaaggcaaattcagccgcaaagaggaaaaaagtgatcagcaacagaaagagcaaagttttaaagcgagtcgaactgatcggaaatgggacggtgaagtctcggacaacgcaaatgcgaccattggcaaccattcgacccgtattcgccaaaggcacggacaaaacgaggcaaaatgtggatgagagatgaactgaaacggagagagcagcagcagaaaaaggggggagaagggaaagaggaacagaaaaaagagaaaaaggagcagaaaagggagaaagaggaggacaacccgcaaaagaggaggagggaaatgagtgaaaatgggcgacggccggcggaaactaaaaaattcggatgatcaaaaccagataaatccaccaaacacgtagacaatcaaaaaaaaaataatcaaattaaagaaaataaaataaaatttgaaaattttgagaggggcgaaagagggagggacacgtgagcaaaaggggaggaaattggacaataattgaacaattggagtgtgacggagaaaggaatgcccgcagcgttattgtgatcgcaatcacataataaa

SEQ ID NO: 75518 - DNA, 291 bp, Heterodera glycines
atgtggggaaactgtaccgcaaatgccattgggggaggaggaggaggaaaaagaggaggaggaggagtgaatgggtgggaaatttggcatttattaaaaaaataaaataaataaattgccatttcagacaaatttttatacattagcatttgcgtgtctgctagaaacaaaaagggctgcttagaaacattaaaattacgaaacatgatgtggtgggaaactgtgccgaaaatgactttagaaaaacataaccgcgagtgagacgagacattttggtatttaaaaaataaa

SEQ ID NO: 75519 - DNA, 1423 bp, Heterodera glycines
atgtccctggcaccctctgctgccacttcttctacagtcggcacatcattaaccccaccagcagcagcagcgcaaatgctgttttcgcccttccaattgatgcaacaaatttcggctgcatcatccgtcactgctcaacacatcgcttcgtcaatgtcgagcagttcgccaccaacggcagcaacaagcagtacaaaaacggaacaacaaacaacaaatacgatgacaatggaaacttgtgacaacaattacagcagtttgatgagcaacaacggaatgcagaaccaccaaccaattcatggtggggattttgggaagaaactggataatttatatgaaaaaactttataattagggggaactgttcagaaaatttggtgtttaattaggtgaacattcaactgactatggaaacattaacaaaaaaagggggggataaagccaaagttaattttgttaaaattacattctaatggatttttatcttttttgaatatgtaaaattaatttggcacaatctggcgacgccgtggaaatatcttaattttaattcttaaaaaactttattaatttttcaaatttatataaaatgcaattaccaaaaaattattgttgttaaccataataaaaatttggaatacaaattaaaaaaaaatttagctgctgaaaatccgttgcacactttgccactttcggcactgcttcagcactgtgagcagcaaaagcacttgacagacgcaattaacaaactgcaacaacagcagaaacagcagacacaaaaccaacaaaatggtcgaacgataacggcacaatgccaaagttcgccaaatccaaattcggcattcagcgcgccaaatggacaacaaaaatgttgcaacgaaactgctttgcaacatgacgaggaggagcaagacgaacaccacaatgacggtaaattttcaatacactttttccattttgaaaattttgtaaaaaaaatgaattttgacaattactaacgttttaaaaagaaaattaattttaaaataaaacaatttgatcctggacgagatcgggatcccgccgggattttcccgggattccgatcctcggctttttttgttgaaaaactagccgagatcaggatcccgaacacaaaatccgggcggcaaaaccgggatttgaataaccgattatttttttttcatatatttaattattattttttcatttgccactaatcttaatagatgaaaatgacgactcgacactgacttccgcatctgtgaatgggtccttctcgaccgagtccgcgagctgtgccgttgccgcggccgcgtcactttgctccaatgccaacacaacacaatcactggccgaagcggcgggccgcgcgagtgcgccaccgcttgacgatgagcacgtgaagcgaccgatgaagtga

SEQ ID NO: 75520 - DNA, 1454 bp, Heterodera glycines
atgcttgaattttcgctttggcttctctcattcaatgctttggctgcacaaacagccgaaatgacaacaaaaacggcaaaaaccacaacaacaaaacgagaaacaacacttgtgccactgacaaaaggtgaacaaaaacaatttaaattaaactaaaatatataaaattattgttttttagaatttatttctctgttggacgatgagaggcgttacaataaatacgcgactcccacccaacatttaggtgcggtttttcaatttttattttgaatttttttaaattttaattgaaaatttaaaggcactgccactaacgtgtcaatgtcaatgttcattgaaggcatttcaagtttcagtgctcagacaatggattatcagttggacgtttatttttatcaggtgattaaattaagcaaaattaattatcattaaatatttaattatgttacaaaaaaggaatttatcattaatcaatttattatttaaattcattaattgaaggaatggaaagacgaacggttgaaacacaacggatcaggtcccctgctgataagggataaagccgtttttaaggttgtttaaaatgttccctaaaatttttagaaagtttttgtttgacagaaattgtggcaccccgacatttattttgccaacgccagacaagcttcatttcaagaaataacagaagacaactttcttgtttggatttacccaaatggaaggtgaaaagggagtcaatcaatgcttttcaaaatatttaaatatttaattaaattttaatttgtttgttttttaaggatttggtacgattgccgcatttcgctggttgccatttgcatgatggatctgtggaagtacccattggattcccaaacatgcgaactccgtattctgagctgttagaaatatcatttgaaaaaatttcaataattttaaaaattttatttaatttaaataaatttgtatttttaacataattttcaattaaattccccccccccccctccccctttttcagatgcttatcccgaaaaccatctgcgcttgcggtggtccaaacgaattgatccgccaattgacagaaatatgggcatcaaaatgccgggtaaaaaatcatttaattgtttttgtgccatttaattttctgcaagcgacataattcatttttaagacatggaattggtccgaattaccaccggcgagtgcaatgggtcttatgtgacgggtttgaacttttaaatattgcttatatttttctgcaaattttcacaattgggttttcaggaacttggagctgtcagacggcagtgttttacggtaatttttaaaattaattataattattacttatttttttagtggaacgggcaatgcttcaccatatcatccagacttatgtgcctacttcgctgattgtcatcatatcatggtcagaaaacaaagttcattgg

SEQ ID NO: 75521 - DNA, 2100 bp, Heterodera glycines
  unsure (1)..(2100): unsure at all n locations
tttctttttaaattgtttctgaaaacatattaaaatctttccaaaagtaaatctaaagcaacataaaaattgtagatacatggcgactataaaattcaaaagtgcagcagcagccttttcattccatggccaatacaatgacatcgaattcaattccattgaatcggagaaatgccaactgcgttttgtggacacaatagagacagtgagaattgtatatcgaaaataaaaacaaaacttttgtttgtaaaattattatgggcaaataaggcatcattcatgagcaggggtcggcctgggtgaccttcgtacgacgtacggtttgcctagggggtggggtcggtcaggcccgatttttattatggtccatttttcgctttacctccatcgacgatttttaaccaaaaattactccaaaaaatttaggtctcaaccaaaaatttacaaaatgacgcatttgcaggaagaagaagctgccaacattgggggccttttggcagaccaaatgcattctgagccaccgatttgttcggtttgtttggagcggatggaggaaaacaatgtgttcaccatcctttggtttggccattatctttcgtaattgatgacattagactttcagtaatcactcatttcatgcggaatgcattggccaatgggcagacaccacgtaaaaatcggcgaacaaaaacgaaaatttaaataattccttttaaaggtgtccaatttgtcgttatacacaaactccagaactggtcccggatcagaaatgtttcggtacgtacgaaccaaagcagaaaaaactgctcgaataatgacattgactgtttttatggcaccaaatgcatattttccgggacattttcatttgttttaaatggttccctttttgcacagattgcggtcgtaccactgacctttggatgtgtttgatttgtgggaatgtcggctgtgggcgttatgaggctgcccatgcccaccagtgagttgagtgttttctccacacattcttaggcatttccccacaaatgtttttcggcattacgaaaagacatcgcacatttttacgctccaagtgggcagcaaattggtgtgggactacccccggtgacaattacgttcattcgctgattgaaagtgcaacggaccgcaaaatgatcgaatacgacggggggcggagcggggggcgcgacggaggtgaaaaagggggggaaaattcggggggattgggaaaggggggatcagaaggacgaggaganaatcagtgccatccaattggagtacacgtgtttgctgaccagccaattggagaaccagcggatgcattacgaggagaagttgcgggaaacggagcaacgtttcagcgaaagcggaagactgacccaaaagaaagtcagtgtaaaaaaataataatttaaattcctaagttaaatagtttaaaaaaatagttttttttgatgcccttttcttattttcctcttccaacctgggtttttattcctgtagctaaactcactcgaggcggagctgtgcaccgtacggacggaacgcgacgaggcgcggacagaattggccacgacgagcacagctaaacagcaaatggagaagaagtgccaacagatgcagcagaagacacagaacttacaacgtgaattggaggaggagcgacagctgaactcactgctcagcaaggataaggaattgttgggcaagcaaaaggaggagttggagagagtccgaagacaggtcggaggaagtggagaaacgaggggaggggggagagactgtcaattcacttggaaattaaaaaaggtgaaatcaagtaaacgcattcctttccaatgcctattttatttgtcaataaacccaaactctaaaagagtatcaacttttttattctgataccaggaaattgccgggttggaagagcaactgcacgatttgatggcacactttgacacgcaggcgaaggtacaacgacaagtggagacgggagcagtttcaaaggaagagttggagagcagcactttgggactgagcaaggaaaatggaagtggggggaaaaagcagcggaggaataaaaagtgacgaccaacggag

SEQ ID NO: 75522 - DNA, 782 bp, Heterodera glycines
atgccagtgcctgtcgcttctatgacatgtgagtaacgagcatttatcagcgaacaaaagaagggttttaaatgcggaaaaacccttcgaaggtatcacccggaaattggcattcttcgcaagtcgaagagttacagcgcattggcaccgacaaacgcaatgcgattgaagtaaaacaaaggaacatgaaaatgaaggcaaagtcctccaattgacagggaccgtttggtggcacccgacctaagaccttttcatccgtacaaaccgaagcggaatgaatggaagacggagctgtcagtcacatcggggcagtttccccacccaattgccattgctttttagtgaaaaattgcaccatggaacacatgcaaaactgaacattgcgccgtcgccgttccttccgccattgcctcccgtaaaagggacattttctgaagtttttcttagttcgcgtcccacagacttcgcgccgtcccttccaagtgccggccgatgcgactcgttttgagaatttctgtatgtattggggaggtcgggcgcgtggactcgactattcggagccatttttgtacgaaccgcagagagataactacagtattatggaggacagacggtaccatcgactgtactgggctcagcatatggtagaactaatggaaaaagcactgcccttccaaatgttcaatttcctcgcttccttagattcccagccaaccgtcggcacggcatggacgacaaattatgctgagtgcttattgaaagaattggagggaaaacaatga

SEQ ID NO: 75523 - DNA, 350 bp, Heterodera glycines
atggcctcaagcaaaattaattttgctgagcgacaaatgggcagctcaaaagcggcaaatttagccaatggaaaggacaaattggcttttgaggccattcagctgagagatgggttttatgagggaaaaaaatcactggaaaaagagagaagagaagaaggagcagaagaggaggaggagaaaaggaggagaagggagaagagagcaggagaaaaagaagaaaaaaaggaagaaaagaaaaccggttcttcctcctcctccgccgccaccgctgccctttcgcggagagtgccgtccaaatgagacgaaaagcggcttcaaattaattttcaattggactgccaaataaa

SEQ ID NO: 75524 - DNA, 500 bp, Heterodera glycines
atgtacttccgtgccgactcgtgcccaatgcaagcagctgccgacatgcaattctgtgctgcccaaggccgcgaccaccgcgagtgctgcacgcgcaacggagtcggctcgactttggccggtgccaagtaatgtttttacgtcctttttgctcatagttgtgccattttcttcatttcgtcagatgtctcactttttgcaaccaaatccccggcaatgtcacccaattggacatgagttacctcagctgctacgaccgctttgagaatatgaagggatgcttttggcacgacttgcagcgccgtatgagccgcgaacatcggagtcggaagtgaaaagggacgaaacgaaggaaaagcgaaggacaattgggaatggacggatcagtccgggaggagaggaagaaatcaacaaatggccaattcctcctcctcttcctccgatcactttgacaattttcgtcgtccgatttatttttgatcattattcacttgcctatc

SEQ ID NO: 75525 - DNA, 2192 bp, Heterodera glycines
atgtatgagatgaaagtgcgtaagcagaagaagcgcaacccaaacgtcgtcttccgggactccttcaacctaatgccttgctcactggccgcgctcgtcccttcatatgggctggaggttgaggacaagccgttcttcccccacatggccaatcgaccggaaaactacggcagggaaatccatccgacgcccgacgactacctggccagcggtatgatgcccagcaaaaggcggcaattcgatgcgtggtacgccgagaaccgtcatcacccgttcaagctggatgaggcattagcaaggtggtgtttctaaaaatgttgccaaagcccactcattttggctctctcagctattgcaccattgatgtggaaatcttgatggccgctctcgtcgcgtttcgccgtgaattcttcgacatttcccggcggcaagaatacgtggacggaatagacgatcgggagaaccacaacggaatcgacgttctgcgcgaatgcatgaccatcgcgggtgcatgcatgcgtcacttccgcaccaaccacctgcccgctgagcatctggccattgtccctgagcgaggctatgacaacgcgcagaaccagagcctgctcgcgttcaggttcttccactggtacgcggaggagcacggagtggaagtgcaaactgcccactcagccggaggagagaagagaatcggagcgtattcgctggatggatggattgaggcggaggggtgcgccattgaagtcaacggtgcacaaatttattttttatttttatttttatgaatataattttaggctgcacttggcacgggtgcaaaaagtgctatcccaacgacaacatgttgctccccagtggcaagacagcgggggaggtgcgcgagcgcgacgccaaacgcctggacttcctgcggcggcaagtgaaccgagtggacgtctactgggagtgcgaaatccatcggatgctggagcggagcagagaaatgcgcaagtcgtttgctgattatgtggatgatgggccgttggtgatccgggacgcgttcatgggagggcggacgggaccgctgaaactgctgcgcaaagcgggaccaggagagaaaatctcatattatgacttcacgtccttgtacccgtatattaagtatgtgtggtgctcgtcgtttttaaataataaaattttgaactttagtttcgtcactcgctaccccattggtcgtccaaaagtgcatgtgttgaaccggcaagtggagtggcgcagcgcagcggacaacccctacccattggcactgctcaaagtgtgggttgtgccaccccgtcgcgtcgacgtgcccgttctgccggttaaagttggagagcggctttgttttccgctctgcatcacttgtgccaaagagcatccgactggtggtgtgaattccgactaccactgcgcgcacaatgacagacaacgaggttgggtcagcacatgcacttcgattgagctcaacgcggcgctggacgaaggctacaccgtcacgagggtgttccgcgttctggagtacgagcagagcgacgaccaactgttccgcccgtacattgcggaattcatggctcagaagatccaggccagcggcttcgacaacaacatcagagggaacgccgacaaagaggagcagttcgtgcgggagtgcgcagagcagttcggcatcacaatcgacccgacaaaaatggtgctgaacaaagggaagcggtcgctggccaagctttgcttgaacaatttatgtaagtgtcatttttcagaattattttgatccaaaaaaataggggggcgcttttcgcttcgcaacttcggactgtgtcagacactgatcacggatgacccagcgattttggcagaatatttggacaacaaatcaattgaggtgacatcaatcgaccaattggatgaggagcacatactcatcacctatctccacaaaaaggactgggtggatgagcatgcctgctcaaatattggtgaggcacacacacacacaaaattcctactaattttttgtttcagtcatttctctgtggacaacatctgctgcgcgcctcgtgctgctcaaagccatgcagaaggtggtcagatcgccgggatccgagctgttgtacacgggtaaagcaaacagtgcacaaaaaccgaagatgaaatcagattattttagacactga

SEQ ID NO: 75526 - DNA, 815 bp, Heterodera glycines
atgaagagacgcgctgctactcttactgatgctactgctgagcaacatcccgagcccaaaccacaggaagagaccctcaaaaatgtcgagccgaaggacgagtcggcaaccaagaaacgcaaagtggaggaccgagagttgtggaagttggaaaagggcaaatttttgctgacgacctatttgtgtccgggtaataaacaataaaaaattattacatttttaattaattaattttgagatgattggaatcgactgttcaacaatcagcagaaggtgaaacgtgtggagggcgatcgtgtttgcttcagctttgatctgtgtgaggagtgcgcattggccaattgccgcgcaacggacctgctggctccgatgaaaaaaagacccaaaaatgacttttgaatttccttttgattcgcatttttatccctaattcagttgaattgttccatatttgggattatgcaataataatgaattttttcggcagtggccgcatttgaatctgtcacactgttaattaatggtcaataggcatgcgaaccgagcgcaggggtgggggaggggattgcatttcctttattcattaccaaatccatcgattccattgaatttccaacaaaaatggcaccaacccatcgcaaaggacaaaacccatcactgttcggaaccgcaagtgaccaaataatttaaatcatttgaaaaaatgggttttcaaggatgccatgagtgtcacggggaccggtgcatgccatgtgccaaattgcgagagcggaacagagaaagggcaaggatggggctgtgtcatgggcgcatga

SEQ ID NO: 75527 - DNA, 59 bp, Heterodera glycines
atgtggtggtggatttgtccgacggcggtgaggaaaatggagagccgagacgaaagcgg

SEQ ID NO: 75528 - DNA, 1507 bp, Heterodera glycines
  unsure (1)..(1507): unsure at all n locations
atgaaaataattngacagaagcgactngatgttttgctgatggtagtgaagaattattgngaaatgttcatgggccaaaaagttggatttaattattaattaacaaaaaatanttaaatttggaaatgactaattttgcgataattatttcatcagaaactttgaaaaattgctaattattgggaaatatttttaaaaatctacatttatgaaagtgaatttaaataatttaaatttaaataaatttatttccacaaattttgcacctccaaaagggccttaattgtgatgagaaaacgtgcaaagcgacgtgcaaattgccaaaacggaacagagaagtgccattgaaaagggaggacgaaaacccagcggaatatttctgttacccatacgaagcaattaagaaaatataattaattaattaattggaaaattaaattcagctgatttacgaccacgcaaattccattggttgtgccgttcattttgagaccaaacgcaaaacggagctacgcgccaaattggtgtgcataatgtgagttcatcttgaaacaaaaaatgccaaaaaaaaacggaaaaatgccattaaatttttaaggagcactgagcatggccacaagaaaatgctgcaccatcacaacgtattcaaagtgagtgccgacaaaattaatggccaattttggcactttctgttcaggtgggcccgtcgtgttcaaattgtgatcgaaatttcgaatgcgatgccaaaaacagattgtgcatgaagcgaagcaatccgagccaaaacggggcacaaatgccaacgatgggaaggggtaaaataaagcaaatggaagttaaataaatatatttaaaatggtaataaatggggcaaaagaaattaatcgggacaccgaaatggatttaaataaattcaaaaaagtaactccaaatattttttaatgaataattttaaattaattttcccccaatttttctcttttaaggcatggactaccaaatgagaaaatgaagcgagggaagaagaagcattggatagaaagaaagtggcaaattactgtacatttttttgaattactctcttacagtatcccctcccgcctttcagttttaaattactgtagatggatataatataccgtaacttttttttaaattttacacaaatatcaattgtgaatttgtgaatgggaggacatgaacgacatgaaactgaaaggacaagcgagcttttggcacaaagaaaagccatgacaattaaattcgatttaaaccgaccaatttaagggttgcccttgtaaacatgaaatttgattagaaatttgcctatcttaagagagaatggcaattcgacgtggaaattgcgacagatagaaaatgccgacacttttttcgactcgatacagagacgttcgagcagtacttgcagtttgaaagtagaagcattctccactcagcagctgacttgtcatttcgatcacatttgattttactttatttggcctaa

SEQ ID NO: 75529 - DNA, 2024 bp, Heterodera glycines
atgtccagggtgagtttgggggcttttcttttctctgctctgattgtgagtccattcttttttagggtgctgctccgcctccccttcttccgaatcaggccaagaaagtggtcatgaccagcatgccgtatcacgggcgtgtgaattaccatcatcagcaacagcaccatcaaaatcaaccccatcatcaaatgggtggcggaggcggtggcaccggtggtggtggtggtcgtttccatcaatatcaccatgggttagcaaaaatgttgtctgtttcaatccctcattctttcattttacagcaacagggttagcactggtgggagcgttggtggtggtgcgggtgctgggaatgtgaacaacaattttgtgcgtcgttcgccatccatcattgacagacgttgtgaggagtgcggctcgcaggagcatacggcgctgttctgtccgaacagtgagtttccgttaaacacaaaaattgtcgtggctcatacatttacaaaaaaaagtacaccaccaacctccctcaccgaattggaaactacctaattatattattagatgcgtttacgacttataagtttttggaattgttttttccatcattttgtggccaaaacggcaaaagacatgctttattcgataatacttttcattattttcagcaaaaaagcagcgcgcactgttggaaatattcgctcatgagttccaagtggcggctggccatccggcactcgtgcagcaacagcagcaaccgcagcagcaacatcagcaaccgctgccgcaaaagccgtatcctccgtaccctcagcaaccgtactcgcagcaaccgcattcccatcagccgcatccccagcgaccgcgcaatgttcaccatcactattccggggtgcgtcagttgtgtattttaactattaaatgcattatattctcattttaatgggttttgttgctttatggcgttgagatataaaaattttcatcgaagttaaagtgtttaaattccattcatttgtctcccttccatttttttaaattttattttcttattttgcttttttaggctgttgtgtattcttcgtcgcatgcaagccgtggtggtggtggtggtggtggaggtggcgctagcggtggcggtggttgggtgggcagtcaacggaaatttcgtccggcgcagaagtgattttttgtgtgtatggcgcttgctcgtttttgatgacagccgattttttgattttttgttgaagatatatggcgcagcatataaaatatttaaatctcatcatattcacgcaattgtcctgattttaatgacgacaaaaaaatgaaaaagaatttcttcttcgaccatataaaaatttaaaagaaattagtttcttaattggcattggcaatcccggcacttcttttactttgggcaacttttgttttcaaaaattgtgcatagttcacccggaaaaaccacgctttcctcggcaatcatgtcttttactggtcccgaacaaatttttttttaaaactaaaaattctaataacatatttctaggggtattttgaggcgcagagtgcgaatccggcctcctttttaactgatttccaattactgtaatccgtaattatgtccagccctcctctcgattgactgtgttccgctcatctatattcaattccgatacattcctgggggatgggttgtcaaatggctcatttgttcaacaacagatgcgccgcatgaggcccacccattcgctcgatcattgtccaattgtccctcattttcttccccttcacaactcaaacactaacaaaacaacaacaaaaggggggggggggaaattgaagtttttcaccccaatgataactgtaaaaatagttaatgtactgcaattttaatgaactggttcagctggtggatgaaccataggtgccattttggaacccttttgacattggaaaatggccatttgtttgtgtgctgcacatccgtttcccatttcccattttcttttgggtcaaaaagcaataaa

SEQ ID NO: 75530 - DNA, 566 bp, Heterodera glycines
atgaaacaaaatacatttgagaatagtgaaggtgtcaaggcatatggtaagaattaagttgagaaatggttaatcaccataatagagtcagtcgatgtcattaaacattaattatagagaaaatgcaaatgtgacacattaaactagaggagttaataatatccgtgagatatttggtcaaaataggaaatatgttaactgtccatcaatcacataaagttgaatattaaagctgacaatgagaaaaaataaataaatttgaagatgagcgattatggcgtcggggagaggtcgaggatcgagtgccaaatggggctgttgtccaaattggacaccaacggctggacaagcatctgaacgcgaattttttcaaagtccctctggaaagagagcaagaaggtcattttgagcaatgccaaagtccattccgcaacggcggagacgcagtggaggttgtagccctgaagaacacaaaccaaataatgtttaagccagtcatgccacgacgtacgggaagaactccgtgtttccgattccatggtctcggagtggggaggtccggataa

SEQ ID NO: 75531 - DNA, 454 bp, Heterodera glycines
tcgaaaagcaaatcaaacggaacaaagatggaaggccgaggaagcgatcacagcacacaaagggaaacaaactgtgggaattcatcagagacgcactgaaagacccgcgcacgtgcccatccgtagtgaggtgaaaaaggggggaaagtgccaatggaagggagtgccaatgaccggccatcgtttgcctgcaggtgggaggacccgacggaaggcgtttttcgaatcgccgaatcggaacgattggcatttttgtggggtcaaaagaagaacaaccaaaagatgacttacgagaagctgagcagagcgatgaggtgactgactaatgaatggtgtcaatgacaacattcggactcaaactaatcatgccacccctttaaggacgtattatgagaagcaaatcctcgtgccggtgccgaagtcagggctttatcctaaggtgggcgagccttag

SEQ ID NO: 75532 - DNA, 1839 bp, Heterodera glycines
acactcattctttgttttaggcttggtgctggtcatttgcccattcttttcgctgtttgtttcgcgactatgctcggtgtttttattccttaaattgatccgtcgtcattacttttttcaatgccattccaactccttcaggctgtacttacgttttctccgtttggcgtggtgatgttgaccccgtcttcccttacatttctgcctctggtgaccttcgccccgagtcgtgcattttctcaatgttgctcaacatttgctcctttttttcgatgcttctcatcattcttaggttttttattcccatttgccattaaatatgcccaatttattttcaggtacagcctcgtcgttgagctcaaccgaagttcggatctgagactgagagcggtcaaccgattggcattttacgttgggatgttggctggcctcggcatgttcatcgtcgccaacgttcaagagactgcagtttttcaaatccatttgctcggcgccctcctctgcttcggatccggctgtgtgtacatgcttcttcagtcgtggtgcactctcagaatgagtccgctttacaacgaccctcaaatcgcttacattcgatttgtgattgcaattgctgcttctctttgcttcgtcactggtcagtcttctcgccttcgttgattgcctcaatcactgctaaaccgcgctcaatttctttagccttttcctttgggctgatggcttccatcactttccaccattattatccggacctccccactccgagaccatggaatcggaaacacggagttcttcccgtacgtcgtggcatgactggcttaaacattatttggtttgtgttcttcagggctacaacctccactgcgtctccgccgttgcggaatggactttggcattgctcaaaatgaccttcttgctctctttccagagggactttgaaaaaattcgcgttcagatgcttgtccagccgttggtgtccaatttggacaacagccccatttggcactcgatcctcgacctctccccgacgccataatcgctcatcttcaaatttatttattttttctcattgtcagctttaatattcaactttatgtgattgatggacagttaacatatttcctattttgaccaaatatctcacggatattattaactcctctagtttaatgtgtcacatttgcattttctctataattaatgtttaatgacatcgactgactctattatggtgattaaccatttctcaacttaattcttaccatatgccttgacaccttcactattctcaaatgtattttgtttcatttttattctgtattaaacattttactagacatttacatatttaaatcaatagataaattatataaagataaaatttatgaattaaccgggtcatttaaaggaatgaatcaaatggacaaataggaaaagaatatagctatagaaaatcacaaatattctgagagagtaagcacagaaatgggaagcaaaattttgtttcctgaaccggacaatcaaagtaaaaacattgtacttgtattaattaatgaaggaaataaataagaattaaaaaaacataaatttaagcaaagagaatctgattctgcggctattttatgaaacgaccaaaaaaggtcagtctttcgtaagagaagagaagagggcaagaattgcgcaattaaaagggaagggaaaggaatggccaatttggtctaaattagagagaacagaacaaagagaaagggacggggcatcggatcggtttataaaaccggtgaaaaggatataattagtcaaatcccgctccaaaaagactactcgggtgaatcaatc

SEQ ID NO: 75533 - DNA, 1418 bp, Heterodera glycines
atgttggcgacacttacaccattcgttttgcacctgcgcgattggaatgcgcaggttattaccgcctttgtgccgagaacagtcgcggatgggtggaggcgcaaacgctcgtccacatccggcccaaagtgactaattattattattaaaaaaaaatttttttaattaataattttatttaaaatttgaagtctatgattccgaaaccattacgccaacggcgctcacttggcgacgcgcgcctgggcgccggcaccggtggcattcaggcgctgttgcgctcacagcatgaacggtattgggtaagcaattttaatgaattttgaaaaattttagaaaccacgaaatctttaattttttccaaataataaacacgtataattaaaagtggaatttaattaccttaatgaacaaattttccatcaaaattgtacagaaaaactgaattttgaaaacaaaaataaaatgaaaatttataaatttttattcaatgatgactaaatacagaaaatttacacaacttttcaaggggtgcacttcgaaattctaaaataattgcaaaaaaaaatagtagaaaattgaaaaaatttcttacattttttattgaaaattttctgttttttttttaaatttatcggggaggaaaaacgcaacggggggggggggggaagaaagaacggttgggaacgtttgtgcacaccaaatttggcagcattcaaaataaaaattggtgatattttaatgaggttttgttattaggattttacttttaaaaacgtttcaaattgaaggcacaacgaaagcgtgctttgagcacaccgccacagcaacagcaacaaaaccaacaactgttcatgcgcacagacgaacaacaaatagcaggaaaagcagcagcaacaaactcattaaatcaacaagcgcaagcgcaacaacaacaacaacaattttatgccatttacaatcagaagcaacaaaatggtggacacaaatggcagcaaattacggcactggcatcatcaattaaggcaacagcagcaacaactacagccttggcgacacggccacaactgttgatgaatgggacaaaacagcacaacgagcagcagcagcaatttgataaaagggtgaaggatgttgaattaataatttttaattggattttattttaagatataaattttggaatattagaatatattcgtgttattttttgaaattatcacagccggtgatatttttgctttttttaagccgatataagaatggcccaaataattaagccgttttaagagccaaggaaattaactgttaatgctatgctaccaatattcgccatcaacccgcaaaaatttaaaaattgtcttcatttcgaaatttattttaattattttataaaatatttttcgcaaaataataaa

SEQ ID NO: 75534 - DNA, 877 bp, Heterodera glycines
atggaagccaataacaacactgatcaccaccagcaacggcggcatactgatcagcgcagttggggcagccaaagtgtggcctcgtcaccgcgtggcattgtgtacacactgagcaaatcggaccgtgccgagtcggcacggagcagtgattttgaggacccaggcttaggtcggaacagatcgtccccctcccatatgcgtagtttctccccgataattttttataaaaagattctaaaacaattgttttaaggaaaaaatcttagaaggtttttataagaaaattttcaagaaaaaaattctgaaaaattttggcgattttttggaaaaattctgaaaaacttaatattcagcataaaatttcgaaaaaacgcaagaaaaatttttcgaaaaattattttcttaatttctataaaagggtttctaaaaaatttactcgataaatttgagtttgaaaaaattttaaagaaattttcgggcgggaaagaaacggggtaggggttggaactcagtgcacccggcttaggtttttgcggaaattaaggtcttagtgatatatttttcaaaaaatttcaggctatagcagccttgccaatccgcccgaattcatccgcgcattccaaaccgaagtgaccatcaatgaaggcgaattggctgaggtggactgtctgatggtgggcaatccgaggcccaaaatccgctggttcttcaatgatcgacccgtcaaatccagtcctggattttttgaggtaaaaaattgttggaatattgcataagcaattaaattattcaattttaattttatttattattttaataaaagtgaaatattattatttttagctcaaattttaaaatatttttattttcgattaaa

SEQ ID NO: 75535 - DNA, 254 bp, Heterodera glycines
atgtactggttggacttgatggtaggccccccaaaactttcatttttgtatttggtttgattaattatttaataatatattttcatataaatttgaaatttttttcaaatcattaaaaaccttttacattttaattttttaaatctaattttttagaaacaacctcaaaaacaacattcacgacaacagctacaacaagtccaaccagtggatttgattcgccgcaggcaaacataaacaaaaaaatcaataaa

SEQ ID NO: 75536 - DNA, 837 bp, Heterodera glycines
gtttttgactataatccgatcaaaggaatcaccataatgccaaatttcgaccaaactcctgccaaaatgaattacaaacacaaaataatattggctatgaatggagatttatttttaaaattttcttcattcattttaattcggcagaatattaggacatgaaatttttttaatatattatttaattttgcatgtttttaaaatttttttagatgtttacagaattagtagcatagaatatacattatttataattttgtatttaagcgtattatttgtttgcttaagtttccgtcgtattgcataagagtaaatgatatttttctttaaaaactttatataaaataatgaattaggcaaaattgtcatttatttacagccgttttgtaaacatttaataatcagctttagaatttattttattttttcgttatttttaatttagacaagctgttttataggcattttcagaaatttatatttttactggatcagttttgtttgcagcaactgaatttaatcctatttatttctatggaaaatgattaagaatttttcttatgtacaaagtaattattatttttattatcattttctttaaaaatacaattaagtataaaatttaagtttttaattcaatcttcaccacaaattattattattttcacgcgtcaccttttacaatggcttcaaaatttgagccaaagtctgaaaaaaaagaaaatagattatttttaagatttcagaattttcttttattcaattgggcggtatgatgtgataatttagcaggctacaatttacaattcaaatgaaacttttaaaatgtaaaataaa

SEQ ID NO: 75537 - DNA, 723 bp, Heterodera glycines
atggcatgcgcagtcgctgcagaacgagctacaattcaccaagagctgcaacgattaactctcatcacggagctgatccgagtcgaagaactgcaggaaacgcaggtgaacatcacgttcaggcaccagctgaactccgtggccgaaatgatggacatgttgcaaatttgggaagaagacacggcaatcaactgccgcgtcgaccaaaatgacgaaaccaagccatgtgccctcggatttggcacaggtaagacgtttacggcggcaggaatcatgtctgccatcctgcgcgaggatccgtcggcacgcatcctggccatggcaccgcccaacattgccgtctgtaagctggtgctggaaatggagaaagcactgcgcattgagggacaacccgagccaatgatcgctctgttcagcggcgcgggaaaaatcaactatgctgaagagttgaggcgcatttctcagcacctcttagcagccgccgtggacactgaggaattccgtgagcatttggaaataccagacacccgaaaagtggacaaatacgtcgccgcgtgtgcgcgtaacccgagattggcccaagaaacgactgtggcccgcattctgaaagagcatgctgagcgccgcatctacttctgcacactttcatttgctgaacagacagctgaactctttgccggcatcactcatctcctggttgatgaggcaggtcaagccccgtaa

SEQ ID NO: 75538 - DNA, 245 bp, Heterodera glycines
atgctcttcgatcttaacattaactcaatcaattctggtcgtctttcccaaatgccattgattacggcactctcgtcagaaatcattgaattggtcaacaatttcaaggaggtgtgccacattttcgtaaaatattttagattaattgccaattcattttcgttgcccatttttaggcatttctccatgccatcacttctgccagctatgaaattcaatttactgtttatgcgccatttcaatag

SEQ ID NO: 75539 - DNA, 1465 bp, Heterodera glycines
atggcacccgtcaaaaaaaagaaaaaactttcctccgccaatcaccgcctcatttctgcaactgaacaacagaaaccgttgggctcatttgtgacatttggaaatcggcgaagtctccgtgtggcaatgaaaacgaagagccgacggtaagaaatttttaaaaatttacaatttttaatacaatttttccacatttcagttggatttgcaacgacatttggatggacattttgccgctttttcgtcgtcgtcaactcggtctcaaaatggcacttctttcgccacgtttcaatgcgttggtggacaaacatttcgatggcaaaagcgaactgacaatttggagaccaattagaattgacaagaaaggaacaaaagcaaaattgtttgttgagaagagaaatggcaaaagtgtgcgattttcgttgcccgaccattcgctgaccaacaaaagtcgttttaagcatcttcggatttggtaattcaattccaacatggattaacggacataaatattcctattttcagccacatcgaccattccgtcatcacatttctccgtgccaaccagcaaatttttgacaaaggcatcaatttggatttgcacgtgccgcagttctcctataaagccaagaatttccagccaatttggaatgcttttgcccgtggaatttggccaatttttgcgccaaacattcgccatttgaattttgccaaggctcgtcatcttgaaaatttgcttcgctacacttcgccgacaaatctttacgacctcaatgtcaaatcaatcgattccgatgatttgttgcccgcggtggttgctgatgcaaaagggccaaatgcaactgctggccaagcattgtccaaatggttgcaaatgccgagaagcgatggccagccaaagcaattgagttgttccggttatatgtataaaaccactgaattggtcgacaattttaaagaggtgtggtcacttttttgtaagattttggattagatgccatttgcttttcgtttcccattttatagtcatttctccgtgccaccatttcttcggccagttacataattcgaattaaacttcttgagtcaatgccattatttgcgccatttgaattgacgaacgaacggaccaacgaaatgctgacattggagaaagaaaacagtgatgaaaatgcgaagaaagaatacggttataaatggcacgagcgatgggtaatgaagcgatgccaaattggggagacaattcaatgggaggacgaaaagacggacaaattgaacaatgtcgacttatcgctttgtggaacttcttgcattgggtgagtggaagcagcattttcttttgtttaaaagtaattcaaattgcacttcgtttaggccattgtctccaccaaaggcggacaaaaagaatgcaaaaagtcctctgaaaatgagtgccgggccaagcggacagcgcaagaaaaagtga

SEQ ID NO: 75540 - DNA, 138 bp, Heterodera glycines
ttgtttgccgttggcgtggccttttggcttttggaaaaggctgctgccgcccgcctcggccccatcgttaacggggagccgccggactgcgtgccgccgtgccagccaaagcagcaaaaggaggaggaggaaatgcct

SEQ ID NO: 75541 - DNA, 837 bp, Heterodera glycines
atgtacccaaaaaggtacgtaaaaatagaatagagaataaacaatatactgtataccgtaaccccgtcaaaatttgtgaataaaatacccaaaacggatttgcctggaagaattttatgccactgaatttcgaattcattcctactcctacaagaataccgaatattcaaatataatttggtatttttagagtggtcgtaaacttccaccagggtggcagcgattatgacgacatgccattgcatttgtccacccgttgggatgaaggtaaataaaggccacggatcaaacagatttttccgaagattttgacaaccgtaattatttttttccgaaatagccaaaaaaaaaaatccatcgagaatctcgaccctaaattgcattattccatctttgtcaggactcttttcgggcaatgtcgtgttcaacacgtacagccgtcggaattggtctgaaccggaggagcgagtttcaagtccatttccggctgatggagaattcgacattcgcattcgacttttgcctggaaaattccaggtccaaaaggatttaaatttgaaaattaaaatttaattctggcatttacttttgaaatcccttttttaaatgcaattttttgtaattttaaaattgaaaaaagctcggactaaaatttcacgagataacgaaattccagcttgaaacgagacgggggagaaagactccaaaaccgttagttgtgattcgagatcgagacttttgagagcactattagcgccttcctcgtttccttttttgcatccccgcttccgtccccgattatcatccacgtccttgaatacttaacattttttgtga

SEQ ID NO: 75542 - DNA, 760 bp, Heterodera glycines
atgggcgacacggaggagtacaaagagaagaggcaatttgcggagcaaattgtgaggtgagaagaattaaacatttgttagaggattatctaattaatgtttagcctttaattaccaaatgaaagaaaacgaaagtgacgtccgtctgaaaatgagtaatgaaagccgttattctgatgaaagccagacgaagtccaaaaatacattcacaagacccaaacattgttcaattgaaacaatattttaacgataaattcatatgataaaagtgtgcggatttatatttataacgtggtaagggacttttggggatttgcaacttgggacccaacatttggggacccgactcttagggaacccggcatttggggacccgactcttagggaacccggcatttggggacccgactcttagggaacccgacatttggggacccgactcttagggaacccgacatttggggacccgactcttagggaacccgacatttggggacccggctcttagggaacccgacatttggggacccggctcttagggaacccgacatttggggacccgactattagggaacccgacatttggggacccgacacttagggaacccgacatttggaatttttaaaaatgaactctgtttccggactcaccgcgatgaggtagcagaattttgaatcgggtctttaaaagtcgggtccacaagttgcaaaccccaaaagtcgggtagtcatttaaaaaatgcagaaatatttaaataaa

SEQ ID NO: 75543 - DNA, 756 bp, Heterodera glycines
atggaaaatgccaaggaaaagacagtgccaaaggcatttgaaagtggcggacgaaacccctgaaaaagcgacacttgtctttttgagagatttctccgtttgtttcagcccttctccttttgtcgtgcattgacttcgtaagtgccgtttcggacgacggcgcgccttttctgtccgaccaacagaaacgtggcggtgcgcgcgccttcaatctctttgcttctgctgctttcccaccgccgaatgagaagagaagcggcggacgtgcctttggaggttcgtcgagtgattttggcacttttccaattcatttgtcagagtccgttccgttttcaggtggcattcagacaattaacgacgatttcgatgctaatttggctggagaactgaagcgtgccggtgcccggttatttcggatgagtgacctttcatctgacggggacagtttcgtgccggaagggacaaaacgcggtggtgccaggcccttttacggcggcggatacattgacggagcgtggaaaagaggtggaacacggagaacaaatcgaacaaatccattgcttacagcgggtggacgatatttcttgcgtcaatttgacgatgtgccgtttggcggcggatggatggccaaacgtggcggcggtcgctcatttttcgagtgggcaacattcattcgatttgcttattgcctcggggaacttccaaaaatgaaatgccaacaatattaaccccgtgccaaggaaaaagtttaataaa

SEQ ID NO: 75544 - DNA, 500 bp, Heterodera glycines
atgtcgcaattcgccattttccttctgccaccactttttgtttggtcggccttggttgattcttgggctgattgtcttcatggtcatcattttcttcttcgttttcggggcgccattttaattgaacacctcgtgaacacatctaacaatacttaatttattctctaatttattttcattttcaatgctcgtgtatttttgaatattttttatgctcaacaacgattctcatcagataaaatttatttacaatgattaatttaattttagactgttccaaatgattttattttcaaatgtttttatgtttcaaataattgccaaaaaagcaaaaactcataaaacataaacaacaaattgtcaaaaaatattatctaaatgttaaaaaatgaatttttgacctctttaggcctaaaaagcgaaaaattttaaaataatttagaaaatcttctttgagaaagtcatttaaattaattcaattataaatgcaccaaaataaa

SEQ ID NO: 75545 - DNA, 718 bp, Heterodera glycines
atgtccgctcggatttacaccactttctgcggagttgaagaagcagacaaagaagatggaggaacagttggacgaagaaggcggcgacgacatcaaccccaaaaagagcaacgttggaccatcgttggaggaggagctgaaactgttggagaaaagtgcggacagtgaggacaccacgcgcagcaggtggcaggcagcggagtttgtttatataaatgtataaaaactcatttttatgagttcaattcaattagtaaatgccatttgagcaagcccggaaacaatttttagagacttgggcagtgacggtcccatgatttcggcttaaggggggggggtggatatttcccccgggcgacgattttttttgcttttcgcacttgtcttgttttgaagcacttttctcaaaatttcaccaaaattgctaattttgtgatttttgaaaaaatatttcttaattaattaattctttttatgaattaaatttgccaccaagtttcagcaatgctaccgcagccgatcatttgccaaatcaggtggtcctgcagtgccgtgaccaaatgatggacaattcgcttggacaaacggatgagacaaaaagtagcgccgacgacaacaacaccaaaaacagcgatatcgctggtggaccatcgttggagaaagtactgaaaccgttgaacaaaagtccggccaaagaagacaccaagcgcagcagcag

SEQ ID NO: 75546 - DNA, 368 bp, Heterodera glycines
aaaaatgataaaaattattatgaaaagaaaaagcaagaatttattgaacgaattgatgagatttacagaaggttaagaaaaggaaaacagaagcaatttgcgaaagaattggacattgaccaaaaaacattcattaaatggaaaaaagaatttggaattgaaattgacaaaagtgtgattcaattaaaatttgaattaaaatttgatttttttttaaatttttattttatatttatattttattatttttagatggaattcggtattcgaatgaagaaaaaataagcaaaatgaatatttattataaaatgaagaaaggaactccttcaccgagtgatagagaaattgccggattattggaaatttga

SEQ ID NO: 75547 - DNA, 877 bp, Heterodera glycines
atgctaaggacggcgtaccgcgggatggttttgtttgagggagaattggctttaaaaatggcactgctaaacaaacattaccttttgctcgccgttttatgcgggaaaataattaactattttgagcagcaattgacagacgataaaaatgaggacaaaatggcaaaacttggaaaatattggaaattattcaaacggaatcttgagagtttcaaagcaaataaagaattggactccatgaaagggttgctgatcaaattaaggcaacttttggattatttgagggaccaatttggggaacaaaaactgtcgagcaaatggcaaatgattgtacagcgaatggaaatgatatttttcgaagaattttatgaggaaagtgatgaattcagaaaacactttcaaaggaataaaaacacggcgatgccaatgttgacaaaggtttttgcgtttgccgaagagaagtggggaattatttcgccacacttttgggccttaggtaaatattttaatcaatccatgggcgactaattaaccatgcactaattaatgatgccttggttcgttggaggccaaacgaaacattaaaagttaattaatttgggattgtcattaagacattaaaaagtctgaaaaaactttgtcaataaatctaaataactaaataaccgaaatagcaagtattatttgtaatgaaatgagtgaatggattgattcattaatttcgcttaattaagaaaaattgacaaatgaaatggatgaaatgtccatgacacagaatgaacaaaaggcgtcgctccttattaaatgcccaagcaaaataatcccattggaaatgctgcaagaattagatttaaaagaaacagatgaaggcaaataa

SEQ ID NO: 75548 - DNA, 1418 bp, Heterodera glycines
atgctaacgacgaaaattcgtgccacaagcccgaaaaaggtggtgacgaaattatttccgatcgtcggatggctgccaaaatacaatttgcgcagcaatttgcacagtgatttggtcactggagtgacaattggcattatggtggtgccacaaggtgattttgtttttatttaccaataatgttacaattaataaactgccatttttgcggcggatgcggtaaaaattcaattaattaatttaaaaataattaatggtagtacaatttaaaataatataattgtgatggctttagcgatggcttacacaactttggcgggcgttccgccggctgttggcctttacacttgcttctttgcggccttgttttatctgtttttgggcacatcatttcatgtttcaattggtgcgaatattttctctatttttaatatatttaattttttattttatatttttttatggaataaaatcatttaaggcacatttgcggttgccagtatgatggttggcaatactctggcgaaattgcatttgaatggtgccgataacaaaagcaatttgactacaaatggcacagagaataccacggcactttctggcgctgatctgaacccattggtggtgaccagtgcaatcacttttggagcgggactttttcaggtattaattaattaatagtcccaatcccttccctcttttggcttggtccctctcaatggctgcctaattgcccaatttttttgaataattaattcagcctaatcaatttatattctgttactcactccatatgaataactaattttacaatgttcagcttacaatggccgtctttcggctgtcttttctgaccgtttacatctctgatccgctggtcagtggctttacaacagcggccgcttttcacgtgctcgtcgcgcaagtgccaaaactgattggcgtggcatcgaaaccgtacggaggcccgggaatggtcattttcgtaagacatttcgataaattttatgacaataatacggagaaaaattgtagagaaattgaatttctttgtcagatgttgcgcgatttgtcactttcattttggcatgccaatttgtggaccgttggcatttcgctgtgcggcatcgtttttttgagcgttggccgcgactttttgaacccgcccttccgaaaacgttttaacgtgccgcttcccttggaactgattatggtaaggaaaaattaactcaatttattaaattccatttaaaattaagcaaattttaaatttaaattttaaaggtgatcttctcaatcggattctcagtgctgttcaaaattgaagaaaagcacagtgtcaaaatcataaaacacgttccaaatgggtgagtaaagcaaacaaatggacaatttttcaaagttttttcagacagtaa

SEQ ID NO: 75549 - DNA, 1449 bp, Heterodera glycines
gagtcgcctttcgtccgtcattattctatgtcctcatttggctgtaagttttcctctccaatttcccatttttattttcaatatttaagcacataattccgaagcttcgaccagcaccaattttctgctcggcactttttcgtcgcaccaaaacagcagcaaataccgcgcctacgcgtccgccgtggacaaagcgctcaaatcgtttgagtcgaccaccgaatgggccgatctaatcgcagctttgggaaaactcggcaaagtttgttagcgctttttaggccgagaattccgattttctaattaaaataactgaatatttattggcttttaaatgccgggaaaatgcaattctcatagatctattaataaatttttcgacggatgtgaaatgaggtaccgatagatttaacgaacttttatgaaaatcgggccaattttataaaatcttccgttaaaatctcattttctaggtttttgcgtccaattcaaagtcgttcaacgatattccaaatcctctgactgttgccaaacgtctctcccaatgtcttcaccccgcacttccatccggtactaatatttgtcataatttttctgtgtttaatattttgtcaacaggtgtccatctaaaggctttggagacgtacagacaagtgttcaacatcctcggacattcaggacacaatcagaacttggccagatcactgtttctctacgcaattggcctctttcccgtaaatttttttattgggtagtttctgtttctgaagtcgtacgtagttcagtaattaaaaacaaaatttaaattttttcgacaaatctgaattgtttatctttctcgagagcgtttcaagcacttttcatgaaatttcgacaattcagtaaaattgggtatcaaaagtgaattttttcaaaagcaagaccttatgataaaccgttaaaattaaaacgttgtgtagctgttttatgaatcgagtccctcccccaacctctccaaaccccccatttttcactgtttccaatttttgggtgcaattttaactactatatttgtaaaaattggtatcaaaataagttgtttttttttgcacaaaaccctgataaaccttttaaaattaaaatttattttgtgtatttcttttatgaattgagtccctcccctctcccatctccaagtcctatttccatagctaaattgcagtttccatcaattcttttattcagttgatcgaccactgtggcatcaaagtgaagtcggagctgttgtccatcttcgagcagtacctcctccccctgggcactcaccttcggccggccctccccggcttcatcaccgccgttcttctcgcacttgaggagggcaccgaattctatggtcgtgcctttcaattgttggaccaattgctggataaagtcggcaccgccgcgttctacacttgtttctggcag

SEQ ID NO: 75550 - DNA, 1854 bp, Heterodera glycines
tctgcgcttgcactgctcctctcgctgtctgcccatggcgccggtgctgaacactccgccttctacgacttgctcggcgtgccaacggacgctgacctgcgctccattcgacgcgcgttcaagcgcttggcgctggagaagcatccggacaaaaatcaggtggcaaaaaattaattaattaaatatttttaaaactatttttcatattttcgcccatttttaaaattttgaatttcctttaaaaataccttaactaattcgttaaattcttttttgacccggcgcacctcctaaccaaaatttaatcaacaaattatcaaaaagtttcattttggtgcaaaatttgttagcaaatctcattaaaagtgaggaatgtaacacttaataaatttatgcattttatacaatttcagtcgaaaaaaacattgtcttttgcgaccatttttaagcatggtgtccctattttgaactgtgatcggtgatcgtatctttgacctttttaaaaatatttttttccttaagaaatatgatcaaaaaattctcagggattttgatcaaatctgaatttaaaaattgccatttattcttaactaaaaatagaaacagcgcaataattttgctctgagctgttcttttcggtacagacaaaatttttaccaaattggaattacaaaaataaatgtccctgatttttgttctaaactccgatttatttataatcccgcatttgtctaaaaaatgtattggatttcttcatcattttccacgctttgttcttccaaaatatgaattcaagtgacttttgccgtttgtttttaacctatggcctcaaaattcgttaaattctcccctttcgtatgactcattttttgatttctgcttttttgagtcaaaattttcaacaaatttttctcttgtccaagaatgacccggaggcacatgacaattttgtgcgcataaatcgggcctacgaagtgctgaaggacgaggagttgcggaagagatacgaccaatttggggagaaagggttggaggagggaaacaacgccgcggggggctgggcacaacgccaacgccaacagcagcagtgggagtcgtgggagttttacaatgacaaatttggtgcaaaaaaacataattactataaattaaagttaatttaggcaataattattattcctgtaattagaccacaagaaaaatttgattaactatattacaattagtgaattaaaaagtgttcctttttgaaaattattaatttagtaaatcaattcttattttataaaaacattaacaggaaaataaattaaatttctgaaaagaataacatttatatattttttttaattaaaattcttttaatcaaattaaaatgcttgctttaccgtatacttttttaaaataaatttaagatttgaattaataaatgagtttttttaaaattaattatccaatttttgcaggaatttatgacgatgaccaggaaattgtcaccttgtccaggtaaatatgtgcgaggaacatagctttttatccacggtaatgggatcccgaccggagggattggtcccggccggaacccggaagcccggctgtttagacccccccccccctgattttgggtcccaattattatggcccctgttttttcagagcccgtttttggtcccgacttacccaagattattctgatccccgtttttcagacgcctttttaattcgactttttcaaaaatctttccgttttaattaaattttttaattttaggagtgaattggaggaagaagtgttcgaatcaggcgaagttgactctaataaaaagcattttgcctcgttaccatcactttttt

SEQ ID NO: 75551 - DNA, 84 bp, Heterodera glycines
gccggatcctgcatgtcccgtaaaaaattttgaattccaatcctgtgcaacaggatccgcaaatttgaaatttccggtctctaa

SEQ ID NO: 75552 - DNA, 2980 bp, Heterodera glycines
atggatatttatattattatgcaaaaaattctaaaaattttaatgagtttcaaaaaagttagcgtcaaaattgttgagccaacagctttttcgagcgtttgggcgaaccgaggttggaaaaagttggtaaattagtgggttccttttcgggccacaaattgaagttgttgggaagtttcaagtgtgacgttctgttcagaggagtcacaatgcggcttgaactttcagtggcagacaccgaagcgccgatcattatgggattggattggatcatccctttcgagcgtgccacccaacagccaattgccacgactttggagcaacagtcgctcattgtcaacagtgtgcaaccaacaaatgatccggtcaaattggaagggcaaatcaaggcttccttcccgaaggtgtttcaacctggcctcggacattgtgtgaagacgaaggccacgctgcatttgaagcaaaatgtgaagccagtgttctgccgtgcgcgacctgtgccgcatggagtccaagcagcagtcgacgaagaattggaccgacttttggactcgggagtgctgaagcccattgatttttcgcgctgggcagctcccgttttggcagttcgtaagaaaagtggtaatgtgcggatttgcattgacttttctacgcgactaaacgatgcgctggagttgaacaggcatccccttccgcggaccgaagacatttttcatgctctgcgtggagccaaagtgttttcgcagcttgatttgcgtgatgcttatctgcaggtcgaactggacgaaagttcaaagcagttagtcggcatgaacacgcaccgcggactttttcaatatcagcgtcttccttttggcataaaattggccccgtctatttttcagaaagcgatggaccaattgacgtccggtattccaggcgtgtttgcctatttggacgacatcatcattgcttcggccgatcactcgcagcatgttgctgctctcattgaactcttttcccgaattcaggactatggatttcgagttcaattggacaagtgccactttttgaaggctgaattgaagtttctcggacatgttgtctcgtccgatggtctgaagcccgatcccgctcgatccgatgccatccgtaatatgccgtcaccgcatgacattggcactttgcgctctttcctgggtgcactcaactattacggtcggttgtcaaggaaatgcgcgatttgcgtgcacctttggatctgctcttgaagaaggacactccttggttttggggtcctgatcagcagaaggcttttgatcaggccaaacaggttcttcaatcggatttgttgctgacgcagtatgatcctagtttgccgatcattgtcgctgcggacgcaagccaaagtggaatcggagccacgatcagccatgtgtttccaaacggagtggagcgcgtcatcgaccacgccagccgaacgctcactcccgctgaacgaaattacgcccaaattgaacgagaagcgttgtctttgatcttcgctgtgcaaaaatttcacaggatgatttacggtcgtaattttactctattaacggatcataagcctctcttggctatattcggtaataaaaatgggatcccgatctacacggcttcccgattgcagcgttgggccctaattttgtccaattatgattttacaataaaatatgttaaatctgcaaattttggacaggccgacgttttgtctcgactgatttctgagcaccggacagacgaagaagtcattgtcgcccacacatcggacgacgtggacagcactgaagaagtcgaatatgctcttcttgtcaacttggagcagctgccagtcgatgcaaaagaagtgagcgaattgacgacttcggacgatttgttgcaggaggtggcataattcgtacgttccgggtggccaaacaaatgcccagctaatgaattaatgcctttctattcgagacgtgatacgctcacccttgtgggcggttcaattttgacaggaaaccgagtcattgttcctgcgccgcttcgttaacgtgtactcaagacgttgcattttgctcatcctggcattgtgcgaatgaaggcgctggctcgcaaccatgtcttttggcccggtcttgacagtgacattgaggcaatggtaaagcattgtgcggaatgtcaattcgccgtcaaaatgccgccgaaagcgccacttcgaccatggccaattcctggtgaagtttttggacgtgtccatattgattttgcaggcccatgtgccggtggaaacatttacctcatcctcgtggatgcactttcaaaatggcctgaagtgatgcagatgcgcacgacaacagccaagggcacaatcgaagcattaaatttggtatttcatcggtatggtgccccaaaggaaatagtgtctgacaacggaccaccatttacttcccatgaatttaaggacttttgcaggcttaaaggcattaagcacaagttctccccgccgtatcagccgcactgtaatgatcaagccgagcggatggtggacacattcaaacggcaggcaaagaaaaacgcaaaatccaaaaatcaacaatggatttcggaatttttgtttgcgtaccggtcctcgccgagtccaattttgaatggtttttcccccgcagaattatttttggaaagaacactccgcacgcccttgtcaatgcttgaaccgagacagcacacgccgaacgagaacaacaaccaacgtggacagtaccaatcgaggatgtcacagcagtacaaccaacatcatggcacaaaaagccgttcattcaattcaggagactcagtcttagtcttgaattatggtaggagtggtaaaccatcatggttggaaggtaaaattgtgagtggtagtggtttgatttggaaaatcgaaattccaatccttggaattaccgtaacgcgtcacgtcaatcaaatgcgttcattttcc

SEQ ID NO: 75553 - DNA, 1847 bp, Heterodera glycines
atggcagggggcgctgaacttcacttaccgagtgggaccaggcctaaaaagcggacgaggccaaacggtgaaagtggaggtgcattccaagttggaagtgaggtaattagggggtaattacgaggaaaataaattggggaaaagtcaaggagaataatgaaaaatgaggaaaagccaaggaaacggaaaaaatatttttaagcgaggttagggttggtagaggtcaggaattttaactaagccaagtgcgaaagtgataacgtaaaacattgaaaatgaataaaaaatggaaaagaaaaacaatttattcacaaaaaatatttgtccaaaatattaattaaaatttggcattttgccaattaataaagtgaagaaatgatcaaacttttcattatgaagatgccattcccacattttccttgtaggcccattcaaaatgtgatcggatacatttggggcagtgaacggcccgacgagtgggtgatgctcggcaaccatttcgacgcgtgggttttcggcgccatcgacccgaacagcgggacggccgtgctggcggaggtggccaagggattggcccaaacggtgcgcaccaccgggtggaggccgaagcggacgattgttttctgcgcttgggacgcggaggagcccggactgatcgggtgggaagcactcactgattatgcataattaacaaaactgatcacacacattgacaaaactatatctagtatatattttaactttcactaatttttgatcatagatcgaccgaatttgtggaggaatttgcggatgttttacgcgagagagctgtcgtttatttgaacgtggataatatttccagcaatgtcacactgtgattgaaattgcttaattaatcaattattataatgattaagcaatattcatgctgtgccctcgctttaccaagcagcggtcgatgcgtccaaatcagtccaaaacccaaatggccaagggtcggtgtttggcccgtggattgagaattacccgtcgagaacgagttggctcccggatttccctcacatgggcatccccgggggaggcagcgaccaaaagtgagtgaattgtgtcgctttgatcactaatgagggcggagccgttggacaattaaaaaacagaaaatccaatttttttagatcttttctcgactttctgggcattcccgtgatgatgatcacttacattgaccccaaacgtggtcaatacccgctctatcacacgcgttacgaattgccatttgtcaacgaacacattttcgacaacaatcagttggcggtccgtttctcaaacatttttttttgcatatttcgaactcaattctttaaaattcaggtgcataaagccgtgggcgaatattgggcggaattggcacgtctttttgccgattcgccgcttttgccaatcagtgcgaccactttggcacatcgattattggccgactatttggaggggatcaaaaaagttgctaaattaaattcaatttgaatttcgttattatttattttattcagccaatcttggatttgagcagccaatttccgagtacgtgtggaccggcgaagacccaactggacaatctgatccaaaatgggcaccaatttatggcacaggcggaagagttcgaacggcacgcccaaggccaaagtgcgggtgccaatttggcccaattagcgtgggcaaatgaccgactgagaaagttggagcaatgttttgtgaacccggcgatgggactcgcgcgggaagaaccgctcaaaaggcacgtgctgttcgctacaggaaatgacaacagttacgcggccaccacactggcaaatgtttacaacaaa

SEQ ID NO: 75554 - DNA, 765 bp, Heterodera glycines
aaacgacctagcacccatttgaaggtgcatttgcgcgtccacacgggcgagaagccatttgaggtgagttacggatctttggtttttaaaagtagataaaaaacaattttttgttttattaaatggatgaaaaaccgttcaagtttaaaaaagaaaaattattttctaaacttattttttaacaaatgaaatggagtaatatttaaactaaataaaaataataattaaatgattgaatttaacttattttttgattaaagtgcgaattttgtgagtggagatttgcggagaaaggaaatctgatcaagcaccgccgtacacactctggtgagaaaccgtacgaggtgagttacggatttgtgcgatttaaaaatgaagtaaaatattttatgaacgcctgtttaaagaaaaaaataataaataaatattattattatttttaaatgttttattaagtgcactgaatgtgggagaacatttgcgcagaagggagctttgcacattcatcggcgtacgcacaccggggaaaagccgtataaagtgagttgtggatttgcggttttttaaaaagatacactaatatgatttatttgtttttagttttataaataatttgaattttaataatatttattaatttctgatcaattcagtgcaccgaatgtggccgagcatttgctcagataagcaatttgcatgtgcatttgaacagaaaaaaaaagtgcggaaagaaatgatcaaatggaatttggaatttgatttcat

SEQ ID NO: 75555 - DNA, 230 bp, Heterodera glycines
cccacaaaatgtccaagtctcgaatttgagttttttattattcagatgggcctaaggttaggcaaggggtaatataaagggtatattcgtatatattcgtattcagcgaccccgaaaaccctaaaaattcgaaattagactcattttgtttttataaattttgaaaaattttgttcgtgggtttttactcttttggacatttcgtggcttggacactttgtgggggcgcc

SEQ ID NO: 75556 - DNA, 91 bp, Heterodera glycines
gtccgaagataacaaattaaataagtttatttgccggagaaataaataaaataattaatgcagagaataaattggagaggtcaaattggtg

SEQ ID NO: 75557 - DNA, 91 bp, Heterodera glycines
caccaatttgacctctccaatttattctctgcattaattattttatttatttctccggcaaataaacttatttaatttgttatcttcggac

SEQ ID NO: 75558 - DNA, 1272 bp, Heterodera glycines
gccgttggccaccgcctcgttaccttcgcttctcaccggccaaaacggcaccgacacttccaacgtttgtgttttttgtaatgaaaaaatttgacccaactttggatccgttcttaatttctaccattgaaaccttttctggttaacttttctccacgtttttagttggtcgagctgaagcaggacccgggcattcgttctatgcaaaagtgagtccatttatagtgccgttatcaaagataggattacagccggaagagcctccgaatttgaaaacattgtcgtaaattattgggattcttaacgaatttcccgtttaacaataattgttacttaaccaaatcggttgaatttttcaaaaattttttcattaatttttttttgaaaatccgaaaggattttattatttaagacacaaaattcgcgatatttggattgactatttgataaaacaggattttccattttaaggtcgattacttctggtggtggctcttttttggcgtttgcaaagctattagctgagtggaagtggatagtggtgtgttttgctttacaacttgccttctaattgacactaaatatgacttttccagattaataagaaatttcaaggaaacaaatgaaaattttcactaattggaaaacattttcaaaaaaaaaatcataatgaatcttggaaaatcgctaaattacgattattttatgaaaattttcctgtttttttatttttctggggggacgaagcgcgtgaaacgtcctgctctgtaaataaacatttaattgttttagattttgctgatcgttttgcaactcgtgttgggtgttcttgcggctgacatgtccaccgcgtcgtgcaattgggacgtgaaaatgctcataccattcttgtcgattttgacggggctggtagttatttttggttttatttgggcgatcgttcatgtgttggtgaactccaaatttgacgttgtattggcaaaaatggaagcgatgaaatcggatcagagggcagaacttcgtggagaaatgaaaggaattcgtggagaaatgaacggaattcgtgaaaatatgaacggtctgcgtggagaattaaacggtctgcgtggagaattcaacggatttcgtggagaaatcaacggaaagttcgaaattatgaaaatcgaattgcgtggagacatgaaaggtctgagtggagagatgaacgccatgaagtctgaactcaatggacggatcaatgttttgcaagcagagatgaatggaaaaagatga

SEQ ID NO: 75559 - DNA, 305 bp, Heterodera glycines
  unsure (1)..(305): unsure at all n locations
agaacacaaaacancgcgctacacaaaacgacggacggcacagaagcgaaaggcgcgcgtgccgcccgagtgcgttcagctcccgtacagcacggcgttgatctcgcccatgatgtacacctcgcgcccgttgtacctcctggacaggtccttctccaactgaatgaaagggacgcaaaaattactacagattttggtatacaaattaaaaatgcaataaattaattaattccccgcaaaaatgtcatcaattttatttgagtattttttatttctttttgtttaataaatgcactttgtaatat

SEQ ID NO: 75560 - DNA, 1671 bp, Heterodera glycines
atggaccatttgcccattgacattcacagcaataagcttcttggtgcgtccatgggatgggtttctttgtcttggaattgtatcgtctctctcctctttcaatccctcagattggctcatttcgcgtcgccattgccacaagaattggcgtgattcggtcgagacgattcgggccaaaattggacatgccattcaggacatgccggagaacgagcagatcttggccattctcagcaacgcacaatgtgtgctcttccgaattcaatgacaatacataattatacgaaaaattcaattaccgttttgaattaaccctttgaaattaatccgtttttaaaatgaatttttgcccctttttcagacatcaactatttccattgcaaacaaattgtggacattctgcgcgacactgaaaaggagacgaagaacattttcgggatgtactcatcgcaacggatgaaagattggaaggtccgttcatcagattgtgccaattcttacaatatttttccattgccattaggagatcatttcactgtacgaaaaggacaacgtttgcctggcagaggcggccaattttctgcaacgttttgtccaatatgaggcaatgctttgaaaatttggaaattaataattaattttccctaaaggttcccgcgctacgcaaacaaattgccaaggccgagaacacgtcaagggtgggccaaactgggatttgaaaaataaaattggaattaaaaataccattttcggagtcggaacgaaaggaaagggaatacgcaaagcaagcggcggaagtgcgacgaaatttggacaaggaattggccaaatgggcactgcccgccaaagtgaaggacttgcgggccgaactgctcgccgtcgcatgcgcaacggaaccgacggaattggccaccgtcggcacagaattgggccgaattgtcacgtatttcgacgccttcggcacttttgtcgagtgggacggcattccaatttactcatttcaatttgtttgtccaaattcagcaaacacttggaaggaatgttccccgtcacacgctttctcctcccttcgcttgtcagtggcgacgcaaaacggccgctcagcgaattgtccgttttcgaatggcgccacggacagagaccaaatgccgtactcgtcgaacaattcggcgcagcaccccacaatcagtctcccccgacagatgacggacaaataacagccgccgatgttggcaattttaatgatggacgactcttacaattaccattttattccccgtttttaggacgatgaaattgactttggcgatgatgagattgatttttgtctggatggaaatggtgttgttgagtgcgaaattgagctgatcaatgacaagactggggacggcgtaaagccaaaagtcggcggcggtgccgttgcggcggacgacggaattgcccgaggggaggaggcgctgccccttttggagcatttggaagtgcggacagagtttttggacgagttggaccaggtaaaaaactcaagacgcgaattcgaacaagatttgtctaattaattgatagtattccattttatccaacatttactcgcccctaaaaaaactatattctcagaattttttttttaatttaccattgggacatctctgccggcatataattaataaa

SEQ ID NO: 75561 - DNA, 1210 bp, Heterodera glycines
atggttttgcagctgtcaatgatcggcaccgacagggaggcggccacttcggccggttcgatcaccacacgtctgctcggcaaataccaacacgttgaacatgtgatcattgtcggcgtggcggggggacaggcgcatttgactgaccccgaaatggtctccgttcgctttgctttttcttcctttaacaatgcatttatgaatgttaaagcatattcgacttggcgatgttgtcatttcacaagaggaaatggacgaacattcgacggacggacgaattggggcgtatgtttatgcacacaacattggtaagacgtacatggcacaattttatacaaatttcattttactgattcagaatccgaccccaaggcaaaagaaatacgcttcgaagtccataatttgtcgccaaaagtcaacgcattggctgcggctgtgcgaaatgcgtaggcaattaattaattaattgtccgtttaattaccccactgttttttattcccaattcagcaataaaccgcgctttttggacgcatggcatgcgaattcgcagtcgctaatcggccgactgaatgacaaacacagggaccaacagttggacttttcgcgccctcccgccacatccgatgtcattctccagctgacgaacaacggcaatattttggtgttcccgcatccgaatgagtcccgcaccaatccgttgtaccatttgggtcccgttggttcaatggtccgtccatttcatgcatttgtgccaattttaatttgcaatatcagacatttgttaattgttttgcaggtcaccttctacaaaaggccggacgaagacgaagatagcaacaaaaaacagaaaccgccaacgccaccgctaaaaccgacgaatcgttttagttttggcaaaggcaatcaaaatggtccgagcgtggacaacacaaatggcattggatcgaagtatttcaaaaaaataaattgatttttgatcaaattcattttagtggaccaatgctttctcctggaaatgttggcgatgagtcaaacgattcggaagagaaagcgaaggaaagcgcggccgacacttctttgaacagcgaaagtgccacggatggcagcagggacgtgcgactcgtcaatgaaagactgcgcgaaaagtgcgggggaaatacgggcaaattgaatgccaataaacttcacaattcctttcaaaaccgttag

SEQ ID NO: 75562 - DNA, 660 bp, Heterodera glycines
atgctgatcaaaaaaggtagcaacaccaagttgatcagatcactccttcatggtgatctgatcagcccattttggctgggaacgaggggtaaatttcaaaaaaaatttctagggggttgggaaaatttttctggaaattttgagtaggcccattttatagagcacaaaatttgctaccgaattgcctttggaatagtgggtctacgatttaggcccgctgagatacgtcgacttttattttggtgcctataaaaagtactgtatttcttaagaaaatagtgcattttacactacgtcaaaattgaagtgcccatacctcagccggtataagtcatagagacatgcggttttttgaatattgtagagaattttgtgctctataaaatgggcctactcaaaatttccagaaaaattttcccaaccccctagaaattttttttgaaatttacccctcgttcccagccaaaatgggctgatcagatcaccatgaaggagtgatctgatcaacttggtgttgctaccttttttgatcagcatccaaagttatgcttacctgaatttttttaatgctgatccagagaagcaatattttaaaaatgaaatgggacaacacttttgaccacctatattttgatcaaattgtgaatatggtaaaataaa

SEQ ID NO: 75563 - DNA, 66 bp, Heterodera glycines; identical to SEQ ID NO: 53774

SEQ ID NO: 75564 - DNA, 143 bp, Heterodera glycines
cactttcgcctcgcgcggcagagggcgtcagggcatttgatgagagcgacggaagagagagaaagagaccaaatttataaccatttttttgaatttgttttgttgtgtcttctctatttttctttttgcttaaaacacacaca

SEQ ID NO: 75565 - DNA, 568 bp, Heterodera glycines
atggccgagaaggtacagcccgaagcggaagagccggtggtaattgtggtcggtggaatagcacatggaaaggtgcgtgatcctttctggatcgcaatttaatacctctcccataataaaacaccaattttgtgcagattagcaccgattacacggaggaggacatcaaaatttcaaattatcctttaagcgcgggtgagcataataaatcggtggcccaataaattgttttctttattttgtttttagctctctgttgtgccaaattgacaagtgcttttgagcagttgtggggcgtcctttgacgacacatttttttttttgttttttttgttgttctttttaatatttttgcataaattaacaatggataataattgcttaaaaaatgctttttaactaacagtaaatccgaaatgagaaatagcggtaccaattcaccatacaggccttggtctctttttttaaacatagccaaaaaatacaaatttttaggtgcaaaataaagcgatgtgtggcacaaaaactgaatagaattctcgcaccaaatctttttattacgaataaa

SEQ ID NO: 75566 - DNA, 238 bp, Heterodera glycines
atgacttatgtttcggcccaagcgcacaatgttttgtcggacattgacaagaagttgcatgagaacaatgcgttcaccaatttgctgggcaaaattgagaccaaaactggcctcaaacgtcttcacgtctttggaggtttctaccaacccaaatttatttctaataatcaaaatttcgttaatttggcaatggtcaagaattggtgtcccgacgaaaaaaatgtcaaaaatttggcag

SEQ ID NO: 75567 - DNA, 285 bp, Heterodera glycines
atgcaaaccacctgtggttatgcttttcaaatcgcggacattggcaatgcttcttcttccaatccgtcgccgaattcggagccattggcgcaaattgtccgttggaattgggaccaaaatgggacgcaacaaatcattgaagtaagcaatttggggtaaaagtgaagaaatactgaagggattggaaatgtattttatcgaaaatcataaaaaaaaaactagccaacatttcaaaaaaaaatttcacaggggcgtctatcggctcctccggccctctgcttttaa

SEQ ID NO: 75568 - DNA, 83 bp, Heterodera glycines; identical to SEQ ID NO: 69364

SEQ ID NO: 75569 - DNA, 348 bp, Heterodera glycines
atggccgagtcggaggagaaaagtcggcgccaatgtgccaacaacaacagccacaacaataatgatggaagttccactgcagctaatgccgaagctggctgtgccgcggatcagcaccaacgacagcaacaatttgacgatttcatgtgcctggactttggcggtgatcagacgaagacggcaccagaaaggcaacaacgataaaacttcatctgatcacgcacaacaacaacaacaaatgaaaaataatcaacactgatcatctctttgatcattcgttaccatttggggggcgggggtgattgtgtgccaacatttatggctttggctgtcaaattgcttaataaa

SEQ ID NO: 75570 - DNA, 1517 bp, Heterodera glycines
  unsure (1)..(1517): unsure at all n locations
caaaaggctgttccatccgtggccttcgctcatcaaaaattggcaacttttggcagtcactcaccccgcctacatggcatttatgacttacgaggaggtcaagcagcgcctgcagcagttcagcggaaagcccggaaggtgtgaatggtcacaaagcaaaggcatttgcccgcgttttaacaatgcaaagcaaagcataattttttgcatttaaatattaataatttttggttaaaatttaaatgaaaaaataaatcaagttaaaacttttttgaattaactctgtttttgtctcctttgcttttgagttttcttctcttgttctgattatatctttttaaccaaaaggcatcaattttttgcttaatttagtcattttttacctctaaattattattttttatttttttggaattgtgcttaaattccaaaaccattagttatctgttccgactgagctgcactcggctgggccaatgggcaattggttacgtggcgccggacggaaagatttaccagacaattccgcagaacaaatcactcatccaatcattggtaaaattgtcgcggatatctctttttcattgggttgatcttcgatggaaatccttcccaattttttgtttatccaaaattcatggcctccgctcgttgtacgtttccatctcgacgttcaggtggacggcagcagggagggcttttacctttacccaaatggtcggaacaaaaacatggacttgtcctacgtgtcgcaatttcctcccgagtcgggcaaagttcaggtggggtttatgttatttagttgtcacattgcttaatcggactcaaccggcacgatcagcagggctgcaaaaaaaagcacgaaaaatgaccagaatatgcacataaatatgcaaataaaattgccaaatatgcacaaaaatcgcaaaatatgcacaaaaaatcttaaattaggggtgcaaaataaataaaaattttattcctcataaattatatcggttgtttttgtaattgtaaatcaaaaatttctcaaggttttcggcagtgaaactcactgttgacccactcgcgcatcaattcagatttggatttaattttaggcattttcgaaattttttcctaagagatagtgaaatctgaaaaatttgacgaaaaatggcaaaatatgcaaaaaatctgaaaatacgtacaaaaaatggcaaaatatgcagaaaaatccaaaatatgcaaataaaagtcccgatttttatacgcaaacataaaaaagaaagtgtttttcctgctatttagagcatggagaagccaggaaaaaaatatgcatttgcatattttttgcagccctgctgatcagtgaccgattcattcgcaatttaattctatcaaaatttcccaatccgcttgatcatttctgaataattctgaattttgtgccaaattataatttttagatttatgntcaaaaaataattattttatatgtagaaaatgatgcaagtaaaactcaccaaaaataaaat

SEQ ID NO: 75571 - DNA, 1115 bp, Heterodera glycines
  unsure (1)..(1115): unsure at all n locations
atggatctgttcaaaagcgaagaaatcaaaaaggcncaaaaggacgatgaaaacaanaatcgaagaattttccaatatgaatattttgcaaattatacggatgagaaggcagcggctgcaattcgccggatgaaacaggtgttattttcaaattaaaaataatcctttaaaattttaaagggcggaaaaatcatttggccttcagaaaaatctccgaatattttgatgatcgcctggaaagtcactaatgacattcatcaagtgataaaagttgaggagaaggagaagcgacgtgttttcgaaattggcaaaaaactgttgatgaacggagaggtcggagcagggagagagggggggggggtgacacggggtaaagtcaggcggtgctatgactccggtttggagatgtaacgccaaatacgaccttttttgttcttaggacagccaaaaaaaattccgctttgttttaaaacaaaattccaaagaagagaggcttccgattatgccgggtcacttaaatttatagtcatccctcggggtgtctgaatttctcaaattgatacctgctaattgtaagatgactggattcattatttatttgtgttcaggttttcgaggacgtagatgagattgttacacgatgcattgaaccgatggccaattttgcagtcgatattttgcgctatcgttacttcatggagtcgggttacgcccaggaggtggttgacggttacctgcgagatcaaaagcgcgctgctcctcaacggatcccgtaagtcaatttaaacactatttcttatggttttgcctttgtcagttacgttatcactgccctccgggaaaggcccgggcgttttatgctttcttatttggccggttcaacaccacggaacgaatcaatgagcgtgactccggatgggatcaaattccgtggccatacatttgcttctacggaggactgtgtcaactggtttaaagtgagcaaaatttaacaaatacacaacacattcattcgttcatttttgaatttcagaatgaattcgctcgtcggcagcaagagatactgcaccaacaacgatagttttgcattttatttatttatttattcagaagaa

SEQ ID NO: 75572 - DNA, 84 bp, Heterodera glycines
atgcaccccaaactgttcctcgtcactttcgctgttctgcttgcgcttctgtcactggccaatgccattggcttccctccggag

SEQ ID NO: 75573 - DNA, 847 bp, Heterodera glycines
atgactcgcttcaccaattgtctgatcactttggcttttctgctgatcacgatcgtttccaccattgatggctttggctttccaagtggtggtagcggctgtgggtgcggctgcagcggtggaggcggcggcggaggagggcacggcggatgctgtggaggaagtggaggcggtggacacggtcgcaggaagcgcgatacggacgcggttcaaccacattacatggcggacgaaacgccatgcccacaggcggcgtggaaagccattcttgaggaggtcatacagtcgtaaatcattcgtagggcaactaatgccgccaatttacagtcgattagcccggaagatgccattgtctctgtgggtgccatccaaactgctttgtaccgccgctataccaacgagcagaagttcctggtcacctgctcggcagccgacgtggccaaaaacggcacagcactggcaaccaataaagtgcacttcagttcatccggcaatggttactgtaacatggtcaaagagcgcatttggtgccaggcggtcgcattgcactcatgaacggattcgttgcgaaagattttcaaaattaataattttaaaatgtgagcaatacgtttttgtctagttagtgatcttctctttgtatgtcgcagtgtattattatattatgtatattattattatgtatttagttaaaattacttttaaaatttgataattaatatacattcccttttgttaccattttgatgctaattaaatctttgaaaaatgcatgtatttattacacgaaagttagagatgcttacaaattgattaattgctttgataatgcgaagattgagcatta

SEQ ID NO: 75574 - DNA, 1098 bp, Heterodera glycines
atgtctcaacttttaaactgtttaattgcgctgaccattctgtcagttttggtggccatgacagatgccattggcatgccaatgcaacaatgctgttgtcccatgcagcaacagtcatgctgtgggggtggaggaggcggaggtggcggttgctgtggccggaagaagcgtgaagcgacggcattggaagcagttcagccccacttcaaatcggacgaaacgccgtgcccacagacagagtggagacaagtcattgacgaggttggcaaactgatcacttatccaatcattggcatatccctaattgcttgctaattttgtagagcatccgcaccgacgatgccattggctcggtcagtgccattcaaactgcgctgtttcgtcgctatgccgaccagaagttcctggtcacctgctcggcagctgatgaggccaaaactggcaccaacaaagtgcacttcagctcatccggcgacggttactgtaacttggtcaaagaacgcatttggtgccaggcggtcgcgctgagcgcgtgaaaaggattaatccgatgaattttttcttagtcaaagttcaaaaaaaaatagattccattttgtaactgtgcaataacattttaattttcttatataaatttatttagtgtttaataatttttatttttctattgaactattatttggattcataactttgtgcctcacaaattagaaataggtaaatcatttttcaggcaaaaattgacacactttttttcaagagaaacaattttttggagtgcctaaagttttttatattagcttacaaaacccaaaaaattgatataatgcgttttttctgctataatttctgcctaatagagaaatctcaagctcttttgactagggttcggaccccgcccccgtcacccccgcacccgccgggggcgggacaggttttttggcctcacccccgtccccgcgactctgaccccgcccccgcgaccttcgcccccgcgagggcgaaaatacacccctaagaatggcatattcgtgggataaaatgcaaaaatttatacaattttgaattttttaaccatctttgacaatttttatgaaa

SEQ ID NO: 75575 - DNA, 219 bp, Heterodera glycines
atgttcaacaatgaaattctgtggagtgaaaaccaagcagaggcgggcgcgatacgcgagcatggtcagatgttcgtcgggggctttgaagtgacgccgggaacaagaatcggcggctttgagatggtgccgggtccattggttcgcggtcaactaatggcttttattaatgatctgaatgatcgatttcggaatgctacggattatgtggagctggcg

SEQ ID NO: 75576 - DNA, 600 bp, Heterodera glycines
gctgagtcattaatattcaaaatgtttttaaatgccattttaatgaaaaatggaatggttttcttgcgaaaaaaagtccaaacaaatgcattcatataatgaaatcagtctttacaaaagcaaaaagctttaaattcaacaaaaactgaataaaatttgaaaaaattctacattttcttatgaaatgataggagcattttttcgagaaaataattctcgcgagatcggacggccggctgaatcaataaattgcgcacaaatttattgcatgaatggggtgcgagttgaggagcattttggggatgggtgaatttggtgctgatgttaagtgaataaatacggaaaattgaacgatgaattattttattggtgaagtgtagggagaagaagtgcagcagctgtcggcggacggacttttttggaagttgtaacaattataaaaaaataaatatattataataaaaaattttttaaaaaatatttaaattaaaaaatgcttcctttattagtcaaatatttttattttaaaattttaatgttaaattgtcactattattctttttacgacaatatttcaaacatttatccataaaaaatgat

SEQ ID NO: 75577 - DNA, 267 bp, Heterodera glycines
atggcacaacaccaggaatcgttgatccgtcagaattttgcagctgaaactgaagccggcatcaacaaacagatcaatattgagctgtacgccagctacgtctacttgagcatggttccattaaatcttctaaatcgctcagaaatttcttttgttaagtccttttacttcgaccgtgaggacgttgctctccacaacattgcgaaatggttcaaaaaacagtccgacgaagagcgtggacacggcaccactttcatgaaataccaa

SEQ ID NO: 75578 - DNA, 1820 bp, Heterodera glycines
atgaagggaagaccatctaaaggggaatgggagcatatttatgggcgagggaaggaacatgaaatggaacagaaatcgattggcattatgtcatgtcattcaaactacggcggcagtgccccgaacaattttgtaagaagtgaacgctaatttgacaaaattcattagaaatagggtacaaaatataaaaaagtggcatttaaaacatataaatggtaaaaataacccagctgatttggcgtcaagaggaacatcaatggaagaactacaaaatagtgaaatatggtggaaaggcccaaattttctttcagaaagggaaaactcttggcccaaaacaatacgagaatatgacccaacgaatccaccagaaataaaggaaaaacaaaatgttatttttgagataaattcagctattaaggaaaaggatttttgtgaatttgaaaaacatttcgaaagattttcaaaatgggaccgtttaaaaaattcaattgcttacgcacttcgagcctttaaaaaggaaaaccaaaagaaggtttcccaaaaatatggaaaaaatttcggatatcaaaataaaaaaaatggaaaggagataacaaaagaaattattaaattaattaggcctttagaggctaaagaaatccttaaagctgaaaagctgattttcaaattaatccaaacaaatttgtctccaaccaaatctattataagaaatttggatttgttcaaagatgacgatgatttatggcgcacaaaaggaagaattttaaaaagtggtttaaattatgacactattaatccaattttcattcccaataattcatatattgcgactttattgatcagagatattcatatgaagacaatgcatggcggtcgcgaattggttaatagcaaattgagagaaaatttttggattcctaaaagcagaaggaaaatttacgaaatattaaaaagaaaaaacaaagaaaaatgcggaatttgtgcaaaatttgcaaataataaatatacatatcctaaaaaccctcccctaccagtgtttagagtaaaagggaaaggtgcatttgaacatgttggaattgattattttggacccctctccgtaaaaacattggatggcaataaaaaatgttggggagcaatatttacgtgtttaattgtaagagcaattcatttggagttagtttccgacataagtgccgaaaaatttcttttagcatttcggcgattcattaaaagaagaagagtgccaaaattaattatttccgataatggtacaaattttgtattagcaaataaagcactaaaacaaatagtactcgaagaaaatatacaaaataaattatggtcagaaatttatcgtgatccgacggtacaaaatttttcatcaaatttgggaattgattggcaatttaattcgccatatgcgagttggcgcgggggagcttacgagagaatgataggacttgtcaagacacatttaattcggagtttaggaaaacaattattgagctttgaagaattaatgacatatttaatcgaagtcgagaggattgtaaacgaacgccctttaagctatataacccaagatgaagtgattgaaccattaaggccaatcgatatattaaatccgacagatggagaacctttctcactaaaattggatccaacatttgatcggaaagacgtgaatgaatattttgaaaagaaaactaaaagagaataattatttgaaatttacaaaaaagcaatttttaaaagcgaaattttttggaaggaatggagtgaaaaatacctattatcgttaagagaaaagcacatca

SEQ ID NO: 75579 - DNA, 372 bp, Heterodera glycines
atgcccattccaactgctcacgggtgccacgcatgcccattccaactgctcacgggtgccacgcatgcccattcgccaagccctcgggttccaactgttcacgggtgccacgcatgccattcgccaagcctcgggttccaactgttcacgggtgccacgcatgcccattcgccaagccctcgggttccaactgttcacgggtgcacgcatgcccattccaactgctcacgggtgccacgcatgcccattccaactgagcacgggtgccacgcatgcccattccaactgctcacgggtgccacgcatgcccataagccaagccctcgggttccaactgctcacgtcagaaagaatttcgaaaatttttcctaa

SEQ ID NO: 75580 - DNA, 51 bp, Heterodera glycines
atgactttctctttttgattgaaaaaattcgagcaaagatggaggaaatat

SEQ ID NO: 75581 - DNA, 294 bp, Heterodera glycines
atgaaattcgttgtccaaatatctttttttgggtttgtaggcgaaatgaatgattttggttagtaggcgaaatgtatttacaccagggatgtgccgagccagacaaaatccgattccgattacgttccgatttttttaaaataattttttcccaaaaattttattcataatcaaaatcataaattttaagattgtgatgcaaaaataaaagtttgtccacattctcaggcaataaacgttttctcagatctgtcacaatcaacccagcggtggagaatatttccagatatttga

SEQ ID NO: 75582 - DNA, 613 bp, Heterodera glycines
atgtccatggcaaagattgtggcgaaaagcatcacagcgatggggacaatttgggatttggaacatataaaaagattgtaagattgccaattaatcaaaaaacagaaaatttatcaaaaaatggcatagaattcgcatcttttggaattttaaaataggctaacgaaaatgtgaattataaaaaaattttagattcagaaaattaccagtttttgtggtatcgtttgagaattttgtaccgcttattttttatacaattaattcgaaaatcaatttaattaaattttttgttattttttgtccattgaaaactgtattttagcatttacgtagacacaaaagctttttttgaaaacctagatgttactaaaaagcaaaatttgtaaatttccagaaaaaacaaatgaaaattttttttatttcttaataactttttcgagtaggctaggaattttagatatttttgaaatttttggaaaatttataattttttacggcgaagttatgtcccggtgatatttcggccggcgactttttccggtgacgttttgtcctgctcccccaaaaaacacacaaaatatgtcctaaaaaatcaaaaaagggaatattcaaa

SEQ ID NO: 75583 - DNA, 725 bp, Heterodera glycines
atgaacagcaaaatatgccaaatcattaagagtaaggacattacgaaaatagttttattaattgagacttgaaaagagttgccattaaattctcctaaaaaattgacacacttttagattaaaaaaatgaaaatagcagaaagaaaagataaatatatcttcacaaattggggaaaatttgattaagaaaaccaaataaaaacaatttgcctgattaagttaagtcacattcatttgctttgcgagtgtcggcgccgtctcgaaacgaataatttgatcaaaataaataaatcaaaatgatcaaatttgacgaacgtaaaatgcaattaacacacacacacacacaaaaaaaatatatattttaaaagtacattaattaaattgaaggataattaatttaaaatggtagtttaattaaatatttatatgaccaccaaaatttaataaacgtaaaaattgacaaattaaaaaagaaaattgaatgagaaagataaattttgtttaatatgagaacctcaatttttctacatcaattagagcaattacagatacaaaaatgtatgtgtatagacggcattcagtacaaattgccgaagtgcgtgagaaaattcttggaaaatgtgggcatcatgtcaagagggaaaaagaacaatttaattaataatttgtaggccaattttatgtcccaattattgtaaacaaaaattcgaaaaaaaattaataaa

SEQ ID NO: 75584 - DNA, 102 bp, Heterodera glycines
aatttctcaaaaaaagagatagccatttttctgggatagagtataaatttacaaattccctcaaaaataaaaggtctattgcgcaccgccctccctatcatg

SEQ ID NO: 75585 - DNA, 322 bp, Heterodera glycines
atgacagtaagaaaaaaagtgacagacgggggcggacggtaatgggagggagagggacactttaatacattaattgctcaattagtaagtaattaacgtgaagggcgggcggcggacggcaggaggggcgacgaacgcacgtcaattaaactgtgtgtatgtgtaaattaaaagtataaaccggtccaaacggagcaagtggggaatataaatgaaatttgtcaataaaattttcattttccaggtgcgcaaatgaatggtggtgggctggtctaaatggaaaataataaaaacaaaatgggaaataattgggtaaaataaa

SEQ ID NO: 75586 - DNA, 1115 bp, Heterodera glycines
atggatcggaagggacaaaggggtaggtaacttttttttgttgaaaactgtaataactatcaattttaaaagcaataagagaccaatggaaagcataaaataaaataatttactttatttaatgtgtaacgggtttaattcaattattttggtttatttgttaacagtgttgaaaattattatcaacatcgcaattcccacccgataatccactggcaaattgagaaacagcccatcagaagggcaacatttcgacaatgttgaacagaaagtcgggcccgaaatttgccttgacggagtcgttcatgtccacgagagtacagcacgcatacatgttaaacgattcggcttgcaaaaattggcttgcttaagaatgaaacaattcgaatttgttttgttttttgaatccattcatttactcacaaattttgtggccattcaatgtgaaaaaaataccccggttgtttgcgtccattccgcatccgacaacatcaccgggaccaaactgtgcgaatccgtcaagcacatccggcacgcatggcaatttgctgtggatagacccgtcactccacaacgcaatgcttgcctcaaaatgcccgaccaattcatgcatcctcatgtgcgctggggcaagtccaactccaacgtcccttaatattatcaaacttattttaaaacattttttttaattcacgatttcatctgaagaacggtaatttcaaagttaaacaatccaaaagcactggtggccggcataaccgagcgcaccgacacaaaatcttttaaaaaaaataaatatttatttattttattaatattattacagttattttgcgacaaatgctcgaccaacaaaaaatcataaacgtaaattccctcgttgcaatgattaatgtcccagctgtttaattgctgggccgcgagaatggactgaaggcaaattttgatggcttcaacagttcgcgtcagattattctgaaaaaatgaagagggcgaataattaacaatataagaaaaaatatataatttttttattcaattaaatttaatgtctcaaaatcgtggccaaattttcttgcattgattaatttggaaaaatagttaagataattaaa

SEQ ID NO: 75587 - DNA, 2755 bp, Heterodera glycines
atgtactcagtgttctccgaactcgtccgagatgctttttacaacgactcgcgctttttgaccgtcagagacaaagcatttcaagaaatggtgaacaacacggaagtgttcagattggagttggacccaaaccgaacgaaaaaggttgaaaatgcgcaaaagcaatttttaaaataaatactaaacagtggacgcacagcgaacatcgagtcaaagtgccagaattgctagcaaattattgcgatttgttgctcagaaagtcggccctgacgaaaaagttttcttctgaagagatcgacaagagagactgaacaacgtggtgagttagggcagggcggtccaatggttattttacatttgaagtacaaaacggaaaagaaatttgactttctttttggtgttgttacgtattccgcatatttcgccacttcgtttttttagcttttggtgctgaaatatgtcacagctaaagatgttttcatgcgttatcataagacgcacttgagccgaagactgattctcgagttggtggccgactaagaaaaggaggaaatgctcaacttggccctaaggaaatcgctggaaaatggcagctgcagccaaatggccggttgacggaacactgaacgacagacattcattttggtttttcagattgtgtaagcgtcaaaattctgaatgccggagcatggtcgaggagtcgagaccgttcgcacctgactttgccacgggaattggaggatttgaccccggaagttgaggacttctacaaaaaaagcagcactgcggaggaaagctgaattgggcccaccattggtccacgggggacggtaattagcaaattaacattgaaataaagttcacaaatgccaaatgttctgtcgaaggtttcgttcaccagcagagcgggaaggttcgacttggaagtgacctctcatcagatggccattttgttctgttggaacgacagacccaacgacaaactttcctttgcgacgagtcgtctcgcgactgaattgtccgagggcgaattggcgagaagtctttttggtccgttctccgttttggctgcttttcactgctttcctttctttcagactggtgaatttccccaaagtccgaatgcgactgatcctttgcgaaatcgcccaacaaccgttgaccccaaaaaagcttcaacgagccggcctcgggtgttgaaatgttggcaatgcttcacgccattgttccgaaaaagccattcctcaagggcgaggcgcgaattgcatgcggatgacgcactttactggtggatgttgactttggatcggatcgcatgcacaatcggagtagtcaattggaaatggcatttctaaaggcacgcgggccttaacttatgaggtgaatgctgtacggtcttaccatatctcatctttaatgattgctaataaaaaaagattaaatctttatttcgcgagaaatgtccgtgagattaagttgtaaagtccaaaggcaaaaaaaaaaaaaaaaggcttttaatgttccggcggaaaattttccgattatccgttacgacaattgctcatttccattttattttttatcaataaaatgtttaaatattttaataatttagaatgattttaattggcttaattattattgccttcgtgactttttgtcttctgttgagtttcattgggtttaggggtattttttggttatgctgtcacaaatgataatgattccttttttaagctcgttcgcgctctgcctctgtgtatgagcgctcccgtcgtgtttctcaaactggcactcgcgcacatgttattgactttgatgaaccaaatacaagtgccggagcaaaccctgttcgtggtggcggtggtgggcgttttccaattgacgatgcaatgtggttgtccatgtttcgccgcttggtgggtttaatttaatttaatttttacttaaagtttatatttttttttgacaaaaaaaattttgaaaacgaattttttaaaaaataaattctattttaaactttttttaaaatttatttatttatttttttaaatttattaatttatttttattaatttattttttatttattttattttaattatcttaactatttttccaaattaatcaatgcaagaaaatttggccacgattttgagacattaaatttaattgaataaaaaaattatatattttttcttatattgttaattattcgccctcttcattttttcagaataatctgacgcgaactgttgaagccatcaaaatttgccttcagtccattctcgcggcccagcaattaaacagctgggacattaatcattgcaacgagggaatttacgtttatgattttttgttggtcgagcatttgtcgcaaaataactgtaataatattaataaaataaataaatatttattttttttaaaagattttgtgtcggtgcgctcggttatgccggccaccagtgcttttggattgtttaactttgaaattaccgttcttcagatgaaatcgtgaattaaaaaaaatgttttaaaataagtttgataatattaagggacgttggagttggacttgccccagcgcacatgaggatgcatgaattggtcgggcattttgaggcaagcattgcgttgtggagtgacgggtctatccacagcaaattgccatgcgtgccggatgtgcttgacggattcgcacagtttggtcccggtgatgttgtcggatgcggaatggacgcaaacaaccggg

SEQ ID NO: 75588 - DNA, 1184 bp, Heterodera glycines
atgcgcaaagtaccagctaatgaaaagctaaatgcattgaatcttgctttgaataaggaaataatcaattattttaattataaaaagtctgttgagaaaaacaaaaacaatatttttttactcaaagagttttccgacagttatttaaagctgtgggaatttgtcaaagaactttactttggtaagcaatcgaaatttcaattaaattctttgtgtttttagagcccggacgggcccgggtgcccgccgtgctttgccgggcccggaaaattaaaaaaaataccgggcacggtaaaacgggattttttgacagggcggcacggtcccagtcaattatctaagcccggtcccggtactttcaaaataccgggctctagtgtttcacaaataaaaatttgttatttcatagatttgtcaagaatttgtgcttttgcacgggaatataagaaaaaatatgttgacggattaccaattttgaagggtttatggtttatgaaaacggaagcaaagagtgcgtttgattttacactagccaaaacaattgggcaaggaaactaccatgtttgggaagaggaatttggcaaaatgtattgggatcacataatgctgatcaatgcgcaaaaaatgccgaatttcaacgagttgaagcgtgtgccggacccatgtgaggaggcaaagatcaaagtgaagacgcgtgggacaattgttggatgaatagtgagtgatccgaccgaaatgggagaagagaagccttagggtttttctgagttttaatcatatttgttgattttaatatgatgatgtaaaatgattttactttggataaacagaattgctgagagccgagaatactcgtatgccaatattattgagaatttcataaatttgctgaaattttcttcaaaatttcagcagtatgtatttattttttaggcatgccaaattattagggatgtgcgagagtctcggttctcgactcgggaaatttcttggggttttcacttcttggttcccggtctcggatttttagtctcggaaaccgagaaatttttacactgttaggtatgaccatttcgtggtgggggacagggctgtgcgaaaatcacaaaaaaaatttttcgtatacgaaaacgaaacgaaaaagctcattcgatacgaaaacgaaacatgaaacgaaaaataaa

SEQ ID NO: 75589 - DNA, 463 bp, Heterodera glycines
atgtgcaaaattcctttcatcaaactgtcccttcttctgatcatcttgatcgaaattgtcaatgttgcgaatggaatgaactataaatatgaaaagttaaatgagccattgctagaaaaagaagacgactctgatcagccgcaatttgaagtgatcgaagatggcacgacggaggaggaagacatggaaaaagcaattaaaatcctcaaaagattcttttggcgagttataatggcaatgaattgcaaaaataataccattaaaaagccagaagaaattggattccaaaaatcttataaagaattggttgaaatttgcgaatattggaaaatgttatcaatagcagctgaagcatatgtgaaaagttgggagagatgcagaaaaggacaaaaacaggagaaggaagttgaagttggcacaagttcaacgagggcacaagaaacacttaagacggaagaaaatg

SEQ ID NO: 75590 - DNA, 1346 bp, Heterodera glycines
atgtgtgagtcgagcaccaaatttatggaaatttttggcaaggaatcaaattgctcaccaattgacgcaattgaacagttccaagaaatgaacagcttggaattaatgcccaataaaccgctccaaattgtgcttgaagaaagtgttggcattttgatagtggtggcaaatgataaagttcatgcaatgatgaagaaaatggacaaaaattccgacgagttgaagcagttgttggtgccggacccgtgtgatgaggccaaactgaaactgaagaagaaggagatgatgaacaaggctgatcagccggtttgacgaaaattctcatgaaaaagaaatgatcaaaatcagcaaggatggttggatcataggatcgcaagaaaggacatgggaggagaggattttcattgatcagtgatcaaactctttatattttctttgggcgtagactttagattgatttaatctctctgttggtaacttttataaactttcattttcaaaatgattttctttttttttattggaaaagtacaaatgagcggaacgggtaagctttgtgcctccaattccgtactagggaattttagggtcaattcttttattttctaattatcaattaataagtgaaaacaaatgtattaaaaaaataattaaaagcaataattatatattgaataacaattattcctatgcaaaaaattaataatatcaaaacttaatatatttaaatttacattgtatttttactcaattatttcaaattaatttcatgaatgtctaaaagatttaaatcttttaaggatattcgatttgatttcacagatgcctgaatttgagattggtaaatgaaaacggaaaatgctctgtttttaagatctgctgtcctgaatttagtactggcttttcctgttatttttaagatttataataaaatggagtttggcagtcggaaaatgtcctgattttttgaagcttgagtccatttccttgtcgttgtacgtgttgatcacgtgcaaattgttcaactctttgccgttacttagtcctcgtccagaaccaaataactttaaaaaaatttaaaaaactataaaaaaattgccataaaatttaaaattgactctgatgaggacacttcatcttgctggcaattctcgactccgtgcgattgtttggctgaaattttgtcaaaataacgtctcattttatttaaaaaataaagtatgacaatattttttgtagataaatgtaaatattattgataaaaatgaagttgtatatgtatttgtggcggacgtgaaatgcttgtaaaatgttggcaatttcattcttattgacccattaataaa

SEQ ID NO: 75591 - DNA, 614 bp, Heterodera glycines
atggagacaaaacagaagaatatccatcttctgaacttgacaagactggcgtttaaaggcgacccctattttgatggattcgaaaattcaattttaaaaaaacaattttctaatccgccggcacaaaacggacttaacgcattatccgatttacctgacgaacttggtgtattttccgatttgagtgaccaatttaagcaattaagtttaacattaggttgctttacatgctttattgatgaggaactgacttgttgcagcaatttgagctgtgcgttcaaaaaataccaaaaacaacagaaaaaattgaaaaatgaaaatttgaaggacgaagaaaaattgaaaattttgaaaaaagtcaaacgtgaaggtgataagctgtggaaaaatgcgcagcaacttggattaggtaattgaaaaaatgttagtgacataatttaatacttttgagcattttcaatagacaaaaattttggaaaattttcagggaatttcggaaccccaaaaaatacgctttcctttttcattttgcttgataaactatagttacttgggaattatgaaattttttattgaaaacttttaaaattattttcttccataaaaatattaaa

SEQ ID NO: 75592 - DNA, 1028 bp, Heterodera glycines
atggctaaaaaaaaatcattgcttaagcttcaaggcaaaagaggtgctgaacaactgagaaaaaggcgagaggagagaaaagcgcagacggccaaggcgagacaagcctatttggccaagagaagtgagtttttccatttatttttcataaattcccaaattttccaatttttagccgctccccagccgaacaccgatgcagaaacaccacaaccatccgaagaagagccgtcgacatcagaggcaccggcgcgggacaacgacggacgaccaccatcaactccaacaccgatggcaccgctggaaatggacgtgccgtctgtggagatggtggacaccgatgtgcaaatcccttcaacgcctgccgatgaagaccaacaaattcaaccaatgccgtcaacatccacggcacgctgtgaccacatggcgacaccatcgacttcaaagtgcgccggtgcctttggtctcgatgatggtgagagaaattcaaacaaaattttagtttttttaattcatttcatttttattatttttaagtccacatgtttgacgagctgcgacggcgccacgtttggaccgaggaggaactgcagcgacagcgccggtcgaatgcctttctacggaaacagctcaaggcccagcgcgaccggtcgacaagcctcgagcgttcggcttcgtcatgtcgtcagcgcaaagccctttctgacgtgacgaataaccaacacgaggacaacaggctgagcgcggcgaatgatctgctcatcacattggacgcaggcatctcgttcaaggcccgtgaagcgttgaagcggtctttcgccggccaaggacatgatgtttgggcaccgacgagagcagtgaagcgtctgaaggcggaactgtgcgaggcggtcaatttccattggacgggcaatggtgagacgcgtgcgctcgtttccgtcgacgttcgtgcaatgatcgagggccgtcttcaggatttggtgaacagtggtgagagagagaaaaataatcgaattttaaaatgttaa

SEQ ID NO: 75593 - DNA, 6035 bp, Heterodera glycines
  unsure (1)..(6035): unsure at all n locations
gctgatggagacgccggaggcgacgactacgacgaccaaatggacgacgacatccacnggtggcagcggcagcggaggcgtacagtggcaacggcgcgtgccggcgggcggcgattttgcgcgcgaattgcgtgacgccggtgggacgggggcatcagtttataatagcatgaaattatttaaatcatgagaatgcggagcattctaaaagctaataatgaaaggacaaattaggcctcggataggaatcgaacccacgcctccacccgattcgcgtgggttgctctaccactgagctaccgaggcgtattcgaattttttaaatttaaattttattcgcttaaattgccatttgctttttcattcttttgagatagaaatgtttttaatggagctttaagtcatttatttgaatttggccaattaaagagaggtaatggcacaaaaaaactcgaaaaattggtcagaagggattaaaataaaaatttaaataaaaatttgtttagctctgaccgagcgccaaagggcggccaatttgcagcaaaaatcggcgctaaaacagccctttggctgccaattgcccagctcactgcacaattacgcttatcatcaggtgcagttatggaaattcctaatttaatttttttttcttattttttgctttaatttggccaatttctgtgccaaatttggccccttcgtcctttttttttttgttggccgtcggaaagtcccctcggggaaataagttccttccgccggcatttgccgtccaattaaaaaggcaaaataataaaaccaattaacacagaaacgaagaaaatattccccattttaggacactttaattggcctcattttttaaattttcttggcattttctttgttttggccctattatttatggccgagtaaacttctctttttcttttccatcgaatatttataattaataaatattaaaattgcatttttataacaattttagacggtcacttcatcgtctttgagcagtgcagcaacaaaaaatggcggtggcaccgccaacaaaaacaacggtggccaagcagtggacgaactgatccgggacatggagtttaaaatgcgcagtgccaacgcgtcaaacaaaggtggctcataagtcttttttggcatttgaaatggaatctgtccgagatcgagactctcgagcagtgacaagtgtgtctgaccccaacaatttcgctgccgccccccccccctcccccgtccaattccattgcttctcccgctacttaaaaatttggccccccgcggagtcactcactcaattcacggcatagcgcccgccgggtacaacaacaacaaaaaagaagcagcacaaaggaatttccgccttttccacatgctcttcttggccccttcgtcccctggggcgtttttggcttttccccatgcccccccccgttttttacgctttcaatttcctctcatgggcgccgtgccgtgccaatgcgccgttttaccgccctaaaagggcaaaaaattcttttccttttgtcagtttatgtacttttttcttctctccacaaaagtgtagtgccaatgtttgtgcttaagtgttatgtcgaaatttgctcagtgatctttggtcaacgacaaatttgtatttatttaacgtgcgaaattgctactttaaatgcccataaataaattcaaatttaaattcttaaagtggattaattgttaattgcttctcgtgtggcgaaagaccaaacttttaaatggccaaaaattctttaaaaaatcccataaaatacgttttttgaaacattttcatcacttttttatttgaaaattatggaactataaaaaccataaaatgcacattatttcaaatacctatttctgctttaacccccccccccctcaaattcgcaattcttcccattttttcgcgtccatgtttcatcaaaatctgtgcccgctctgtgcaaatataaaaaaaaccattcattcatttggccattccattcaacacatccacctcccattcattcatttccttactctttcttcttcaccccgtgggttttgaagtgtaaaaagtgtgtcgaattgaatgggccgggcaaaaaaacgggggttggcgatgcttttaagccttttgaacttttggcacattgaattgaatcaaaaattcaacaaattttactttgcccacccccctaatgcttcattttctcccatttaaactttttgtttagttttgccattctttgcctttgttaccccccgtttttgtcctctttccgcccctttttcccccttttttcggcattaattttgcctccccaaatgagggggttttgtcgagactgactttcaatggacaatttgtcttcttgtgtgttttgtgttgttgtcgagagtgaaagggccggacgcaaaagaaagcgccaaaaactttggcgccgctgcccccccccttttggtgtacatttttttcccggcggacggtgaaagccttttcgaaaacattcatccgccatgaattggatgaggaatgcgagtagtgaatgaatatgtgtcttccgtccgtccgtcgtcaattgttcgttcggcttctcgtcgtcgtttgtccatggagcacagctgcccggaggaagcggggaatgaatgcttcacgtccccccggggtggcggggcggggggagggggccggagagcggggaatgggagaggccagctgatgaaccatcgggcggggggagcaagggggagatgaagcatgcgaggaaaagctggggacaggggagcaaaagatgaagcatgggaggggggggggtgagtgagggatgaagcatggaggaggagggagaggccagctgatgaaccagtggggatgaggaggggaagatgaagaattggggggcgggaacggagagcattaccaccatcaccaccgtccgcttctcctcctcctcctttaatcatcatcatttgccggagcccgggctgaatcaagcggcggtgcttggaagagcacaaaacaaactttccctcccgccgcctatccccggagggaatgggcggcgggggggggaacatttgctaatgcacctccatccacagtcgtattcattttgtcactttttctccatccaaatctttttggaaaattttttcctatcccattttttcaacaaattcatcattgaacacaacgccaattcgttgtttttttttcttgacactgtcgcggtcatttgattccctcctctcagcttagcccccggcaaatgattaaaactcgcaaaaaatcaccggaaatcgaccttatgccattgctggacacccccaaaaccaaagcccgccgaagtggcacaatgttgaacagttgccccccccctttggtcggcactttgcttaacccccccccccaattcctcctccggcgcttttcacacggacccaaaaaatcgacgtaaataaaagtacgccccctcctcactttcaacgcttgttttcaccatctatcaatccaatcattaattttctcagctgctaattgcctgatcagtgcttcgcccttatgggcggctgatcaaacattgggacagcgaaaaatatatattaagatagggcaatttataagaccacacattccattagagaataataataataataatttaaaagcttattatctgcagcgaaattaataattagtcattaattaccacccaaataattaattaattgtttgccctctgtccgcccctaaaattgttgaatttgatccggcaaaacgcgtgtgaatggcggaagttggtgcgtattttaatagtcgaaacttgaaatttacagtaacaacttacagtaactaattctcaattttcaactcacattaacattcttggcattatttaatttaattgcaaattaaaatttaaaaaaaaacaaaataaaaaataattaattgaattttgaattcttaaaagcattggaaattaggaattttaattataattgtttaaattaattattaattaaaatttcaatttgctttcagatacgtgcacaaagtgccaccagcaaatcgggggcgaccccccgggggtcaccgcgctcggcaacccctaccacgtcacctgtttctgctgcgatgtgtgccaaaaacagttggccggtagttgaataattggccatgaaaaggcagtggggagagcgtcacattaaaaatattttatttttaatttttgaaaatatttttaaagaaaaaaaacatgacgcgactctattgctgataaaaaataatgaataattgtttgaatttgtggaaaatggcaagaaatagtgaacatttttaaataaacaaaatacaaaaaattttcatttattaaatttttactttttatatttttgccgctctaagcaaacactcgaaaatgaccttagggggtataaaatatttatttaaatattttctgtatgcttcttccgcttaggttgttccttttacgcggtggacgggaagaatttgtgccaagttgactacatgaactcgttggaaaagtgcgacaagtgcaaaatgccgatcactcagtgcgttcaaattggctgaaaattttatgggattcgaaaaagagtgggagagtcgcaatacgagagccaaaaatgccttgaaatctctcgaaatcgaaaaccgagactctcgaaaaaccctcttctacataccgctgaaatggtcatattttagccggcattcaactccctgttatcgttttttgcattttttgagctttgatcccacatgatatccatccatttgattaatctccctaagttggcattatgtattattatattttttatttaattttatgccaaattcccaggaaaattctccgtgccctcagccgcgcctttcaccccgagtgttttgcctgtccgatctgtcaaaaatcgttggacggcattccatttacagtacgtaccttttgttgtctgctggttactgtattattactttttactcaggtggacaaggagaaccaagcctactgtttggaatgctatcacgagtaattaatatcaattaattttatttgtattgggacatatcaatcaattttaaatgggtttgatcattcgctataaaatggtcgatcactctccgcggggttctaaatctcgaggacggtggttgggcattttggacctattaaattataaattaaaaaaaaatttttatggaatcaggcgggaaaataaacgtatatttccttaaaataattcccctccaattctttggcgaacaaaaaacaaaacaaaattggtaaataattcataattcattttttaaatttaatttattaaaccatcgcccaggcgcttctctccccggtgtgccgcctgtctgaaagtgatcgcaccaaatggcaatgagacggaggtggcgcgggtgatcgccatggtcagttagcgtgaaattaaaaaaataaaataaatttcaaaaatgcgcctggggcataaatttttataggacaaaagctaccatttggactgttacaagtgcgaagactgcggtctgaagctgaattccaaaattgagggccaaggtgaagttgcttttttaataggaaattgagttaaaaaaaggccttacaccaagtgatcagatcactactaactttcataatgatcggaattggcaaattgggggtaatttggaaaacaaaatgcccttttatataagaaaagactcggaaaagataaatccgtaagataaacaatattttctttgaattgccatttttataataaaatttcgatgaattgtcaccaataatttataaaacctcaattgatgaatcgaccattttactccttccccctgtccccataaaaaccggacgaagttcaaaattaaggcttatccaccccatttttttgctaattttttaaataaatttcaaatttatttttaaggctgctacccgttggagtcgcatttgttctgcaaaaactgcaatttgaagcgactgaagtcc

SEQ ID NO: 75594 - DNA, 1466 bp, Heterodera glycines
atgtttaataataaaaaatatgtacataatttaaattattttaaaatatttatttcaagctcgtcagtggtcatctaccgcatcgcttgcggcgaaggactttaccaagtaattattgttggagcagctcttttcctcgcccagttagattggaatttaaaaaacgaaatttaatttttcgaaatttttaaaatatttttcccataaccaaaaagaaaagcttttcgaaaagccccaaacaaatggtttattttcagcatcttttggcctacgaagtgccgctggtcaagcatttgttggcgcaccgttggcaaagccaagctgacactgactgtcgtcaacaaattgcggaacatccgatccacaccatccaacatcaatcagctaatgcgataaagccacgggtaatggaaaaattatatggaaatcatggatttaaaattacattcaaatttcaatgaaaaaaaatgttggtccctcagaccgaaatacccgactggcacactcatcgacaagggcgtggtcagccccaaatgttctgagtcctttttggcctcgcagcgtgcgttgcaggtgtcttcctctgttttttgaacttttaaatcaaaatttgaaattgtttttccccagggaactgctcgagtgccacggcacgccattttgatggacgacaacggatatccaacggacaaaacccaacaatcacatccgtatgtccaagcagacgaatataaattgtttaaaaatgtttgactatttcttaaaggccctctgttttgaacaccaaattgtctctccgcccatttcccctccctgcgccggcaggattttcccattatgtttagataattttggataaatttcattcgctttcatatgccatcattttaattcttttttgtgtgtttcatatatttttggctttttaggccaaaaaaggctggaacatcttcaacattgaccagcagtcggctgacaaatgaggcgaaggctgggaaagcttcgacactctgaacgacaatttggattttgagaacaaaagctaattgagcaaatggcgcgtcaatcaatgcctaaggggctcgaattgatttttccaatttaaactgatttcttcgcttttattatgtacaaatataaaatcatcttttttcttaattttttttctgtttctcattttgttagcaaatgttttctcttacgctttatcccttcatatcccattatcattacgtggttgtattatctcattgtcagcgttttctgctaattattattttttggactttattataacatatgatgatgctgttttccaacctttacggccaagtttaatgtacactcatcggtaattgtgtcggtgagcccatttttaaaatctttttcgcttttttaagttaaatcagaaaagggttcatcggcattttgattaattacataatcaatttaagactgataaacaa

SEQ ID NO: 75595 - DNA, 860 bp, Heterodera glycines
atgcaacagcgggtaaaaggccgggctaacaacaggcaatagacagatggttgcccagatttatgggtgcaccacaaaaacttgttgagaaacaaatgaaaatttttctagccatttttcgattttcaaattttttacaaaaaatcgctagaaaggtttttcaaattcttttttatattttcttataaaatattttaaaatttttttcgtaaaaattttctgtttgtaaattttttttttaatttccggcggcgagattttgccaccatcccagattttattaccaacaatttgagctttttttagcgccaatgccaaaaattatgctaatttaaagaatgtttcgttagattttttccgaaatttttgaaaataattggcaaatttaaatgtaataattttctaattcttgaattagtccgttgttttgtttcactttttaaattcatttttatcgtgcttttccagctttgtgcccagcggccaaacggtggccagctgccagaatggccaattcctgccagccgtgcttggccaatgtgtgcagtcgagtgccgacgcgacaccgtacaccatgccaagcgcaaccacgacgacgacgaggaggagcagcaacagcagcactactgtagcctcgtcaacgacaacaagcagtaacagcaacaatggcatgggcacaacagcaaatgctacagcagcaacatttgccatcaacggaacaggaggtgatagtggcacaacacaaatagagcaagggaagagatagaagacgggagagacgggagagagaaatggaagagagagaaagataggagagaaatgaggtgaaaagagagaaggataagagagaatggaagaaa

SEQ ID NO: 75596 - DNA, 3359 bp, Heterodera glycines
aggcaatgctaaaatgacactcggcaattgccaagttcatcactaggtccgccaagtcgcagctgatcgtgctgaatgccgacaaatacaatgtattcttgtgccagattaaaggcgcaatttccttccatcccaaaaacttttgcagcaaatccatgacgaagtggcagctgccgacggcaccgccggcactctgtggctggtcgaccacttcgtcccctggtgcccgccatgtctccgcctgttggccgaactgcgcaaattgccggccgaaattgacgggcgcccgcttcggctgggcactgtgaattgtgaagcggaagcgaccatttgccgaagcgcgggcatcagaaggtgagggaagaagcggcagaagaaacacaaaaaatgagtcattataaaattaaggaaaggtcgggctaattaatgcctaatcccgattctcgaccctggtttcatttaaatgtgggcagaggatttttgcagaattgccatcatttcaaatcccgacagtttgttccattcccgaatcccggatcaggctcgaaccctaagttactcccaattccagtggactagtcaattcagactcgacccctcgaggctagagactaagtcaaaaggtgcactacgttcccctcctccgaaaaattaattttttttaattttcaaacaaaatatttcatttagaaaattgtttaaaggcaaataaaatttcaagaaaaaagtttttcaaaaatttctctggcgtttttaagtctgaagaaaattttttcaaattcttttcttataaaaaattttctagaatttttttaaaatttttaaagtttgattttttttttttaattttcacggggaaccgacagggaaggcgggcggggggggggggaaacgagctgctccaagtcaaagacttacctcaaccaactcgaaaatctccatatctttcttgatcatggcaatttttttgattatccctccgcccctcgttcagttatccccactccgtgctgttcacgccggacggtgctcggcatcccatcgtcggctcccattcagcggaccaactgctcgaatttgttgccgaagcattgaacccgtcggtgctggcgctgaacagcactttgttcatggaaagggtggtgcacaggccaaaaggccatttgttcttcgtcgactttttcggtccaaataaatattattacgatatttttaataatgcggtttttggagcaatcgaaaccatccaatgccgtaattctcattttttttttaaattctcgataaatcattttttaactggctgatcaatctttcttgctatgccatttcgagagtctcggctcagagtcgaatattcctcttttttttgtcccccaattcgatttcgtctcgagtttttagtgccctgtaatttaactaatttcccatttttagccccgtggtgcggtccttgtcaacaggtttgaaaaacccgttttctttgtcgaaaattacgaagatttcctcattttaaagttggcacccgaatttcggcgattggctcggcaattttcagtggtcgcaccacaggcggacattgtaagcgaccgttgaccttgaccattttggcatttgactgttcaatttttctaattaaattatcaaattgtttcaattcaccttaattcttctgtttgcggtgtcatgacaacccgtacaaaaggcaactcgtttaatgccttaggcataggcctatgctttaggataggcctaggcttcgacttgcttgggcctaggcttaagcttaggctttattttgtaaaatttttattatatgagttgttttttgtacgtgttgccattgatcctcatttgcaatttcttttttttcaaagggcaattgaaggattttgggttcggattttcctatttttgaatttatcttattagcaatttttgctgtccatgagagggaggtcccggggatggaatccactcccgacttctaattagaaaagggctctctagaaaggaactacctcccattgttttgggggaactttttcatttgtttttgttttttgggtgtcttttggctccgtcgactgcgaagcgttcccggacatttgcgacggggaatacgtgcacagttacccgaccattcgtctctaccggcaccggcacgacttgcaaccgtagtgagtgtgtgggggccgaaaatggaatgagtcattggcatctttccgaaattctcgacaattttgcgccaatgttaaaatcaattttgaagtgattatccgccaaattggtggcgaaatgcccaatccatggcccattggctttccgaaatgatgccgacgttggtccagcggttggcgggtgatttccattccaccgttctcggctctgatcagccgtttctcgttgatttctacggtaaatccctggcattttcaaatcccctacagtataccacagtgtcatttttgataagtttcagctccatggtgtggccattgtgtgcaatttgcgccaacttttgacaaactggcgaaggtaagtcaactttctcaaacatcgtttagtgtctgtccgctggccgatcattagcaatcaaagctctccgttaatggtcctatcatagttttttggattaattgggctcccaacaaactaagattcacattgggcccataaaataagcgattgtacccatcattagcacttgaaatgctccccgttcttcagcttctcgaaggcaaagtacgtcttggcaaagtggactgtgaccggttcggccacatttgccaaatggccggcattcaggcattcccatcggtgatgctctaccctggtaaaacatagttaattgcttttttcatttattttttatgttttattaaggcgttgatcggatcggcgaccgacagaatgccaatggcatttttgtacggcatggaaatgacgcgcaacgaatggctgaagaagtgcgcgaaatgctccgacaaagaggaaaagataagcattggcaggagagggacgaattgtgatcggatttggtgggtgatcgatcagccattcaatcgattgatcaatcgaatgctcaaaactgtgtgtaaatattgtgtctaatttattgtatgtattttttgttttgttttttttttagaaaaaacgctttgttgggtgtctaaatgaacatttaaattttacaatgccaatgccaaacattcacctttggccataattggctaagtatcggaattccatttgacttttttttagtttcggccggacttttttttgtatgggtgaacggttttatacatagctcatttttttatcaaaataaacaaagaaagaaaaaaataaataaa

SEQ ID NO: 75597 - DNA, 653 bp, Heterodera glycines
atgacactgtggtatactgtaggggatttgaaaatgccagggatttaccgtagaaatcaacgagaaacggctgatcagagccgagaacggtggaatggaaatcacccgccaaccgctggaccaacgtcggcatcatttcggaaagccaatgggccatggattgggcatttcgccaccaatttggcggataatcacttcaaaattgattttaacattggcgcaaaattgtcgagaatttcggaaagatgccaatgactcattccattttcggcccccacacactcactacggttgcaagtcgtgccggtgccggtagagacgaatggtcgggtaactgtgcacgtattccccgtcgcaaatgtccgggaacgcttcgcagtcgacggagccaaaagacacccaaaaaacaaaaacaaatgaaaaagttcccccaaaacaatgggaggtagttcctttctagagagcccttttctaattagaagtcgggagtggattccatccccgggacctccctctcatggacagcaaaaattgctaataagataaattcaaaaataggaaaatccgaacccaaaatccttcaattgccctttgaaaaaaaagaaattgcaaatgaggatcaatggcaacacgtacaaaaaacaactcatata

SEQ ID NO: 75598 - DNA, 3211 bp, Heterodera glycines
atgcggcttgaactttcagtggcagacaccgaagcgccgagcattatgggattggattggatcatccctttcgagcgtgccacccaacagccaattgccacgactttggagcagcagtcgctcattgtcaacagtgtgcaaccaacaaatgatccggtcaaattggaagggcaaatcaaggcttccttcccgaaggtgtttcaacctggcctcggacattgtgtgaagacgaaggccacgctgcatttgaagcaaaatgtgaagccagtgttctgccgtgcgcgacctgtgccgcatggagtccaagcagcagtcgacgaagaattggaccgacttttggactcgttagtgctgaagcccattgatttttcgcgctgggcagctcccgttttggcagttcgtaagaaaagtggtaatgtgcggatttgcattgacttttatacgggactaaacgatgcgctggagttgaacaggcatccccttccgcggaccgaagacatttttcatgctctgcgtggagccaaagtgttttcgcagcttgatttgcgtgatgcttatctgcaggtcgaactggacgaaagttcaaagcagttagtcggcatcaacacgcaccgcggactttttcaatatcagcgtcttccttttggcataaaatcggccccgtctatttttcagaaagcgatggaccaattgacgtccggtattccaggcgtgtttgcctatttggacgacatcatcattgcttcggccgatcactcgcagcatgttgctgctctcattgaactcttttcccgaattcaggactatggatttcgagttcaattggacaagtgccactttttgaaggctgaattgaagtttctcggacacgttgtctcgtccgatggtctgaagcccgatcccgctcgatccgatgccatccgtaatatgccgtcaccgcatgacattggcactttgcgctccttcctgggtgcgctcaactattacggtcggtttgtcaaggaaatgcgcgatttgcgtgcacctttggatctgcttttgaagaaggacactccttggttttggggtcctgatcagcagaaggcttttgatcaggccaaacaggttcttcaatcggatttgttgctgacgcagtatgatccgagtttgccgatcattgtcgctgcggatgccagccaatgtggaatcgtagctacaatcagccatgtttttccaaacggagtggagcgcgtcatcgagcacgccagtcgaacgctcactcccgctgaacgaaattacgcccaaattgaacgagaagcgttgtctttgatcttcgctgtgcaaaaatttcacaggatgatttacggtcgtaattttactctgttaacggatcataagcccctcttggctatattcggtaataaaaatgggatcccgatctacacggcttcccgattgcagcgttgggccctaattttgtccaattatgattttacaataaaatatgttaaatctgcaaattttggacaggccgacgttttgtctcgactgatttctgagcaccggacagacgaagaagtcattgtcgcccacacatcggacaacgacgtggacagcactgaagaagtcgaatatgctcttcttgtcaacttggagcagctgccagtcgatgcaaaagaagtgagcgaactgacgacttcggacgatttgttgcagcaagtggcacaattcgtacgttccgggtggccaaacaaatgcccagctaatgaattaatgcctttctattcgagacgtgatacgctcaccctcgtgggcggttcaattttgacaggaaaccgagtcattgttcctgcgccgcttcgtcaacgtgtactcaagacgttgcactttgctcatcctggcattgtgcgaatgaaggcgctggctcgcaaccatgtcttttggcccggtcttgacagtgacattgaggcaatggtaaagcattgtgcggaatgtcaattcgccgccaaaatgccgccgaaagcgccacttcgaccatggccaattcctggtgaagtttttggacgtgtccatattgattttgcaggcccatgtgccgatggaaacatttatctcatcctcgtggatgcactttccaaatggcctgaagtgatgcatatgcgcacgacaacagccaagggcacaatcgaagctttaaatttggtatttcaccggtatggtgctccaaaagaaatagtgtctgacaacggaccaccatttacttcccatgaatttaaggacttttgcaggcttaaaggcattaagcacaagttctccccgccgtatcagccgcactgtaatggtcaagccgagcggatggtggacacattcaaacggcaggcaaagaaaaacgcaaaatccaaaaatcaacaatggatttcggaatttttgtttgcgtaccggtcctcgccgagtccaattttgaatggtttttcccccgcagaattatttttgggaagaacactccgcacgcccttgtcaatgcttgaaccgagacagcacacgccgaacgagaacaacaaccaacgtggacagtaccaatcgaggatgtcacagcagtacaaccaacatcatggcacaaaaagccgttcattcaattcaggagactcagtcttagtcttgaattatggtaggagtggtaagccatcatggttggaaggtaaaattgtgagtggtagtggtttgatttggaaaatcgaaattccaatccttggaattaccgtaacgcgtcacgtcaatcaaatgcgttcattttccccttacatttcaagtaagattgtgtccgatcagattcaagccgctccgcaacaaccaattcctccaatggcgccaattcaaattgatcagacacctgtccgtgatcaaactcctgtccgtgaccgcacacccgaaccagtcaaatctcctcgtccgcagcgacagcgcaagaagccaatttgctattcgcccggctaattgccacggacggtctttccaaaagagggagatgttggatgtgttgatatttaatattattaagtttgacacgaatacttttattgattagttatttgttgatgggtcctctcccatcgactcattctttgcatttgtgttattttacatttcggtgtttattttcggactctctaatttgactccgtcgttattttattattattttgtgattctaattttattgtttattcattta

SEQ ID NO: 75599 - DNA, 1077 bp, Heterodera glycines
atgggaaaggctctcttgctggtattcataatgctaaggatagttagttatctgcagctaaggatttgcggatagggtagctgcagataaaataatctgcagataaaatccgtattcataatgctagcgctaactatctgtagctgacgatttttttatctgcagatgccatccgcagttactctcgtcacacatctttttttcggtgctgtgtcgaagtgacaaaagtgcgaatgattgagtgatcagaagaggcgggtcatttcagtacggaagagttattctaatgattaattaattatttaaatttataattgaaaaaaagctaataataataaatatatttggttctatttcagtttacacgaccacaaaaaaaacacgaccatataaaaatttgacaaatttaatgcgccataactttttctagaagaatccaaatttacgttcttggtatcattagatagcgctaagtgtcctttattttcctgtaaaatttcaaaaaagttatggccaaaaatgtttagaaaaacaatttttgaaatttacaagccacaacttttttataacccaacgaaattttttgaaattttacaggcaaatagaggacacttaaggctatcaaaagataccaagattgtttaattttgatgcttctacaaaaggttttggcactgatcaaaaattgatcatttttatggtgatcaattattcaaccaagtatatctttttatgtaaaagtcgtagccccattattcaaaattcaaatcagtagagaattttgtgctctttccagtgggcttgcccattttctctagaaaaaatttaccaaccccctagggattttttcgaaatttccccgattttcagtttattttgggtgtgtcccggtcactaggaaggagtgatctgatcaagttggtgtaagagccttttttgatcagcactaaaagttttgcaagcaagaattatttaaaattttaaatgaactataagacagtttttcaggtttgagtcaagacttttttggggcactgtattcctctcataaaaatgtaatttgtttgggaaaataaa

SEQ ID NO: 75600 - DNA, 3016 bp, Heterodera glycines
atgaccatccctcagatcgatgccaacggaaccgaattggtggtgaaggaacggcacgacgcactgccggccatcaaaattgaaattgaaaaaggcgaaaaagggaaggaaagggccaatccgacaaaaaataatgacacgtcgaaaggggccgaatgcataggcaggtaaaattaattagcattaaaaggaaaatattaaatttaattagacgaaggcaaatggaattggtggattttggcggggaatgcctttccctttggctctccgaattggaccctttgctgaagggtagcaaattgatgtgttgtccgacggacgaaggtgccacaaatgcccttaattattcattttggcaattttcctcttcagcagcagttgctccttccaatttctccaataaggccaattttctgctgatttcccgcgcttcggctcttttcgttgcctcccgcgtttcgctcccttacgaaagtgtcgtcgcgcgattccgaccaaattttgtggtcgattttggaccaaattcgaagccatttgaagaggaaaacattgagcaattggcaattggaagtgtggagttttcagttaatgcaaaaaaagaaagaaaaataagcaaatttttcccttgagacggttggcatttgccagcgttgccaaatgatttgcattgaccaaaagagcggcgaaaaggacccaaaagtgttggtggcactaagaaatttgcactcccaagcagcagcaggtggcatgggaaaggtaacagaaaactgcggaagcaaactgagaaaggaactgggaaagtcggcttaattctttttctatttcggcaattcactccctttttcaaaatatttttgagttttcatttaaaaattacatttccgaatttttcttctcaattaagcatcaaacattgtctgtctcattttgtttacgattttaagctttcttttggcatttatcttgaacaaaaacaaaatgacgagaatgaaggagatgaacgaaagcagacgaaaacaaatccaatggcacgcaaaaaggcaaaagcaatggcacgtgaaatgcgtgtcggatgcgcagtgagcgtattaaagtacaaaaagtaaagaaaaaggcaaacagcagcagataaatacaatgagcagaagaaataaagtctgttatttctcaatgaatttacacgaataaacatacgcaaaattccaattttatatattttactcaaaattttagttttataatattttggctgggaccaaaattttgtgggcccattataatgcaataatctttgttgagaatagaagaaaataataaaaatgttggcaaaattatgctattaacactaaaacattatgcatttgctatttttacgttaaattattgatccatgaagtcaatgtaaattcccaaataaaagaataggaataattcatttgatattattatttcacattcatttattactatttttgcaaaattaaagaaaatttttattttattaattttagcagagaataaaaatgttcttttataaaaatattctttttttgcttctttttttgcaaagttttcaaaaggctttgtccaacgatgtgccaatagacaaagaaacgcgaagcattttgtgggaatgctcagaatttgcacaagcatttggccggactaagtctcgagaatgaatctcaacagcagacgcaaatgccctcccgagaacagttccaaagactaatttcggcattcaattcgatggcccaaaagctgaattatgaggagattgtgcagggcagcgaagtggaggcaatttttgcacaaatcgacgcctatttggtcactgtccacacggagcagcgacagaaagtcaccgaattggaggcgtacaaagacaaagacgaaaaacggctggacgaagcaatgcggagggagaaaagcaaagaatggggagaactaaacgaagtgttggaccaacaaaaggacaacgaagcgtaaccaattagtcaaactattaatcatttggggaaccaaaagacaaccaaaagcgactaattaggaaagcccggatcagaagcttgacattttccttttcctagtagcgtctgttgcatttgggaaattgttaagaattgttgtcccgatgaaaaataaagttagaatttcctttgcaaatgggataaaaaggggctggtaacgaatctgacctcagatttgcctaaaaccgaacggactcaaattcaatagttttaatttttaaaatgcatttaaaaccagttaatttgttcaataattggcgtaaactgaggttcgaacccgctcggatatgatttattattttttatgatacttctcacaaaccacaaaaagaccaaaattgaaaaaccaaatttttcaaaacaaaaaataaattttatatctttaagaattattcattttgtttctcacgaaatgttgaaaaatattcgaacaaaattagaagaaatcgcactgtttcactttttgacaaatgccgttgttcagaagaaatacaaagaatatttcaaatgtttttctaaaagagaaggtaaaaaggaaaataaagcataaaagagaaatgaattttaagaatttaaaaagaaaaaagcaaatgccgaaaaggcaaatgaaaaggaaacctttggctttggcgacgcttgtgccacttcaatgttagcttgttcgttgtgcaatgtctgcgaaagtagtcatgttgatggtaatgacattttttctttttaaaaaacttttgaaaaattaaacccatttgaaagtttcaataatttcggaaatttccattactcttcaaaagttgaattcctcgtcagtatttttgtaaaaatattcagcggtacgacatcaaaagactgattgaatgacatttacagctgggcacgatggaaagcggataattaagaccagggttaagcgggatgggattccgggacccacgccgtcgggataccgatcccttctaaccctaattaacgctatattttcccaatag

SEQ ID NO: 75601 - DNA, 904 bp, Heterodera glycines
  unsure (1)..(904): unsure at all n locations
atgccaatgtgagttttaattttataatataattattttattggtgtaatttttgtttgtcattccaaatttaatttgccaatttcgtaaaatttgtcccatttttccaggctttggctgccttctttgccctgcaattttcagcttcactttgctcggttcatttacgacggccttttgttgcaaagctttaaaagggttgcgcagaaaaaaaatcgaattaatttcaaaacgaatcgagaaattagacgaagcgatgggggagcagcaacagcagaaacggggcaaacagcttttgctggagaatgggcagaaagggcnccngcggggaccggcacttcggcggaacgccccaagggacccgtgacaaatgaagagagcgatgagagaagaagcatttggtgtcgaattgaattgaattgagttaaatcaaattgcatatttaaaaaaggaaacttatgcgacctttgattttaattagtttcatttaaattcaaatcttccccccccttaatttgcaaaagcgttgtaacattcgcccattaaaaattgttttgtgagaaactggacacaaatttgcacattagtggaagtgatcaatctccaatgaaatatgctaaatggtgcgtgtttaatgggaaatttaaaaaaaagagagcacaaagacgagacgaaggactttgttagaaaatgaacaaattacctgcccataattcacttttgtcacagattactgaaaattgaccaaattgcctcactttttgccaattagcgtaaagagatcgatgagaggaagtaaaaatgaatttgtgatttaaaaagtacaccatgcgggattggagaatccgggaccgtttcaagttgtccagggtcgaatttaaagcattgcgaggcttgaaataaa

SEQ ID NO: 75602 - DNA, 604 bp, Heterodera glycines
atgaaatttttccttacttttttgcttctcgccatttcatttttggctataaaaacggctgccgatggctctgacgacagaaacggagacaaaagtttgccaaatccattagcagttgagggaaaggcgagcaaaaggtcagagagacggagtaaaaactgaccgggccaaagccttaaaagccggaaattctcggctagtcccaaattactcgaaatcccgactttaaattttgattatttttcgttttttcctaatttaaatgtacttcttgtacttttctctttagtaatcgccataagcgccattatggctacggttatggcggttacggtggcggaagttggggcggttatgagtcgtcgagatggggcggttggaacaacggcggatttggaggaggaggcatgggcggtggcatgggcatgggcggcggcatgggcatgggcatgggaatgggaatgggcatgggcatgggtggagggatgggaggaggaggatggtgatgagagggcatttttattcattcgaaattaattgttattttatgacaaagaaatattatttattttaaaattatattttttatacactttgaaataaa

SEQ ID NO: 75603 - DNA, 640 bp, Heterodera glycines
atgagctcgaacagcagtgaccaccaaaatgaggaggaggaagcgaaagggacaaagtcgaaaagcggcgactcggtcagtcagaaatcatttgaaaaaagcaaagtgccaaatattggccgtaattctccccatttgtcacagtttccgccgcgccattcccacacttttatcggttcgaccttcgccatttggtcactgattttcctgctgttcgccacttttgcctctctgcagtactatttgcccaaggccgcttcctcttgcctttgcccggccgctgaatttgggcgactgaccgcccaaagagcgtacaacgacagcagttttgggaatcccaaggttagttggatgggggaaagggtctggaagcaggacattcaagcgcagaacccaattttctttttttttttgtcagattttgcccgacggtcgaatcgaatacgaattggcggtggtttccgatttggaccatgacagcaaaatggaggacagaaaggagacgtggcgtagttttttccgcaggggtcgcctcctcttccgccccgacattccttccgtgcaagtccaatgggccaaggacaagcaggacaacacactgtactcgcagctttcgtccggaggacgcgcgatggagtaa

SEQ ID NO: 75604 - DNA, 590 bp, Heterodera glycines
atggtccgacattcacaagaaatggtttttcttgccgaggttttccctccaattcccacaataaatactaaacatttttcagaagagcgtcaaacgacacttattccgaaacggaagatgagcacatgggcaccaatttattgctgatagccgacgaggactttgaacatattcaggtggacaaggaagttataacaaaaaatagagggatttaaaatatgtaaaacgttaatatttgaatcattgaaattggtttctgcaaaggtccgtcacattgggccccccggcgatggcttccgcggtttctccgccttccaatttttgccaaacaccgaagatgacatcatcgtcgcgataaagtcggaagagcgaggcggcaagccaatcgcctcctatttgttcgtcttccgtctcagtgatggccatgtgctgttggacgaccaaaagtttgacgggccctacaaattcgaaggggtcgtcgtgtactgacagagcaaattgggcaatattgttgtggagtcagagtttgttatttgtgtatttaaaaaagagcagacaaaacgccgtcggcggaggagaaaaagctgaca

SEQ ID NO: 75605 - DNA, 1056 bp, Heterodera glycines
atggatgttagagtcgtggtccctgtatggttggtcctctcttttgtaattcattttggttgtccgagttacagtgacacttttctttgttacagtgatgtgccagtgatttcacccgctgcattgaagctggaggcgtggctgaagttgcgcaagtttactgtttacgtaagcacaatgctagaaataaaaacttatatacgtaagccatttgccaataggcattggccacgcccatatatacgtaagccatttggcaatagacattggccacgcccaccatgcagtggccaataggcattggtcacgcccaccaggcgggggccaatgggcagtcacacccaccatgcagtggccaatatgcattggtcacacccatcaagaaggagattgggcatggtcacgcccaccaggcgggggtcaatgggcattggtcatgtcagccctgactggtcaggccacaatgcaattagcattattgatctgttattaaaatacggtatataactcccctgtgtgtactgtacaagttgttgtttgatttttaattttcattaattttttctaagcgtgtaaccagtgggttcctgtttgccgatctgtttggccagcagcgtgtgccatttgtggagctaaacggcaagcaactgaccggcaccactgatcgcatcattgaagagttggagaaatcggaagtggccaaagaaaaagcccatttgataatggacgaggaaaatttgaaacgccatgggtacaatgagaaagctgaactgcgagagtttcgcaggaaagaacggttgatccggaggacatttgacgaaattgtgaccaagtgggttcagagacggtatcccgcgtgcaaccacaccccggggaccttctcgaatctcaaaaaatctcgactaacggatgtcgtaattctggcgtttttggatcccctgtaattacgcattactaattacgtactatttttactaattatgatccgtaactagaattttagattattttttggaaaacatcaatttcactcattgaatattattttccaataaa

SEQ ID NO: 75606 - DNA, 1270 bp, Heterodera glycines
atgccattggtccgcaatttggttggcgcaatacggaagatcagggaggatttgcagaacaaatttctcccactgttggcaaaaagtgagaaaaaaaacaaaaaataaaaaaatttttatcctaaaaccgcaggggaaattttggttgttttttttttttaaatttatgaaacttttttgaaattttgatgaaacttttttttatattattttttgaaccaaaatcttcatttttgtgaaaattttgcttttgtttttggcaacaaatgatcaaaaaatgctaggctcgagcatattcagaagaaaaaaaaaatttgcttttccttcccaaccccttcaaaataatttttctcaaatataattttcaaaaagtgccgatgagcgggccaccgggggaattttgcacatttggaaagagaattgatacgaaattaaaaaaatatataccaatttttcccgaaaactttttttcaaaaaagacaaatctttaaaaaagacatttaaaaatacctattaatgattcgtcccccctcaaaaaggaaaattcttttaaaaaaggacaaaatcactgctactctgaggcttgttttggtcagtgttttttcataaaaaatttaaaattttttaaaattaaatttccagtaaaatatggtcgaaccttaacaatttttgcactatataacacaaaaataagggttttctgtgttaattttcaaattcaaataaaattcttagtcgctttttccgaatcaattatcagaatcatcaaatgattaaagatcatttttgtcaaattacacgatttttaaaatccaaaattaattttcattatcaaaaacaaatttgcttaatcaattttcaattttgattctcataattaaattgtttttttacacactttttgtcaaaaattaaaaaaaaaaaattaatacattttaccctgaaattataaatttgttccacaatatttggctttttatgtcaatatttcagcgatttttcccttattttgccattttttcttccaccatgtttctttccacattaagaattttctttccgcgctctattaatttatgaatttgaagcgaaactaattagtgcaattaaatgcaatttctttgattgatagtgtatttttaaaatttttcttaatttattaaaaattgtaaaaacaaataacaaatatataattttaagaaaatattgtggagaattggaaagaagatgtgatttatttgatcacctatccacgccttagcgcaataaa

SEQ ID NO: 75607 - DNA, 483 bp, Heterodera glycines
atggctcttttgcaccccttctctccaaacacatttaaaaccactgaaccaatcgttccaatattttttgtgtgcctcaactttttcttgtccaagcacggttccccacatagtaccagtagtatgaattatcttgccaaggtcacttttgcgatcagggtgtggtttcaaaatttgtgaggagcatgccgtcaaccggttgttgtctttgcatgattcacttggtggggctataaattttttattattgaatatgcatctttttagctatattatagatcaggtcttctagagaccgagatcagagtgagaaaaactccaaaatttttcgagtcaagacctgagaccgagacttattaatagactaattctattattaattttttgcgaatttcgtgcctaatgctgggcacaaaatttttgtgcaatttttgacctctggtgcctttttcatgacttttcagtatttttcaaaaaaaaaaa

SEQ ID NO: 75608 - DNA, 497 bp, Heterodera glycines
atgtccgacgcgcaaatttctgcaccctcagtttttataatttcatttcgatcattgaagatgttcacagaaacaaacgaccctgggtatgttggtgcgcacgtgtgtgaaaagagcccgcaggcacatacacagggttcgcagcgattttctgctgctctcctatgccttcagtacagtgactgtactatttctccagtaagagaatcagaatctgagtgcaaaagagagaagcgaaaaaatctcatacaaaagagaaatgaggctttttcgtttctcttgtttgtactcgagacacgcaaaggattctgtgctacgcaggattttgatttctcttactagagaaatagtacagtcactgtattgaaacaataggagagcatataaatccggtctcaaattatcagggaggcggggcgaaaaacaggaatttgtagcgcttttgcgcaaaaaatgaccaatttttgccatttttgggtcatatcaaaaaaaataaa

SEQ ID NO: 75609 - DNA, 1129 bp, Heterodera glycines
atggattttctatgcaataaaagaggtattctgtacgcttgtgatatagcagccattgaaaagccaaaaggttgtagattaactcatggtttctattggaaaattttgatacaagggacgggtataccaatttccaagggcctaacgggaaaattcattcaattcaaggacagttaaaaattttatcagatgaataaaaaatgattaatttttattctatttttgccggaatgaattttttcaaatatattttttgtttctactggtgagcatttttccccatttcggcgcatgcgcgctttttgcggcgtgtttttttcaaaaaactttttcggaatagggaatccggcggtgccgataggtgccgccgggaaaattttgaatttttgtgcaatttagtaacagattttgcagtcataaatttatttaaaaaattgatataaatttcaaaattatttaaaagaaagattataaaaataaatttattaaaaatagtaaaagaaatataaagggtaacatttaacagcttaaactattttaattttaggatattttccagcaatttttcatgggttttattgcgacgaaagggacataaagaccataataattgacgatgccgagtttgacgatgagctgggtcactgcaggaaagtaattaatcgaaaattaatcaaacaaataataattgaatttgcaatataaaacaatcattaaaaaagatactttgtcattaaaaattacattttatcacaaatataatataaaataactaatcaaattgtaaatttttaatacaatttataacaaagcgaaaaagttttatttcggctttccttatttttaccaaaaatttaaattaatagaataaataataaaataaaaataatttttagcatcgtaaatcagagcagccacctcttccaaaagtatggtttgcttttgttaaatgacatttacgcctcggacatttgcgcctatgtccaaaatcgggttcaaacttgtttttcaatcttacataatataaacggcattaaaataattaagaaaaatatagtcttcaagtttattaagggccttaattctgttgttaaaaatttgtgatttaaaaaaaattacttataataaa

SEQ ID NO: 75610 - DNA, 1851 bp, Heterodera glycines
atgttcgacttcggcgaaaaatttgggaaattttatttccctgaccagacgaattttaatccaaatacgccctacgaccctgcaattttggctgaatttacgtaaaaattctgtatttctttcactctttaatttctactttcacttttcagcgcgtggcgacgacaatttctggcccagaacgtggtgccgcgtccagtagtgcccgatttgcccgacctgccagtgatcaaggaggaaccggaagaggaggaggaggaaagcgagttcggattaccgcctcaggacgatttgccgggtaaaataagtgggatccaaaaatttttaggggtttgaggaacacagattttgcttttacgaagcagaaactacttttccggttctaatggaatgagcaattttcagatgaagcggcggaaaatggcattggtccccatcacggccacgcgaatttggcccctttggaggcacagaattgggaggccttgcagccacaggcgcaacaaccaatggcgatggcctttgtgcagccgttcctgccacccatgggaatgccgccgcccttgggaatgccgctgcacataagaatgccaccgcacatggaaatgccgccgccgatgggattgccaccgccggttccgttcgcccccattttcgccaatccgccaccgccaatcgtataccctccggcgccgatcccacaggtgtgttttgggaacataaaattccataatctttgccattcgtaaagtacaaaaatctcagagttacagagaaatctttttcaggggcgggggtacccattgaaaattcttgaatttcagaaatttccagaaaatgggtcttttccaggcgggggacattgaaaatcaacaatattcttgaatttcagaaatttccagaaagtgggtcttttccagacgggggactttgaaaatcaacaaaattcttaaatttcagaaatttccagaaaaagggtcttttccagatgggggactttgaaaatcaataaaattcttgaattttagaaatttccagaacaagggtcttttcagggcgggggaatataggttacttgaaaatcaataaaattcttgaatttcagaaatttccagaacaagggtcttttcagggcgggggaatataggttacttgaaaatcaataaaattcttgaatttcagaaatttctagaaaagggcttttttttggggggggggggaggtacatctctcgattttaagccgattgccattcctccggctcgtcccctgtatggggcattcagcgcacctcagaggccgcctccattgatcaacatgccgtttgctccggtgagttttatttttacgaacctaaattataaacgattacattgttaaattaagcctgaccaaagaggtcattttcgtcaacaaattggccgccagccgcgttggcgtgaccgtttcagaccaccaacaccagggggtaattaacggggcctcctttttgtagctaatgatcattatctaaccgacatagtttaattgtttgcactttcctaccacttaaaatttttcgacctctttattcaatcgtagaccccatttttgaagaattaagaaaaccatgtccataaataaaaaatcaaaaaacgataataaaaacaataatatttaagtggaattacgtggccccaatcgtcaaaaccgtcgacgtgagctgttggaaattgtgcccgaagaatttggtccaaaaaataattcatttttttacaataaattataatttagttgttcgtcttccaccaccgccggagccgccaaatttacgacgatggcacgatcatcatgatgagccacccccaccgg

SEQ ID NO: 75611 - DNA, 1184 bp, Heterodera glycines
atgaatcgacggtaaggaagttaaagtaacaaattcttcatttatttcactaaacttttttcacatttcagctgggtttgcaacgacgtgtggatggacattctcccatcttttgaccatgctcaactcggcctcaatttggcattgctttcgccccgtttcaatgcgttggtggacaaacattttgatggcaaaagcgaattgacgctttggagaacaatcataatttgcaaacacgctgttgctgcggtgccaaacttttctgtgtttaccgacaatgccaattcggtggaatttccattgcccgaccgtccgctgccaaacaaattgcgctttaaaagccttcatatcaagtaattcaaacagttcaatatataaacaccgagcaatttgtttgtcaaattcaggtacatcgatcactccgttatcgcatttcttcgctccaatcaacaaatttgggacagaggcaccaatttgggtctgtgggtttcttcacccaccgccgatgttcagccgatatgggatttgttggcccgagaaatgttgcccttttttgcgacaaacattaaattggctggcctttaccgatgctgatcatctggacaatttgcgtcgcagcacttcaccccacaattctcactgatctcaacattaattcgataaattcctgttttctgttgcccgatacaattgctgattttgatggaccaaatgcaacttcagctggtcaattgttgtccaaatggttgcacacaccgagaaaaaatgaccaactgaagcgattgagttgccaatcatttgacggacaaggaaacttcaattgggtcaccaatttcaaggaggtgggcgtcacattttctgcaaaaccatttattttccgtttcaaaatatttagaaatttgtctgtgccatcacttccgtcagctacgaaattcatttttctgttcatgcgccgtcgccaacgtcaatggtgccattcgaattggtgaacgaacggaccaacgaacaaacaatgctttgggtgagaaatttaaaaaacgattgattttgtttaattgcgcttaattaaggccattgtcaccaccagcagcagaagaagaagcgggacaaagcatcgaaaaaggggtgtcttctgacaatgagtgacggacagaacaacaaaagtgatcagcagaagaaataaa

SEQ ID NO: 75612 - DNA, 763 bp, Heterodera glycines
cccaacagaaggggcggctgacgctgaaaattgaaaaatttttctgtttttctcgcggcggagaatccggcactgaacgatacagcgatgccgtgaacatccgaggcttttcattcaaaattttggccaacacttacacaatgtctgctgacaagagcaagaaatgtttgggcttttttatcgaatgcaataaaaatggtaaaaaacaattggattaaattcatttaaattgcattcatccgccggcttaatcggcatcccgtcacgcttttcttgggttcccgagccagactttttgaaaaaaaaatgccggatcagaattctggcagtgtatcctatcgcgcgactttcccaactttttttttcaaaatgccgtgatttttccaatgaaaaaaatgccggaccgacgtgttccgccagacaaaattcagaatgtccttcatttatttatttgaataacatgtacacattttaaaaataaaattttggataaaaaaaatttttccaaaatccgaaaccaccaaatgcctatcactaacaattaattaattaatgttttttttaattgaatttgcccattttgttgtacccccgacgcccattattcacagaacccaattggtgctgtacatgttcagcaacgctgcaaattgttgtgcaaaagaaatacagaaactctaccggcggcaacaagcagttcaaggatgccaatttcagcgccgaaaagaaccaattgggtttccgagacttcgtgcctattgag

SEQ ID NO: 75613 - DNA, 884 bp, Heterodera glycines
atgccgtttttggagaccatctttatactcggccctccaataattcattttttaagtaataaaatttttttcttataattttttatagtcctaactttgctctatttactcacgttttctcttttcgactttttggtcaaaaccaggttcggggttcgacctaggtcgaaatttgtttcttaattagtactgagaaaaaataaaaagcattattgtatcacacatatatttttagttgataaaaatttcaatttatttaaaataaaattgagccaaagttattaatctaaattccaacatttttttaaatttcgaaatttcattaaattttaaaaggttatagccgaaatcattttggctcgagatttttgagcttttatttagtctcgcaacatccttgttattcatttaatattcacttcccaacactgatcaattcctaaaaattttatttttaaaaattccgtaagcaaataagttttcaaaatttcttcacccataaaaaatgactgttttaattacactcgctcacagccccatcatttggtgcacgccataaaatgcgtcaatcaataacgtttaattggttaactaactaaccatatttaccacgcattatgctcatgcaacattttttgccctttcctcttccattctccgattgtatttttactaataaaattattaagcctgtttttttaataaaatattcagtaaaaaggaatttattcataaatatttgtatggcgagcaatttggtggatcggttgaagctgatgttgagcacggccaatggggcggacattcaatttttagttggccaaggagaagaaaaggaggcgagttggcccacaaaagaatttgataaaattactaaaatttaa

SEQ ID NO: 75614 - DNA, 422 bp, Heterodera glycines
atgatgactgcttcgaatgtgttcgaatcgatgttccgttttgatgacaaaaaaccaaagactgaaagtaaaaatttagaaaagtttaaatgtttttcaaatattttaaattaatttttagctccttccgctaaaacggatagttcggtagaaattcctgacattagtgcgaatgctttcaaagtgatgctcagtttcatttatgctgaagatttgagtgaattgaacggagaaaatgccatggcagtgctttacgcgggtaaaaataatttttaaattattattttttactttaaaatattttagcaaataaatacaatgtctcttcgctggtcaaagcttgtttggaattcccaattaatgaactgtcaaatgtattcttcgcacatgaccaggctcgccttctcaacgaaaatgtataa

SEQ ID NO: 75615 - DNA, 165 bp, Heterodera glycines
atggtgagttcgtcgtcgattttcaattggtcacgtccaaaaatttcgcacaacatattctgatcaatttgtaaaaattgctcagattgtaacaaagtttcagcgttttggtcaatgtaatccaagcagcgacgagagaaatccttaaaacaaaagttaaataaa

SEQ ID NO: 75616 - DNA, 1058 bp, Heterodera glycines
atgttgagcttcatttacgcggaagatttaagcgaattgaacggacaaaatgccatggcagtgctttacgcgggtgaaaaatttaaaaaataaataaataattatattttaaacatttttagccaataaatataacgtttctctgctggtcaaagccttgttggatgttccgattaatgaattgccaaatgttttccttgcttttgtcgaagctcgtcttctcaacgaacatgtcagaatctggctaataatgaagcttttccctatttttaacaataaattttaggtaccataggttttcagaccccctccaatttttttttcttatttcactttttattgattcattttaaggatttctctcgtcgctgcttggattacattgatcaaaatgccgaaactttattcgaatcagaagaatttttgcaaattgatcaaaatttgttgtgcgaaattttcgaacgtgaccaattgaaaatcgacgacgaactcaccatttggaaagctgtactaattaattaattattcgattaaaaataactaatttcatttgttttttcaggccattcgttgggcagacgaaaagtgccgtcaaaatgccgtcgaatgttccgctgaaaatcgtcgttctgcgcttggtccggcactgttcagaattcgtttcccactgatcacaaaaagagacttttcgctaaatattggtagttttttgtgttaatccggttgattgttggttggtctcaagacttatttaaagtttaacgacaagagaatcgtgtaaacaaaaattatttcatttccccgcagtgacctcctgcgtcctgacaatggaagaactgctcgccgtcttccaattccattgccacccgaatctccgcggttggcacggacagtacccaatggaatttccgtgccatggacgcttttctgatcaaaaaaaagtgacatttgcgatggaaattgagaaattgtcggaatttgcgcgagaaggagtgaacagcagccgttacagcgaaggcatttacataaaaggattgccgtggaaaatatgggcacga

SEQ ID NO: 75617 - DNA, 485 bp, Heterodera glycines
atgatggactacgaaatggacaatcaaaatgaagaaatttctaaactgaacagccaaaaggatgaagttaaaaaataccaaaaggatgaagttaaaaaatatttaataaaaagtaaggacgattttttcggaaagcaataaaatttatttagggaccagttatttttaggggtagattttcaaaaaaatttattttttcacatgaatctataattttcaaaaattctcaaaatatgtaacatgatgaaaatatttacgaaaaatttgcagaaattttgggtttttttgaggatttccaaaaatttctgtaaaaaatgctcaaaatatattaaaaaaatgaaaatatttaagaaaagagttcaaaatatgtgtataaaattatgaaatatgtaaaaagtccaaacttttgtaagcaagaaaaagaatgtttttcctactatttagagtatggagaagccaggaaaaatatgtattgtattacataa

SEQ ID NO: 75618 - DNA, 228 bp, Heterodera glycines
atggcacttttacgaaacgacctggcacttttacgaaacgaccacagtggcacttttacgaaaagtcccaaggtggcacttttacgaaacgacttggcacttttacgaaacgacctggcacttttacgaaacgacttggcacttttacgaaacgacctggcacttttacgaaacgacctggcacttttacgaaacgcccatagtggcactttttacgaaacgacctag

SEQ ID NO: 75619 - DNA, 597 bp, Heterodera glycines
atgaaatcatttattttattagttttaatattatttttaatcattatatttgatcaagatgaatcaatgaagaaaaagttgcaagaaaagtcttttgatgaaatatttggagaaaaatggcaagaaaaagaagaacaacaacgaaatgaggagaaaataagagaaataatcagaaaattttataaaataaaagagaaaataaagcaaaaaggaagaaaatattcaacaaaagaatggagtaaaattatttcaaaaatagcgaagaaattggggacaaatcgaagtaaaatttaccagtggatatcctccctttcctatgctggggatgctggaagaaattggggacaaatcgaagtaaaatttaccagtggatatcctccctttcctatgctggggatgctgggatagcacataggagaaggcgcgcgtcggcgccttacagtaggagaccggtgctgttgatgtgcgttatcctatggtgttgtactgtaaagtgacgcgatgtcctcttctgatacaacagaactttttgtaacccgatacctaaatactataatttttttttttgccgatatttccattagtattttataatta

SEQ ID NO: 75620 - DNA, 524 bp, Heterodera glycines
ttccgaatcatgatttaaaaatataccagctagtgccagtctctgggcattggggtcaaaaggcgtcagctgacacatttctcctgtgtctatctcattttgatgcgtcagctgtctagcattttagtccttaatttattagagaaaaagaggcattgagtatcgtaaaaagagaggtattgagtatcgaaacgattcattcataattttatggaaattactgctagtacggggtataaattaagtgaaaaattcaatacaacctcatttattggccaatcccaaaaatcatcatgagcaatcgatcaaacaatgaacttagcccaccgaagcgccgaagaatgccaaacatcctcaaaagtggaagcaacaacaacaacaacaatggcaaaagacgcaatttttggcactatgtacgcgcgctgaacaccgacgtagcgttcaacaaaaaattcagactaatgaatgctaaaagtaaattcatgatccagactctaccatcaaatcctgagtcgcttttgcga

SEQ ID NO: 75621 - DNA, 991 bp, Heterodera glycines
atgtttattgacattcattctcttgacactgatgatgatgattatgaaaccgatttcactaccgttacaatcactcctaccaccctactcgagtttaaagagtatatgagacggttagcctccgcctcctcttcttctccaacgactacatctatatcaaggtcatcgttgtctgcaatattaggacagtctacaactaccgtgaaaccaaccattcagttgttatacagtgactcgcttgactctacatatggaggtggcagtagcagtacatggatcggagaatttattatatcattgtgcagcagtgttgccggctctgaggagggaggatgtggcggatcgcacgtgtgggtatggacacgtgtattttgctgtattgttattctacttacattgctgtgcggtatactgtacgccatccgctcaatttttatacttaaaacaaaaataaatcaccagacaaaagaccaagtcaccaactctaacgaagctaggaacaacaaaaacaacaacaacaataataacggaaatgaacaacatccaaatagagaggatgctttccacttgtcagacaacgagagagtgcttcagaggatgttttcccgtggatcggatccccaaaatgatagaattacaacagcgtcaccgaccctttcccgcatctctgatcatcaacacggatgaggctcgccaagagggtgcgcattgggtcgcactgtatattccgcgtttgaacaccatatggtattttgatagtttggcccttcctgttgcttttaacgtacagaaatttctgtcccacttccctcatgtcagtaaaaacaaaatggcatttcaatctcccacctcagacgtttgtgggcactattgcatattttttatttatttggcttcaaccggaatgttatatgatgaaattttgaaacaactgaaattgtattgtgtggattataattgtgacattgcaattaaaaactacgtgaataaa

SEQ ID NO: 75622 - DNA, 769 bp, Heterodera glycines
atgcgggacctttctgcacgtatgaaacgtgtaacagccatttctgattcactgactgaaactttcgcaaaaaattgtgaaacggtaaaacgactcaatggagcaaaaggctcagttcaaaggcttgagtttttgatcaaagtgccccaaatattgcaggtgtttttgagtgaaatttctaacaataataaattttaatttcctttgagaattgtcttagagacggtgaacatgtgaaggctgtcgaaacatacgtcacttttaagccaaaaattaacaaatttggatatatcaactctctgaaaggaattgaaaaggatgctgaccagacaatgcaggatcttaagctaaaagtgggtatatcgtccaattaaaaaacaattattttcttttttagttatacgaattccttaaaggacgccttatttcctccgaagaaaccattgaggtgctttttgcaactcattgtcaaaatacttaaattgtttaggccgtcacacttttaaaaaatttgggcgagccagaaagtgaattagaaaaaattctattggagaattgggaatcggaaattgattcggaattggaccaattggccgccaattcgtcattccgtaacattggacgtttcaaagacatttttgagtttgttgacatcggatgttgccattttctgaccaatctttcgttgatcgcgtatacgtttcttcaaatttttgtaaaaccaggtgatcgaaaataccgtattaaattcaaaaatctaaaaagttaa

SEQ ID NO: 75623 - DNA, 481 bp, Heterodera glycines
aaaatggtgtaagtaaaaatcgtaattacgctcaaaaagcttctcaaacaattttaacgcttccaattccttctacaatcgcctttatacatcccattatgagcgctaaaattatcagagtgccgaaaatcgcatgtgatctaagcctagcaaaaatcagagtgccgaaaatcgcatgtgatctaagcctagcaaaaaatggtgtaagtaaaaatcgtaattacgctcaaaaagctcctcaaacaattttagcgcttccaattccttctacaatcgcctttatacatcccattatgaacgctaaaattatcagagtgccgaaaatcgcatgtgatctaagcctagcaaaaaatggtgtaagtaaaaatcgtaattacgctcaaaaagcttctcaaacaattttagcgcatccaattccttctacaatcgcctttatacatcccattatgagcgctaaaattatcagagtgccgaaaatcgc

SEQ ID NO: 75624 - DNA, 661 bp, Heterodera glycines
atgaagaaaaagaaaggaaagggaaaggaaaaggaaaagggaaaaggaaaagggaaaaggaaagggaaaaggaaaggaaacaggaaaggaatagggaaaacgaagagggaaaagggaaaagggaagagaaaagggaaaacgaaaagggaaaaggaaaggaaacaggaaaggaatagggaaaacgaagagggaaaagggaaaagggaagagaaaagggaaaacgaaaagggaaaagggaaaagggaaggaaaagggaaaacgaaaagggaacacttcctaatggtgcatgcgacgtaccggtaaaaggcccggttcgtatttgctcggtacactcgctcgtcgctccgcttcgctccgctcctcgctcgcgcacctcgaggggcagcttacaccattttttgctaggcttagatcacatgcgattttcggcactctgataattttagcgctcataatgggatgtataaaggcgattgtagaaggaattggatgcgctaaaattgtttgagaagctttttgagcgtaattacgatttttacttacaccattttttgctaggcttagatcacatgcgattttcggcactctgataattttagcgttcataatgggatgtataaaggcgattgtagaaggaattggaagcgctaaaattgtttga

SEQ ID NO: 75625 - DNA, 3265 bp, Heterodera glycines
atgtgtttttcgtgcttctctcatcaagtactatccgcaaaaaatccgggctctattgattttgaattaaataaattttattttattaaataaattcaaatttaggttgaagatgctttgttttctgaatttgtaaaaggacaaacaacaaatcttgagaaatttattaaattaactaaaggattaaataattttgaaaaagtgaaagaggatttgatgcaacaatatgaggcgcatcttggcttttcgtatttcacgaaaaacaatttgcaatgtgacaaaattgttggggaatccagagaaatgctacgtgaagaatgccaaaagcatcgaaaatatttgcaaattttgcacgaatattttttccgactatatgttgaaggtatggtttttcttttaaattatagtgaaaagttttggacaaaagggctgcatgtggcgagaaaatagcgtttttttcgaaaacggagatgtgaaaaaaatgggacaataagggcccatagcacacgcgtcaaagtcactcgcgcccgccaaaaaaaaaattactctcaatttgagaagggagggctggcttttttgtggtgcacataaattcaaccctcggaaatcccacggacacctgctggggaccttcctttgtcagcacctaacgaatatctaaaaaatcacacagtaactaaacctgtacaaataaacacagccaattcggacgggcgaatcactcttccccagttgttgggacttttatttatatatttttacatatttcgggattttatatatatttggtacatatgttgtattttttacatattttgaggatttcgaagatttttttttcaaaaaataaccatttaaaaaaattttatttacatattttcgtacatattttgggtttttatacatatttcgggatttttttttacatttttatgtacatattttgaccaatttttgtacatatttttgacatccctatttattactacaatacgaaatgggcaaaatgttaagcctcgggtgggaattgaacccactcgtgcaccctttccgtggccagctttaccattaagctaccgaggcacatccgccctttcttttatggatcttatcaatccccgctttccgcgtggttagccgaaagtgacaaaagtatgggtgtgggcgaagtgacaaaagtatgggtgtgcggcagggatggaattccgaggcaccaaaaatgtcggaactcggaataaatttaattattttaattgataattattttaccacttgtctataaattaaatattttaatatttatcaaaaacaattagaaaagtaattaaaccgaaaaaccacgattctctcattcattcgcttttgtttttttatatttttattttaaaaaagtaaaataaactgtgtaattaaggaagatttggagtgcacaaaaattggaccctcactttttaagcaaaggattaattcttccatctacttcattattagacatatacaataccatagtcaatcagttaaacagcgagatttggtgccaaaactgcgacggaaagttattaaaattgaatttggtggcacaccaaaaatggcacaataggaattttgttcgaaaattttccgatttaaagccattttcgtattttcttatcacttttgtttaggtaaaaaagctgaatttgcaaagaaattaccagcggtgaaaccaatatttaaagagggtcattttaataagagtttaatttatgctctccaaatgttgaatgaaaattcaaaatatttttgggaaaaaagcggaaagaaattggaaatttatttggaaaatgaggaggaattaaattatgcaattaatgaggagaaaatttggatcaacgaaaatgtagaaatggaaaaacaaattttgaacagccaaaaagggcaaaaatcgacaagtgaaattgaaattgaagcttttcgaagagaatttgagcaaaaacaaatggaaaaaatgagtgaaaaagtaaaagaaaaatggctatgaatagggctgccaatcaaggacatattttttctgttatttcggggttttcataattttcgtaatttataatatttgttatatattttggcatatgtatttttattacttttttttttttacatattttgaggattttatacagacatttttggaaatcctcaaaaaaaaaagtccaaaatttatgcaaatttttcgtacatattttcatttttttatatataagcatttttgaaaattatagttaaaaaaaaattttttttttgaaaatttacccatgaaaataccaaaaattaatttttaaaatactaaatgtgattctaagcctagttaggtcatttttatggcactttatgcctatttcatcctttacgaagaattttttccaaaaaatagccatttttaaaatttactcacatttttcgtacattttttgggtttttatacatatttcttacatatttcgagattttttttacatgtttatgtacattttttaaccactttttgttaatatttttggcagcctcgttatgaagattgacgttatacatttcactttatataaaaaaattttatttagataaattttgagtaagaaagtttttacaaattacaagccttcagtttttcaaaaaaaattctaaataataaaacagggtacggcatggcactttgcgcgtttcgtaaacccgcgaataaagtagaaaagatatagccactttagcaaattcacaaatttcactttagataatttttttttattagacatgtaaatgtgttgggtaaagtaataatattttgacaaattacaagtattgagtttttcaaaaaatataaacagggtacggcatatttaattttttttagagtgccacgggaccgggacctggtagcggacaactgagtacaactgagtaccaaggtcccggttttgaccgggaccgggactagtccctgttttttcccggttttcccagccaaaaattcccggtttttcaactcgaaaaggtcccggtccagggtttgcccaaaattcccggtcccgtggcactctaattttttcacaaaaaaatgaaaaattcccggcgagtgttatctttaggggtttgtttttaaaactggaaaaaccgaaaaccgggggtaccagttttcggtttggccgatttttgatccccggttttcggtttttggaccaaaaaagccggatttcggttcggttaaacgaccgtgaccaaccctaataaa

SEQ ID NO: 75626 - DNA, 762 bp, Heterodera glycines
gctgatcaacgattttctgaaggatcgaaaggcttttgaggaagatttttacgggtttttgctcaagttggttaagtgagttttaatttctaaaataaatttttcatgcattgttttcttaatttttaagatctccgattctaaaccaaattgttgcgtttatgcgcaacaatttcaaagtgttggcaaaaaggtgctaatattttgaaatttaagcaacttttcctgttcagaattcggcatccctcaattatgaaggtgggacaaaaaaaatatgcttttaatatattaatttgtaaaattattcaatcaaacctggcattattaattaattctttccatcggcaaatattcgaattgtcatattttttttttttttggttgttaaggttgtgctaacctacgtcacaaaatggtaattaattcttttttgagaattgaattggtttttccattcttctcctttttcccgttacaggatgcaaagcgaaaaggaactgcgcgaggtgtaactttaaaattaaatttttgaaattgctggatttaattttcatttgtaatgaaggaaaagggaaaaaagaaaatctaaatatccaaaagccgaagcattttttaatggcttatgctttcaataataaaccaaatattcaaaaaaaaagtaaactttcagttggaaatgttcgagcgagaaaatgcggcggaattgcgagacttgcgactgtcggcctatttgaaagagcttcggatggaaattggggctaa

SEQ ID NO: 75627 - DNA, 552 bp, Heterodera glycines
atgccaacggagggaatagggggaaaagcatcggagaaagggcaattaagcattgaatcgtttgaaagttcaatgcccaaattacatattttgtttgatagacatattcacttgtatgtgtacatataatatactccttcctattcaattatttggcgcaattaatatcaaaaattaaaattagagttttaaatttatttgaaataaaaaaaaataattaccttcaattacattcaaaaggtaaaacttaaaaataccagcaaaatacaaaaaaataataaataaaatcaattaaatggtcattttgatcgggcaattgatttattttgcaggacaaatatcccaaaggagattatgtgcttcttcgactttcgcttcgccgttgactttgcgtgccaccaatgttcatttgaccattcgttcccttctcattaagtcgtcctttctttttatttatttatttgtcacaaagaaaaataatccacgaaagggaaaaatccacttacttcggggacatatgaaaacataaaatagtgcacaagcaaatggata

SEQ ID NO: 75628 - DNA, 2728 bp, Heterodera glycines
ttagaagccaaaaaaatacaaatcttaacattaactgaaacttggacaatggaaaaccaggacatacctttttgtccttggattaaagaaaattttaattatatctttgcttcaagaaaatctaaaaatctcttacgtggcggtggctgtggtattcttcttagaaaagaaattaaattttttgttaaattttctgatactaaatttaatagtgaaattttggttctacaattacaaaatactaaatcaattaggcttatattaatatatcgtccgccaaggactacttttaagcaaacaaaaaatctttttaattttttacaaacctttttctgtgtaaattctataattttaggcgacttaaatttttctaaaaaagacctagtatggaaggaaggcaaaccattttccttgagtaattttggtgaaatattttgtgacttctttaacaggttttcttatgttaatgccactaatggaccctcaaggggaaattcttggctagacttggttttaccagcaaatgataaaattgtaacacaatgttctatcgaaggaggcattttttcgtcagatcatttagcccaattttttatattaactgttccggaattaattcctaaatcaaaaaacataaatattaggagatttactccatcaaatgtgtcacttttcaatgtagttattgcctcaaggcttagagctttatcatttaaactttttagcgtaaatgaaaaatatgtctcctttaacaatgcattgttagaaactttagatgagtgtattccaataaaacgattgaccaaaaatgatttggtccataaatatcctaggcatttattggcatccattaaagaaaaagcaaaattatataaacaaagtaaaattgacccaacaaaaaaaacactttatgatagcattagtttacacataaaaatacaaacaaataaattccattcacaaattgaaaaaacggctatttcaaagggaaaacaatctatttttaaatatttaaataaatacaaagataatccctttgaaataccgaatttagtcttcgaaaacaaatgctattatgatagtgcagaaaaatgtgaattatttgccaacttatttgcaaattcatttagtatttcttgggctgacccaaacctaaacttgagcaatgcccaaggtagtaatcaatgctttatatcagatattgattttaacatcattgagactcaaacactattaagaaaattgccaaacaaaaacggaacttctccggataacatttcctataaaattttaaaaaattgccattcttctttagcaactgttattactgacttgtttagattatccttagacagtggttcacttccagacatctggaaagaatcaattgtctttcctctttttaaaaagggggataaatttaatcctgaaaattacaggcctatttctttaacctgctctctgtgcagagttatggaaagaattctcagcaaaaatatttacaattttttattaaaaaacaataaaatttcagaatcccaatttggttttgtaagaaataggtcaacgacaaatcaattaataacagttgtcgaagattggtacgaagcaattattaacggaaaaaatgttgattgtatttatatattgactttcaaaaagcatttgattcggtacctcataatttgcttttgataaattgaaaaaaattggtatacagggtaaattattaaattggataaaatcatttttaagtaacagaacttttcgtgttaaaataggggatactctatcctctgttaaaaaagttggctctggcgtcccccagggctctgtcctaggccctcttttattcttaatttatataaatgaccttcctgatgttataccatcaggagcgaatattaaattatatgctgatgatgttaaaatatatatatgctataaagcaagagctgatacagaaattatgcataaaacattgcataatttattcgaatgggcaaataaatggcaaataaaagtttcaattcaaaaaacttttgtattatatttgggttcaaaaaacccaaaagaaacttataaatttgatgggaatacaataaatgctgtggatacaattagggacttaggagtaaacattgataacaaactacaattttccgatcatgtaaatcaaataacaaggaatgtgtatttacgtatgcgttccttgtttagaataattaaatctaaatcttctaaaatttggattacattatataaaacttatattagacctttattggaatacgctccggaagtttggaatccgtctcttcaaaaaaatattaaaaaaattgaaaagtgtcaaaaatatttcaccaaaagggtatttttaaatgcaaccttccaccaattccataccaaaaacgattagagtacctgcaactgccaacacttgagaataggcgaaagctatttgatctgttcatggcgcataaaattgtttatggccgaacagatctgaaactattttcaatttttaacccatcaacacgctttaacatccccttttaccgatttaacacaaaatataaattaggcaaaaaattcatataaaaactttcaaaaattttgtcataaattcaatcaatttaaattttctctctctctctctctctgtgagaaaaccttatcggatagattttgcacacaaataaaattatgaaaaattattctttcattt

SEQ ID NO: 75629 - DNA, 371 bp, Heterodera glycines
atgttgtcatctcaatcatttccatatttgaagatgcaactgatcgaccaaaagtgtgccgctgggctcgaggcggacgacacgcgcggcacagtcagtcgctactacacggacgacttggagttggacctggccgagtacggcgaactgctgaactcaacgcgacactttcctcggttttgcagcgcttttttggcacagcaaaaggtgggacaaaagcgaattaaaattcattttatattttaatttagaaggatgaaaatgtttttaagtcccttggcactgaatttgccgctgcttatggcaaagctttatcaatttttgaggaggaagtggagaagaaaaagcaaatgttgaagatgtccaattag

SEQ ID NO: 75630 - DNA, 725 bp, Heterodera glycines
atgggccatttgctggacgaaacattcgcgctgaacgcagcagcgacggttgtggacaagacgacagaatcgggacaaggcactcggcgaggaggacagcagcgggtcgatgggaaaatcgaagaattgggtaaggtaggagaggccgaactcctcctgaaagtgggggaacaacaaaatgccatgaagagggacattggcactagccaagcttaaattgcgaaaaaaaatgctaacggaagattattacggccgaaaattaaaattacgaaaagaatgccaatgggaaacgtacggattaaaatgctaaaaaagaatgccaaggggacagcatacggattaaaatgccaaaaagaatgccaagaggacatagtaaaaaataatgccaaggggaaaatgccaaaaaaataagaatatcaaggggacactgtacgtccttcgtttaaaacttcggcatgacatccattcagaatcattggcattattaatgaatgagtcacctcaaaatcgcgcgcgaattgtgcgccacaaagagcctcacaatggtactccacgtcataatacaaataattcggcgaatcattgcgggcaaaatttgtggcggaaaccgtcgaccttcgcctcctcagaacgactttctgctggggacgcgactgagctgaacaatttgttaattgcatgcaattattggacggatggataatatgcatttacttcccgaaata

SEQ ID NO: 75631 - DNA, 794 bp, Heterodera glycines
atggtaatgcttttgcctcaccattaaaaagaatcgccacaccgcgccaattaaacggttctgtgccaagttaaatttagcttctttttttttttactctaaagttcattaattcattttgaagttggcgaattaagccgaaaattgtcatctcaaaaaaatgaattgccaaaaagtggtgaaagattgagcaaaaaatggtgccaatgcggacgatcagaaatagagaaaatgaaaccgatggcactgatcaattttgaagacaaaaagccaattgaacttttatatcaaaaaaagagacttggcaaagggtcgtactcagaagttggtaaaatgttgaaagagaaaagagaaatttaataaatttaatgaaaaattaaagttttagcttttaaatgatggcacttttaaggttttgcatgcgaacataagaaaaattggaaataaaatttacaataaatgcgtggcactgaaaatgacaaaaaaagatttgacagtcagtgactggcaaaagcatgtcaaggagtggaaaattcagagatcattcgacactttcaacgaaacgaaacgggcacacattgtcaaattaattgcatagtaatagggggtatttaagactaaatgagcataattatgagctaactttgttaatatttaccaaagtaaatttgataatgtataatatgtattgctagttaaaagctaaataattatatttgctcctccaaaaatgccgtactgacgttgcattcgtttgaattggtcaattaatattttccagcggatttcacaaa

SEQ ID NO: 75632 - DNA, 622 bp, Heterodera glycines
tctctttcaacattttaccaacttctgagtacgaccctttgccaagtctctttttttgatataaaagttcaattggctttttgtcttcaaaattgatcagtgccatcggtttcattttctctatttctgatcgtccgcattggcaccattttttgctcaatctttcaccactttttggcaattcatttttttgagatgacaattttcggcttaattcgccaacttcaaaatgaattaatgaactttagagtaaaaaaaaaaagaagctaaatttaacttggcacagaaccgtttaattggcgcggtgtggcgattctttttaatggtgaggcaaaagcattaccattctctaaaaataaacaaaatttatgaatggaacaatttatttatacctctaaattcagcgaaaattatttttaaataaaagtataaaaaaagaattaataaaattcgctgtcctttgccataatttatttgttgaatcattcgaaaaattatattataaaaaatttaaaactatattaatgaaactaaaatttattcataaaaaatgtaaaaatgaaaatcatttggtattatagcatataaatcaatttataaacgttaaattaaacaggaaaaa

SEQ ID NO: 75633 - DNA, 1682 bp, Heterodera glycines
atggacaaattcaaagcccatcttgaggaaaagcgtaaattgttcagagaagaactcgcaaaagcagaagataaaagcaaagaatcagttgaaagaaaaattgacgagacggagagacttttgtggatggcatcgctaaaggaatggaagccgagcgaaaggctttggaaagtgccgtgtgacacgggaaaagccaaaacgaagccgaacagaatgtggacgacgaggataaaggcggagaagggcgaagccaaaaaagccgagggggagaaaaacggtgggaaaaaaataataaaattgacataatccaattgaaacggataattatctcaatttagccaagtcgaacaaaatgttggccaatcttatgaagagcattggcctgactttgtcgccgagcattcaaaacgcaaatgattcaattgaaatgaaatttgaggggacttttgaaaatttgcaagattcattctataaccggagttcaaaggtatgtacaatacttataagataatacaatccaaattattacaattataagcaaatttcttcaattttattgctttggcacttacgaagggggcggggcgacattttcccaaattgtaagtgccaaattcgatttctaaccatgcccaccgtatgcagccaccgttcgtggaactttaaatccgaaaaagacctaaccatgaaaaagtttcatgaatatctactgacaaataagttataaaattttatattaattaaaataaatatttaatctttgttcattttaaaactttaattgcatttttcgccattttgttcaaaaaagcttaaatttatcatcgtaaaaggtgatgccttatgagatgggcatggcaagggatttatgcgaggcaaagctcgaagaaaccgattaagcagaaaaaaattatttaataaattaatgagaaatccaactttcacaattttgccaaaattttcagcagccctttgatcagagtaaccaaattgttagccttttgttagaaataggctacagaaatttattagaacatttgatttccataattgaacgttacgaaagcgatgccgaaatgctgaaaaaggttgtggtcatagtcagcggaaggttggactcggaatggaagaaaataaatgaattggcagccaaatacgaagaggaggaggcggaggaggaagaggaagaagaagaggaggaagaagaagaggaggagaaagaggaagcggaaagtgagaccgaagaagagaaagaagagagcaaaaatgaatcgaatgaggagatggaagaacaagaagcaaagaaagaaggggaggaagtgaaaaaggagcctgaggaagagaaagaagagggccaatttgtgttcaatgagaaggaggaggaggaggaagaggaagaagagaagaaagtggaaaatgagactgggaaaaaggtgagccaaaaggagggtaaagtggaggaggaagaggaggaagaagaagaagaggatgaggaggaggaagaagaagcagaagaggaggaagaagaggaggaggaggaagaagaagaggaggaggaggaagcggttgagaaatgctgttggtacacgaaaaccatcgaacagataaaagcagtgtatttgtatgagctgatttacaaacattttatcgctgaagtggaaaacaatgctacaaataattca

SEQ ID NO: 75634 - DNA, 2485 bp, Heterodera glycines
catttcgttgcgcttagtgagcactcgctcattatctgccttctgatcattttctttggaggatttgccttagggcttatcgcctccattttcttccgttgtatgctcgggaaggtgtgttatccccgttgtattaccaccaaatattatatttattagcatggccatagtccggttggcaccagcaaatctgctcgcaagggagcccgtgatcgggcggctttgcattctttgagctccatctccgttgtaagttcaaccaaattttgcagcacttccttttttttttacccaatgtttttttaagccccatttgatggcaactcctgtctgaggcagcggttcgtgccagatttattcgccacctcaagccttcatttgttaattctttattcacattccgttcacattttcctcttttttttttttttaattcaattttttcacttggctttaaaatatccccttaaataatattcatttaatcataaacgcattgcttattttctaattctttaataaaggcattaaataattagttctatttaaattcttccccatttttgccccgtggcgggacctccatgaatatgtcggatgccctttggcattcgttgtttagcccctccccataattacacgagtgggatggaataatatcctttattcggaaggttgatcaatacaaatatataatgtgtaatatatgtgattagttggggaagggtgaaccgattcgtccggggcaaatagggggagagggggaattggaagagttcgggattagccaattccccctcccgaaagagtgaaagagtacaatgtgctggagggcagctaaagacttaaagtgggcggggcctacatgatcagcttaggcatactgtacttagtaaatggtctacggtaaacacaaaataatgagctaagtcataattataattattatctcatatttattttatattttttgttatttaataatattggcaacaacagtaaaagaagaaaaacggacggacggacaaaatggcaatggaaaataaaaagtcaaaaaacccttccgaaagtgattttatttattttttattatttccaatttaatttaattctaaacaatattaaatattatagacaaagtttttgctaaaatcaaatctattcttttaatgtttggcaatataaagcgaaaaaagcagtaattcaagaaataaaattccaaatttaaggcctcaaatttgtaaactttttgagcaaaaaaaaagattgtttaattaaaaaatatatatttaattaattaatttctttatttatttataaggaaattttaacgaaaatgctgaaagctacaaaaaaaaacctgcaaaaatacattttttaaattttgtttgcaaaatccaacaaaaataattttctacaaattaaaataactgtttaaaatcagatgatataattttacattatcacaaatttggagggtttttagcagcaaaaaaattcgggccaagctcatgatttaggctggtaattataatggccataaatatgtacataaaattgcaaaattatgtgatacatgttccaattagagggttaaattttccaaaatttctttaaattcattaaatttaagcaaaaagttagccctactcatgataattaattttttcatcagccagtgagtgcgctctgctcagcccaagcagagaaccctcgccgcaattggcaatttgccatcgccgggcttctgatcgcctccaatttgttcgtcggcattacttttgcgtgcattgtgccctttttcccgatcgaagtttggcaacgggcagcaaaaaataaataaatattgtaaaataaaaaatgaacagtgaattaattaacatggactgctcgaacaggctttctcggtgtcagggctgggctcgaaaataacccaaagttccagttacggatcaaaattacggaaaatcagcaaaaattcaataaccggcatacgtaattactgggtccaaaaggccgtaatctccgcaattacccccagtcctgctcggtatagaaataatcgagtcgagaaagatctactttcgggtatcgtatcgaaagcaaaaaaaacaaaaattcaggctgaagcgaagggtctgagcacctcacaggtcggcttggtgatcggcatcttccaactgtgcagcttcttcgtttcgccagtcttcggcaaatacgtaaaatgggcgaataataattgggaactttgagaatacggaatagtgatgagagtgtttttgagagtgccaaaatacgaattatgacgggaggatttagggattaataatttttaatgcccctcgataaatctccggaattaacggcttacatcactgtttttccatttttaattcccatctctgcttcagttggttgtcctccgtgttcatcgtgcctttatcggtggtcttttgttcacttctctgtgcacaattgcacttgg

SEQ ID NO: 75635 - DNA, 235 bp, Heterodera glycines
tttaatggtcaccactatagcctttgcaatgctcggcattgtatctggtgctgcttatgtgcccgtgtttaaatggtgcgtcgacgctgcaaagtctgtgccgtggtggatggagtgtgccatttacaatgcaattagtgtaaatgccctaattaagcaacgtgggattggacggcacttcgcctgccatttgcgggtgtatctccggattcatacagtcggcacttgctctcag

SEQ ID NO: 75636 - DNA, 771 bp, Heterodera glycines
atgcctgcgctcaccgaaggtttgtgaagaaaacattttttataaaaataaaacaccaaaaaacaattattctaaatagctgttttacatttttttaaacgactttcacataaaaacttttttagtctataactgtgcgctttctttacggaacaagggcgcggcatgcaaagacatcaactggcttatcgctacttataagatcaaagccacagaagaagacgacataatcgatgttgttgattgtcctggcaatgtcttcatggggtgccagacattctcttgtttggatggttgtttcatttttcaatttaaatatttattaatttgatatattttttcaattcatgccaacttcagaacaaaataatgatatatttgtcttgaatggatgcgccgaaacaaaaagttgttcatccaaattggagaaaatctgtaaaaaatatgatggatttgcgtcatgtgttatttgcaaaggaccattgccagtgtgcaacaaagaaaaaattgagttaaaggagccctttccgcccttcaatgatggccatgcccatcgatggtttgtgtagtaaaaaagttttataaaattaaaacacatcaaaaaacaatttattctaaataggtgtttttttgcttcttttggatggtcggcatgctctacgcctttttgttatattttggaatgtaaggcgttgaaagtgatggagcacgcgtaaccgccctgacactgtcgcatggcaactttggcttgaaaaagagaagaataataaa

SEQ ID NO: 75637 - DNA, 57 bp, Heterodera glycines
atgattgtgtgggcttaacgaggcctgccaaaatgttaaatggtcgcccagtgaaaa

SEQ ID NO: 75638 - DNA, 170 bp, Heterodera glycines
ccgaaaaaccgttgctcgattttgacaaagaattttccgatcaatttccttttggcccatttttggatgattacgccggactttggctgctcgggttggacattctcccaaaatttgggccgaaaacaacaaatatttcaatggaaaagccgaagaattgccaattggag

SEQ ID NO: 75639 - DNA, 3135 bp, Heterodera glycines
atgccattccagcaaaaatgccattccaatgaaatgccattttaaacgctattcttgacccacccccccgttcacctcattagcaccgacaattgtctctgcaactttctaaccaactgaacacttctctctcacgtgcccgtgccaaccggcgcattcggctgctcatcctgaagctgagtggtcaaatcgatcggcttttcaagctaatgagtgtggacgactgtttggcacatccctgcttgaatggtgccacttgtgtggacgggtttggcaaattccaatgcctttgtcctgcacattttgaggtgaatcagctgaatcgtcgatggtgtaaaaccccggcaaattattaagggaaaacactgcgaaaaacgggtggacgaatgtgccctttttgcgaacacagaagtgggatgccaaaacggcgccatttgcaggaataacccagtgagagaagcaaaagcgcaaaaatgggctaaagaaagtgatcaaagcgatcgaaagggcaattaggcatatgcttaaatcagctcaagactcagtgatcaaaatgccaaagtcattccttccgtctgtctcttagtcatttgccggcttcacctgcaattgcactgccgggtggcgaggacgattgtgcaataggaaggacaataaatgtgatcattcggccgatttgtgtggggagcacggacactgtgttaacaatgagcaatcagaggtcagagaaaaagaaaagagggtcggaaaataacggagagagagaggaagtcagacaaaaggggaataaccacgagactctcgggattctccggatttggctgaatctttctcattgtttggtcccgatgcgctctgatcccaattactcatttcagctcggctatcgttgcttctgcgagtcgggcttcgttttgggcggtgacccttcaaatccgacttgcgtcgataacgacgagtgcagcaccaacagcccatgccatccggcaagcattctgccaaaccaaccaattccgctcattttctttgcagggcgtcaattgcatcaatttgccgggctcctttaaatgcgattcgtgtccctccgggctaatcggtcggtctaagagcaaatcaagggcaattaaagggagagattcatttgataggtaacggaattaattgctacgacttcgacgagtgtgccagtgacctgaccaacgactgttccaaggagccacgggttgactgtgtgaacacccacggggcgtacaaatgcggcccgtgtcccccgggtaagaacatttcggctgtctaaatttttttatatcacatttatctagattttgtgggcgatggctttacctgccaaaaggtttcactgtgtgccgatggccctaacaaagtgtgccatccggaggccaaatgtgtagaagaaccggaattccgttgcgaatgtccgccgggcactgtcggagatggcctcgggccggacggatgcgaagcgaacaatcggacactttgccacggggacagctgcttgaacgggggcacttgtcaagtactgatcaaaataaccaatcaaatgatcggcaaaagctgaagctcaacccatcaacccattcatttcactgaatgcccttcaaatccccaggccatttccgtctctgtgttccgttgcaattgccccgaggggtaccaagtgagtcgggcggtgttgtgatttttcaaatggctatcacttaacgggttcaccacttcaaagggtgcccgatgcgaacatgccagtccctgtctgtctcggcaattctgctcagggcacggccgatgccgaaccagtcctttgggctgcgactgtttcaggggcttctacggcccgcggtgccaatttgaggaggacggtgggggacggcatttgcctttttgcgccaattagaataacttcttgattttaagactgcgattttcacacgaacaacgaaacgggcgaaattttgtacgaacaaatggccggacgagggccattgttgagcagaaaagtgtgcacgtggcacattcaattgctggacacgcgcaaagtctcaccagaaagaaaggacaagaaatggaaaacattgctaatctcttttgtggagtgctaattgcttccaaatgagcctattagcgcattgatcctcctccttaatgtccttccttaattgtcctccttaatgaccctctctttcgcttcttttcttgtcctccctttccttctccatttgacactttccctcttcttttgtcaggtgcttcagcttctatttatcaactactcggctccccgtctttttgaagtcacttcaaaggcattgcttatgatttgtttggcctaatgaatatccctttttaagggctgtttgtccgccttcgccaatttgagcattttcgacggggacgagccgggccaaagcccccaattgggacgctcccaaattgcgcacttttgccacggctcttcgccttctccgctgctcccttttcacacctcagggtgaccactctcaacaacattttattactcgtttattgctttgactcctcaggcacaaggcgaccgttcgactttctttccgtcttttaagtgccaacatttttttgcatttcaaatggacggcggagagaccgcgtaagtcaaaaatggaggagggaggggggtaaagcaaatctcaggaaatccgaagggagtgccaaatgaattactcactctcggactaaaactcccggagaatgattagccagtctttaatttcagatctcgtcattcttgctaatccatgttttccttttgctcaggttgtggtggacgactgtctaatgccaacggcggacgcattgaccatttcgatgtccggggtgacgacctttgcgtttggtctgtgccatgtttttccgctcgcgttggtgccaatctctgatttctctcctcaggttcattagtatgccgcctcaatttcacgtccgcctcagcgtcgatgtgctgcgtttgccttccgcccaattccacaattgttctgtcaattcccttgaggtcattcgaacatttctcctcaagcgttccttttttcctttctttcttatacgctcttttcctgttctcttttttcccccatttccttt

SEQ ID NO: 75640 - DNA, 755 bp, Heterodera glycines
gcccaacggcggccactgtcggcacagttcgttacgccgcgcggggcggcggcggcacaccgtttcggcaaccatcgccatttgctgcacccgcaggggcagccggcggcgaattatcaccagcaacagcggggcgatttgttggcattgatcagcagcagcaacagcagcaaattgatgccctccgggcacggctggaccagctacagtacgaactgctgggccaagtacagtacgccaccagcgcggcggcgggtgccgaaccatggccacctgccttcttcaccgttgactacaacaaccacccgaaatcactgctcgcccgccggcatatggcatggcaaccgatgcgccgtggcatcattgaaaatgacgtatgtaccatatgcaagtacagtacccttaacccaaatttttgtcagagagatttgaattttttatttttaaacgaaatttcatctaacttttcatttttaaagctacagtatctatatatgtttaaatcattccacatatggccatttggtcagcataggtacacagtaaagacaattttattactgtaatgcattaccgtaacccatttttaaagaaattaaattttgttaaaacggttaaggaacaacagcacggcagcgtgtccccaaggcatatcagttggcagccaatgaagcgtcaacaacagacggaatacggtatcaccggcatgtacggtaggggagggggagacggtggaggagcacaaaaggagcagg

SEQ ID NO: 75641 - DNA, 757 bp, Heterodera glycines
atggcatgcgcagtcgctgcagaacgagccacaattcaccaagagctacagcgattcactctcatcacggagctgatccgagtcgaagagctgcaagagacacaggtgaacatcacgttcaggcaccagttgaactccgtggccgagatgatggacatgttgcaaatttgggaagaagacacggcaatcagctgccgcgtcgaccaaaatgatgagaccaagccgtgtgctcttggatttgtccgacgcattgaaaagcgcgcacttgacaacggatttgaggtcagagtcgaggtgtttttggcatttcaggatgccaaaggacagaaggcgtgggagcagttcgaattccttcgtgaaggggcgttggaagccgttgagcttcgtcccatggtttccacgcgtgcgctgagggaacgagctgaacttctgaccaaaaatggctgctccatcattgccaaggaccacgcatcgcctgccaatgtgatcatggccattctgctgggacggagggtgccccgggacgtggcattgcaaagtgttgaggaaaagatgaaaaagggtgccgttgggcttttgaaggcaggacagtgcgattcggcggaacggatgctcgacggagtgccgagggtcgtctttcaacaggcgggccctggtacaggcaagacctttacggcggcggcaatcatggctgccatcctgcgagaggacccgtcggcacgcatcctggctatggcaccgtcaaagattgccgtct

SEQ ID NO: 75642 - DNA, 1062 bp, Heterodera glycines
atgtcctccgaaaaagcctgcgggcacaatactgaaaatgaaatggaaggagaagctgaggaagtaccagctcaagcgcccgaagtggtggtgctggacgaaagcatcgaggagaacgcctgcgggcaaaatactgataatgaaaatggtgttgtggaagtgatgccattggtaaatccgagcgatccgctgggtttggccacggttgagccggtcaaagaaatggaagtggatgagcaaaatggggaccaagggggggataatttcgggaatggcgggttttcaggtgatgagtcatcgtctcgccacacctttttgtcgaaaaaggcaaagcgcctggaccaaacaaatgcgtcaaaatgctcttcgtcatcgcaggcatgtttggaggacggggctctgatagacgaattccaagccgtcggcctgcgggccaaagacaaattgacgaagactcgtgttcaggggccataccctggcaaaaaggaagacgaaaaggcgccgaagtggtacctggttgcccaaattgctgcaaatggcgtgattgctgcacgagttcagctgacagagcaatggcctgccctaatttgggtggacaatgacattgtccaaaagactcggccattggaagtcggcgattcggtcaaagtggtcagcgttgaatgggcacagacggcaacgggatgggcaggcgccggagattggctgatcatggtcaacaagcgcttgaatcaccaagccgtggccaaggaggtaagtgcgtgttatcagggacctttcagctcagcgttgggccttgttttgtatgtcgaacggcacgcaaagaaaaatggcaacaaaaccatgaaattcgccaccattgctgcccctgaattgcccaccatcatgcgcattcaacgacggcacatgtctgaagcgatggcaaacgaactgcactcgcagagcctggtgcaaatgcagcttgtgaccatcaatcgtccgcaaggagtgctaatttcacagcactatgtcttgcccatgggttttccattcaaaaaatggagacgagattttggcctttaa

SEQ ID NO: 75643 - DNA, 534 bp, Heterodera glycines
atgactccgtccaccgatgaaactcattttggtggcatggacaggccatttgtgcaagcgcatttggaccaattcaattgtgcattggggacggaggacgaattggacgaaacagtcaataaaagtaagcaaatagctcaattaaattattattttttaaaaacatatgttagacctaagtttccgaataatttggtcccaaattttctgggctaaatagcacaatgtcattcagtgttcgatggttccaaaaattccttccctttttgttcatctctttcagttaatgcgctttgcaaaacccattcaattggcgcattggactttttggacggattaattgcgtttatgaaaaatggcaaaagggcgaccgtttcgatgcaaattttggacaattatgagcaccaggtaagtgtgaataattaacgacgatttgttcatttcttcccattcttttaaggtccttttgcgaatgaatgacagcgaaaagcggcggaaagcgaccaaacggacggcgccgttggattatcggaa

SEQ ID NO: 75644 - DNA, 1062 bp, Heterodera glycines
atggcccattctgctgaccaatttgtgcaactgcttagtttggttgccgcctctcatgctaacgcattgattttggtaccatttttcaaagaaaaccaattaattttattttatttttttcattttcagttcggcccatttgtgccccagggtatggaactgatgacggattcgcccgaggcaattttctccgatttacttgccgaaattgacaaaaacattcccgccaatgtccgtgtgctcattgtgccaaactcgcagtgcgatcagctcaatgctttgcccagcttcccaacgccgccactgatcggtccgcaaaatgacactgtgccaaatgtacgttttggactgggggaaatgaggcaattaattatacctcattaagaatgtcacttttctgtccgaccccgcactgtttgagttggattctgtccatttcgctgtgtcttcctcagaaattttgttgcatttgtgcaagacggaaatttgcaagtcggccaatgtggagaatgaggaccgaatgcgccgcctcatttcgcatttgttccggtaatttgatgtcgtattggattggatcggtgccgtaaaggcctaaaaatttcggaatttccattgcctcccccttctttcagtgctcgctccctttacccgctgtgcccgtgtgaccaaaatttgccatttgcgccctctgcgagtgccaatgccaaactgcgcctgcccaggaagccgcacgtgatggttctgccttcgctgcttcagccagtcacaaaggtaaagcaaaccgtgacaattgaacacggcttttaaatattttatccatttgatattgttccatgctttatccaggtggtggatgactgcgtggtgctcaatccgggccgcttcgacagagggaagggcaccggcacattttccgttctcgacttggacctttcgagtgccattggcgccacttcggtctcaccgttttgcgaagtctcactcttttcaacccaacaacaacaatgacaaaaatcacatttttgagtgtcgcaattgcccattttaacatttttgacaaaa

SEQ ID NO: 75645 - DNA, 1212 bp, Heterodera glycines
atggacgagcaggagatgaaccagctgttgttgaaccacgcgttcggcttccaacagcaaatgcaaaacgggcggcgacagggcgaagatgtacggggagttggtcaacaaacggaggtcagagcgaatgagtcggtgtcgtgtcgtccatcgtccacctgttcctctgtgtccttcttttttggatgctttcactgtttggccgcttttctctaacctagagtgcgctgggaccgggaattttgggcaaaaccgggaccgggacttgccgggaccaaagaagccgggaccgggacttgccgggacctaagaagccgggaccgggaccaaccgggaatttttaaaaattcaaaaaaatttaaaaaaatatcaaattttaatttatttcgagtgaaaaaatacaaaattaaatttttattttgttttttatttaataaaatccaaaagttaaagctaaattaaattaatgaaaattttcaaaccaaatttatttcaattatttcaaacaataatcaattttggacctaaatgatcgaataatattaaaattgatttacttttcacatcactttttttaggcacgttttttccaaaaaacttttggggaagaagggggtccggcggtgccgataggcggaaattttgaaatttgggtgtaatttgttaacagattttcaacaaaaaaggttggtttttgggattactaagctcaatttgtacggattttttttaaaaaatgataaacatgtatcaattaaaaaaacaatgaggaatcatattttgtcgatacgaaaccaatgagtatacaaaaagaaaattcataaatattttattcctgtagagggattgaaccaagggaaggaagaagggaaagtaaaggatactagccactaggccatttgcacaattgtcagtgcgacttttaaagaatatattaatgttttttttttaaattttttttctttaactccaagtttcgttcctaatttttcactcagacccccattcttaccagtgcttgtttttcccggttgccctaccgggaccgggacctgagcttttcaaaatccgggaccgggacctcggatgaccgggaattcccggcccggtcccggtcccgctctactctaccaaaaatgtccaaaacaaattttttagttcatctggccgtaccaggtgttttcgacagtgattgatttcgaaagtagttga

SEQ ID NO: 75646 - DNA, 2566 bp, Heterodera glycines
caattctgggactgaagcaaagcgaaagcagaaggaatggcgccaagagcatggtcgcagagtcggttcgacgccaaaaagtgacaaaaattgaccaaaattaattttatttttaaaacactgcatttttcagggctaaagcagaccgaagccgtgccaacagcagatggagaggggacatcgacccaagccgccgaaagtgggccgtcaacgtcagctttggacctttgtaaatcaaaaaagtactattttagaagcaaaaattaaattaaggcccgcattcaagcccaaggccattgtcaaccactccggtcaggcgccatgcgcgtgttcgtccaaaaactaccgaaaacgcaacacaaatggaattgacaactgccgacaaagcaacacacatggactttacaactaccgacaatgcaacaaacatggatttgacaatgatggacaaggcaacggacgtggatttggcttatgaggacgccgcgacacaaaccgagcagttggacaaacagctgaaggagcaggaacaaacgatcagctttctacgactgcaggtccgcaacagagacgcaatgatcgctgatctgcgccgtcaattggaacagcaggcgcagaaggaccagccaacacttaaaattctgcagaatttttagagccatttatcatccaaattgtttttagctttaacttccacacggtgcaaaaagaatgcggctacattggagcggacctcacggcgaaatttggccgagaaaatcgttgatgtgatcgatcgagaccgctcccgatcagtgagccgatgttcgctgcaaactctacatcgtgaagtccgccacaaatttggacactacacaccaatgaagaaggaacaactccgacaacaacaaacaatccatgaagaagatgcactgcttctgctgtcacaacttgggactcaaaaagcgtatgagaggatgaaggcacttgcgtctgatcggtggaaatttgatgttttcccaccattgaaaaaagtaaaaatgttttttaattcaaataaataaataaattttcggtcactaaaaatcaaaaagactatctgcgccgtgctccgatatgaagcagtttcgacgccactcagaatcggtttcttttgttccgacattgccggggcactggaattcagattgtccgcggcaaaagacaatctgatcaacttcaaatcagacaaagtcattttaaaattgagtggggacaacgggcagggcttcactaaattgaccatctcattgccccatgcggcgcatgcaaattccccggccaacaatttcattgtggcagcattttccgcaaaagacacaagggcaaacctgagcaaattctgtgcaacatttgacaacagatcagccaaatgaatgaaattgcggacaaaaaaaatcaaattgtaaaaattaataaaaattttctgaaatgaacttaaatttccagctttctcggcggtgatctgagctttttgtgggcaattattggacactgtggctcagccgtaacgacgtatccctcgcctatttgcgaatgtcgtcgggaccaattgttggacgcggaaaagtgtaaaatgaggacgacggaggaaacggtgaatcaagctgagcagttcgggcgtctcgtgcaaaatggagagaaaccaactgttgctgcgcgagcgttgaccatgggaatcgttgatgagccacttttgcaatcaatcgaatttgagcgcataatattggcgccttttcatgtcttccagggcattggaaatgctctgatcaaagagctcgaaacatcaacagaaagcgcggaaattgcaaacgaattttttcggaacatcgggaccaggagggaagcgttcagaaaaaaggacatgacggggaactcaatcagaaaaattctgattcatgcggaccaattggagaggcggtactcagctgactggccaaaaatcatttgccaaacattggggcacttggcaaaaatacaaacttttacaaaagtgcttttttatttgatatttttgaaaattaagtataaatttaaggcacaacccctgtcgccacgggatttggacgaattggaaacgtcgattgatcaatttcggacattcctcaacgatcagccgcggatgcgcactttgctagccctaaaaccaaaggtccacttgctgttgaaccattttgtgccgttcgccagacaacaccaatttttggcacttttagacgagcagggtcaaaaagcattttgaaatttaagccctggattttttaggtgatgaagcattgcattcggtgtggaggcgtttggaacagttgtggaaaacaatgcccgacgaagaacaaatacgtcaattgttggaccatcattttgtgtcaaattggcttctgaacacaggaaagattgacgaaatgaagcgggtcagtttggtgaaaattgtgttcaaaatcaaattcccatgcctcaggaccgtgaagaacaacaagaagaaattggtgaccgacgggagacggacgaagatagcaatggagaagaagaacaattcgattttgaataa

SEQ ID NO: 75647 - DNA, 90 bp, Heterodera glycines
gagaccccctttttggtgactaactcacagaccacttagacgaaaaatccaacttaattgtacttggagcccaaaattgactcgccgtgt

SEQ ID NO: 75648 - DNA, 329 bp, Heterodera glycines
atggcatttttggaaacatttgcccgctttccgtactatgaatttatatggaaagttgaattgtctgatgaagatgccaaagtgtttgccaagtacaaaaatgtgaacccggtcaaatggatggaccaaaaatcgttactaagtgagttaaaaaacgaaaaagtttgaaaattcagttaatcattgatcacttagtaataagttcactaaaattaattacccttaatttctgaggctttaaattttttcatattcggtcaatgcctaaattcttggtatcaaacgaaagctcaaagtctacagaaattttttatttagcgaattgcgga

SEQ ID NO: 75649 - DNA, 405 bp, Heterodera glycines
atgtaccatcggaataaaggatattattccacgtattgtactttctgtggtgggcttatcaaaggtacgataacaccataatcagggtcatctcataacaatacaataacaaataattttttgacaaattcagcacatgtgctctctctaaagcatgagaggcacaatagtgtgcatcacaaaataatacattttaaaaaacgttggcaaatttcacttctgtgtctcatggattaaagatggggtgaaaataaggaagggatgcgatacgaatggggaccggtaaattggacaccggaaaattggacaccaagcggaaaaatggacaccgccggaattttggacactaaaggaaaattggacactaagatttcctttttaaaaaaaatcaagaattaggtgaaa

SEQ ID NO: 75650 - DNA, 547 bp, Heterodera glycines
  unsure (1)..(547): unsure at all n locations
atgacttcggtactcagttgtacgtgtttttcagtaccaggtcccggtcccgtaccactcaataaaaattttaagagttttttatttaggttttaaaatttgaaaatttattccgatttattgagaaaaaattttaggttttattgaaatgttttttaaatttttgttcgaaactcaattgcacgaactgccccataattcactcattttcgggatgagtcaattgaaaaagccgattgacaattttttatttatcaatcaaaactggcactttacgaaacgcggcgatttagcccgagtgatcatgaccaactctgatcaaatcaaccccctgccgatgaaaaaccataccnttgctgatcagcatgtacaatgtcaggcgttctcgagccaacctgtacattggaaaagcgcacaaaatcataaatgctatacaaatcagaaaatttgtcatccgaaaggcgtcgcgcactttcgacagaggtgacaacgaatttatgatagtgcaattcatttgctgttttttgacaaaaattaggttaataaa

SEQ ID NO: 75651 - DNA, 1812 bp, Heterodera glycines
atggatttttttgtgccaaatgttgtgttggattttcttgcaacgattgcattaaattgccagcaatacggtaatgtttgtattcgtttgcattacgttgtgatggcggcaaacagagcacatgcggtgctcttcccattcaattatgcacaaaacatcaccaaaaagtaaacaaaataaacaattcatacctcgagggataaccggttccggggatttccgaattatttgcttttttacatgaccaaaatggcattttatttatacatttcagtccattttttatccaaatttcggcatttcatggaaatattttttttttggaaacaaatcttaatttaaggaaagttttcgtccaatgtgtgattattcatctgatatccatcatttcaattccattttatcagtgtaagtttatgatatgcgtttcaagataatttttcgccaaatatttaagatgttttcttcaacacttcttatttgttcgttacttgtcttttttatttggcaattgtaattcgtctggcatggattaagggttaattaaggatttaatttcctaaaagattggcacatctcatttttgatagagaatttgcaaatttttgaaaaataaaaaaatttaaataataaatccaacaaaattttaaacataaaaatattcgattatggcctaattgcaaaaaattaaatccaatttttcgaaatttttttgccctgtagaactaaatttaaaattattcttgccgaaatcggttgggcttaaccatggaaatgcaacaataaataataatagttttttgcatgttttttatttcaattagaagtgaaattttcaattttttgctctaaatttatcattttcggtcaatattttcttaaattttttggcatgctttttcataaacatttatttaaatagttcagaatttttttttgtaattattcctcctcacccttttcataaatgagaccattaccagcaggagggttttaaaattttaagcacaaaagcgccgttggaataatgccgccactgatgcggcgacggcacaaaatcctttggacaaggaaagtgcgcgaatcactgtggtatgcattgctgtccaaatccatggcatatgttttgtgttacttggtaatctcaccattacgccatggtacacgatgttgacgatatgtacaaattacgacccaatcttgcaacaattgtattacccaatcagtgcgttcacatcgttgttttacatatcagacgaggcaattaatttacaatttaattatttggaatcaaaaaaatttaaaattaattaaatatcattagggtgcgatttttttgtttttaacggattttttttttgcggttttattccgctgttagagaactgcttgaaaaacacaaataaataaatgaattaatgaaatgctgtaagcatcatcggcattgaaaaaaggtttctttgcatgacatagaatttgttatttttggacaccaaatttgaatcgtctaattataaatttaattactttattgacactgagacaaattttcgaattagcccacactgacaatatattttttggttcaacctagcaccgttaaaacattaattaaaactaaattaattcgcccgtcaattgtccaaaattatttttgcagctctttttgttggccgtctgtatggacatgcgtgtgcaattcgcgcaaatgattcggaaaatgtttgtgccgtttcggaggcgtggaacttaaacaatgacagttcaaactgtacaggccaacgaatgcggcacaatgccaatgcgaattag

SEQ ID NO: 75652 - DNA, 205 bp, Heterodera glycines
atgaaaaatttttcagagtgagccttatattaaattttttttaaagaatttccttttaatattgtgcaaatttcagcatgacgctgggaagatgcaaaccaattagcctagaagcagaaatagaaacaaagaaaaagcttgaaggcgcgacatgatgaacattatttgttaaaataattgattatttaattgaaaaatgaataaa

SEQ ID NO: 75653 - DNA, 541 bp, Heterodera glycines
atgcgcattttggtcaccggttatggcccgtttggtgcctttacagtcaacccgagtgccattgttgtggaccaattggcacaactgtgccgtgacggcacattgggcacggatgatgccgacgcaattggcattgagctggtgaccagggtggtcgaggtggactacgccggtgcactgggctgcgccaactgggcccgcgatgagctgaacgtggatgtgagtaattaggaagtggcaaattatgcaaacggtggtcattaaggataattaagggggaagtttccaaattcttgcggtatttttatgcgggatacgccagattttggttgattttttgagcggttaaaaaactttgagcgcgaaccttttaaatcccaaaaaattccgtcccaatccaaatttttcgttgccaagaaatcttttattttgttttgttttttgcagtttgccatccatatcggtgtgtacccaggaagtgggttcgtgtttttggaacggcgcgcatttcgggacggatacgtcagcaaggatgtgaaag

SEQ ID NO: 75654 - DNA, 2446 bp, Heterodera glycines
atgggcagacgaagcacgcgcgagtttgccctcccgtctttcgttggccaatcgtcagagtggattccgggctgcaaaggccgtcgcttagtttcggtgccgaaaatgcagacaatcccggaccagcgcaaccttcgtgaccgtgtaagttttttaaaatcattcacggatttttgatactttagtttttaggaagttcaggcagccattatcagaaaaatcgtacactttttggaagaccgagtgaatccggcaccgccgttctccttcggaaagcccgactttctgcgctttcccagcaaaatcgccttccaggatgtgttccaatatttgtttcaatgcattgagccaacgtaccaagtgcgaaaactcgagacggacgtttgttttcttttcggttcatcttcacatttgaaactgtttaggcccttaattttctcaaccaattgggctatccttatgtgctgaagcagagcacaatgcaaacgattactttgccaacttcgtggggtctgttgctcggctcattggattggtttatcgatatcattgaggtttcgaagaaatgccaataatataaatatttattttttagattgaaaacgaaatgtaccaaaacttggacaaaattcgtgatgatcctcaatggaacctgctgatctcgtgctttaagaagttcatgtccaaaggccatggccaaccttacgaccgggaagaaacattcaaagaggcattcgaggagtatcgagcccagaaaatggcggagaagggcatcgactgcaacgcgtatgacgaattggtggcacggcgtgtggcccaggagcagaaaattcacaaactcgaggccgccattgctgaggtaggcgaatgaccagtaattttgacgctgtccattgagaccccttttacaggcgcagtgcgtttctgaacagcttgaaaaggaagccgtggactgcgagaatgacattgccagcatggaccgatacattgaggagatccaaatggttgcgtcggccaaggaacgcacattggtcagtttcgaggggaatacttgataaaatttgaccaaatccctctaattacagaatgaaatcacattggcgaacaaggaactggtgatggcacgggagaatttggccaacgaaaaccgggagagggagcgtctgatcagcacgcagcgaattagccggagaacaagcgcgtgcattggtcgcgaagcgtaaatcggtcaaattttttttaaatgtatataaaattcagttttcgagttttaggttcgcgaagagttggtgttgctgcgcgaaaacctcaacaaaacagaggcacgcatttacgaacgtcagcccatcattttcaagcagtccgccaaggtacttttggtggatgcacttatttcccccgcgtcgtttctccttcgccgaaaaattaaaaaaaaattataaaacgtttaggaagttttttcataagaaattttttttgaaaaaattacaattagcaatcgctgaaaaatttttcccttgaaatttctttatgaaaaaattcaataaaaatttgtgaaccacacatcattcagattcgttccgactacaacgcgttcatgagccgtcttcgcgtcatctgtgagccgttattcagtgaggaccaactgcagcagcacctggccgaattggaacagtgcagcgtcgatcaggcaattgtcgagtttcagcgatgccgtaacgacaacaaattgacacgtttgctcaaccagctcaaagggatgatggaatgccaaatccgtgctgtgcaacaagcagaggaatcaatgcgagtgaccaacagcaaattggtggacgaaatcaacgagttggagttcagcaaagagcaggccagttaaaatgaaaccgaaaatatttaaatccagtttgaacggatttagcttctgtcaaagcacaagcttgaactggaacgggccaagcgcaagtttggggacaatcagcgttcattggtcgacgcgaagcacagtttggatgtgatcaggcagaaacaccaggccaccgtcgacgaactgggcaaaattgacctgagattgggcaaactccatgacgaattggccgagaagcacaaaaatgtataataatcgcagttacagaccattacaatttcgaatttgtttagtatttggactacaaaaatcgtttggacgcacaatacaacgaattgttgacggcggtgctggagaaagtcacgaaactttgcgaccactttcagcagatcgaggtgaaaagggcagaacagttggtattttttgggtttctcattgaaaagtaccgtcttcacatttattaattgtttaattcaggaccagaagaaacgcttcgcagaattggccaatgaaatgctcacgaagaacaaggaggatttgaagcaattggagacgaagaaaaaggccgaaacggaagattaa

SEQ ID NO: 75655 - DNA, 692 bp, Heterodera glycines
atgaaaattaaatggggaatggaaaatgaaaaatggcggaggaggagcaaccacttaaggtaaaatgccgaaaagaaatgcacaaaacgtacaaagtgatttttgaagaaatttgtcaggtagaaaaattggatgaaagcgacgaaaagaatggataataatgaaaaatgacggagcagcaaccactttttatactaatttattttccaatttttacacgattttaataatcagtcgtatttcgacgcattgctataaaagccatcactccccttccattttttttcattcgctcactttttccttcctttttgcttccgcaaagaatttccttgcttttctcggattttcttgttttaaatgaaacattgattttacagtttttttctgtttttctaataagcaaattaaatccttcaaaaactgtgcttaataatttccccttaacaaaatgtcagacaaacgaaaagaagcggaggaaaaaatggcaaaagcaatgtaaaattaaaatgccaattttcaatttcatttttttttctccttttttcagtttcatttccgccgattgttggctttgtgtgtacgatctgcttccggcttcacaacttggccttggaattgcgatgatcagccaccgttttaacttctacgtggacgaacacttcaagacgcgcaaattcatcatccagtaa

SEQ ID NO: 75656 - DNA, 510 bp, Heterodera glycines
atgtctgacaaccgaaacgaagcggagcaaaagatggcgaaagcaatgtaaaattaaaatgccatttttaaaatttcaattttaaattttgttttcctttttttcagcttcatttccgccgattgttggctttgtgtgtacgatctgcttccggcttcacaacttggccttggaattgcgatgatcagccaccgttttgacttctacgtggatgaacacttcaagactcgtcgctggaatctgggatcgatgaaaatcaaaatgaagttcgaagcggatggcaccaaggaaatggatgttgtcaatgccaatttggaatcgtttggaattacgcaaaagccgttgccaaagagagtcgtcggattcaaagccatttcattgaagcgagattttgatacttttctgttttgtaaaacgattccatcatttttcacaggtacttcaacaacaatgtcatcacttttctcggccgttttcgtccaattttggccacccgtcccattcatttga

SEQ ID NO: 75657 - DNA, 685 bp, Heterodera glycines
atgatcgcgacaaacattcgtggcatccaattgtccaaacaaagtttccgcagtttgcgcaaattcgtgccgtcaattctcgacgactgtccatcgcttcgcgttgctgccaattccaatggtttcttcaccgattttccatgcgatgacagtgccgcggcttcgaatggacaagctgtggccaaatggcttttcactccacgtccggacaatgtgccaaaggtgttcaaatgctggttgaactacggtagctggcatttggagccagagattgaagacttcaaagcggtgatttcgatttgttttatttggcatttttacggtctttggcgcgcactgacaaaataattatgtatatccaaattggggcaccaaaccgtaaaattcatttatcatttcgtatttcttaaccaatttttccctattttaggaattttacacggcttcatctcccgtcaatttcatcgctgtcattcgcattgatttttcttatcatcgtcctctgccatttgtgctgaccaacgaattgacccgggagcaattgatgttgaagaagatgaacgatatcaaccgtgttcttctgatccgttgtccgattgtgcgcgacgaaagcaaatgggccaaatgggagaaggaagcgattggatggaactttatggaccagtggaatcggatcgacatttga

SEQ ID NO: 75658 - DNA, 1293 bp, Heterodera glycines
atgaagctctattacataggctgtatttacatgtatgacgtaacacgtaacaaaattagacgaatggagaaaataaattccagtatttattggggctggaccaaaggaatatttagatgtaagctctacaaatttgaactttaataaacaaaaatgaaattaaagtctattcatatgaaattcatgtttttatgtaacatgtaaaaacgatagatggaatttgtgtttaatgtaacatgtatcatagacttgaaagaacaaaaaaggaaaaaatattatttggattttaatttacatgtgacaacatgtaacatgtaacaattgtaggattgaatgaacaaaaaatgaaagtttccagtatatttatagggaggaccaaaggaagttatatttacatgtaacatgtaacaaataattaattttgactttaatgaacaaaaatgaaattataatctattcatatggaatttctgttgatatgtattatgtagcaaattagacttgaatgaacaaaattggaaaaaatattatatggattttaatttacatgtgacatgtaacatgtaacaattgtaggattgaatgaacaaaaaatgaaagtttccagtatatttatagtggtggacccaaggaagttatgtttacatgtaacatgtaacaaataattaattttgactttaatgaacaaaaatgaaattaaaatctattcatagggaatttctgttgacatgtattatgtaaacaaattagacttgaatgaacaaaggaaaaaatattatatggattataatttacatgtgacatgtaacatgtaacaagtgtaggattgaatgaacaaataatgacagtttccggaagtaccaccagagctgaattagctaatattttctaaatccataattaagtgattgatggaccaaaagcgcacaatgaaaaagtgccattggaaatgggggagctgctgaattcgctgaacgatgcacagattgagcaggaattggagtgtgtgtgcagctttttcacaagcgattgatgtcatttgggggtgaccgattgttttttactcaacaaattggggacggattttgttgcgataaattctctgttataaaatttaatcatagcatttcttttcatagaaatctgaggaaacaatggtcgttacatggataaatggcacttcttgggccaaaaaaacgaattttattttattttttattagtcgacagtaaagcttgtttttaaaaaacttgttctaaatggtataagcctggtaatattttgtaaattaaa

SEQ ID NO: 75659 - DNA, 876 bp, Heterodera glycines
atgagtttcattaattttttatttggattttttgccgttatatttcttaattttacgactcaaaatgatggcaatggcacagttctcgctgttactccaaataaaaacccgcaacatttgaatagggctcctctatcttcaaattcgtcgcaaatgccaaataaaatgataaacagatttagcagtttgaaactcgtcgatgatttggattcaaaggaaattgaactgtttgctgaatatttcaagaaggaaaatattgtggcaaacgaggaggggagcggagaagcaaagacacaaaagatgagttcaaagaaacataaggggcagacggttaaagaaaagcgagacaccgaaacaattgaagaaagtattgaagagtgcgagacggagaaggaaaagacggttagaggaaggaaaggaaaggaagcggcaaaagaaaatgacagactgaaggagaaaatcaaggagaagactgttagagaaaagggaaagagtgttgaagaaagtgaaggacgaaaagagaaaaagaaagggaagaaattcaaagaaatgggagagaaaattgttgaaatgaatagagaaaaaaagaatggaaatgaagaagagaatgaaactgttagagaaacggacggaaaagcctgtccagtgcaggcatttgcggagcaggttgtcagagaaatggagaaagggagtgaagtgatgaaaagcgagactgttagagttaggaatgaaatcggagaaagtagcggcggaacagaggaggaaaagaacagaggtaggagatttatcaatagggatgccaaaaatatggatataaaatcaatcgcaaaatatggccataaaatatggaccaaaaatcgcggaatatggacataa

SEQ ID NO: 75660 - DNA, 612 bp, Heterodera glycines
atggcctgtacaactgagagcaacgggatcagctacagcatgttcaagactgcctactgcctctatgtcttccaaatgaccaatgcgcaggaggactcgccgggctttgagctgatcaaggagggctgtacagcggtgaacattcggtttgccgaagcggttccgaacgagggggtcactttaatagcctatgccgaggctgacgggctcattctgattgaccggaacagatcaatcactagtgaccttacagtatgaatggtgagaattattcctccgattttgttcaaatgccctcctccaatgctgcacacgaagggattgtactgtgttttccggatgtgatcgagaagtcgccaatcaacttttttctctgcctcatctacctgtttggtgcagcaggtactgcggctgcgggattttacctgtttttgagggagaggcggattcgtcgcaggaatggacaatcggttcatcgacagagctctctttgagaacccggcgacgagaaaatattttgttggcacatttccggccgaccgattgccaaagtgcacgaaatttccctgcagtctaattgtcaatttggtgagtgccaaaaaattacattaa

SEQ ID NO: 75661 - DNA, 938 bp, Heterodera glycines
atgagccaaaaccgtgacgaaaactcgcagccacctgtactcgatggaccgtacccgctggcacaagagcgcaatgagtttgtggaagatgaagcaccggtgctgcttgagatgttggatcgtctgtcacaaggagtgggttttgttttgaattatttaaattttttaatttttccattttggtttatgctaattgttgattttgtttagggaatttgccaagccatgggcctgttttcgtttgcacttgccgactgtttggccacatttcatacatttgccatactgttcgactgtgagacacctgtgccatttgacgagcagcacaagcgatacgtgttcgaacacagggacaaaccgcggctaatctacgtttcggaagatggtagcgctatacaggttgacggtgtggtgaagcaaggggaatttgtgatgagcatcgagacgatgtatctcgataagcgaaacggagttgatcacttttgcacattcctgcgcacttttggcatttgtttcttgatgtgccattgaatgtgtttatttgttgcctattcagagcagtaaattgtttgcataattctgtttaattatttttttgtttacaaccaaaatattgatccgcatttttatgttataattttaattcatttttgaaatttttatttaaatggcaaacgaagacttccgcttgtccgaatgcatccgttttattgagcgaacggcccaagagtatgattgtgttctgccggttccacggcttgggtttgtcacggaaaattttcttaataatttttatttaaaatagctcaaggcgcgatgagcacctggatgcctgtgttcttatggaatcagtgggctcaggccatcggctctacattttcgagtttgaggattgcctccaggtattttaaaaatatgaggtcaattaattaaataaa

SEQ ID NO: 75662 - DNA, 3004 bp, Heterodera glycines
atgattgacacaaaaaccgacggagttggaaatgattcagtgaaagacttttcaaatatggacttggaagatgaagtgatgcgacagaagctgggaaatcagcaggacatccgtgattatttgacagagatagaaggggagctgaaaagggcggaggaactgaccatcgacgattgtattggccaagcggacagaatcgcggaattggcacgggaaattgacgagtgtgacggagcattggaagtgggcagggggtggcgcattggggaaggactgctgggaaaagcccgcccccgcagggcatcgaacgaatgttggcgacttttctcgacgaattgggcacaatcagtgccgacatgcagcacctgaagcagcagtctatcgagatcaaccatcagctgcacaatcggcagagagtgcgcgccgagctgagccaagtgaaaattgggggaagaaaggggaccgactgacggcaaaggaaaaaagagaggggggggggaacgctttacggtttttacagcttacaattaggttggctttgtgcttaaaatattctcattatgccactctcttcagttcgtcgatgatatggtcgtccctcacacgatgataaagtgaatatgttgtcccttttatggctgttaatttggtgctgctgaagttgctgcccccaccatttttcggaaactaaatttttaacgggtgaaaaacacctttcctataaggaacggcgtttttaagatttaaaatcctagttttttttcactaaatcggggggggggtggggtcagctccaattttacaccataaattcctttcttcccaggacaatcattgagagggaagtgaacagttgtgagtttctggagcagttgcacgaactgcagcacaaattgcaattcatcaagacgcagcagttcaaagacgccaaatcggtgggcgatgtgcacgacgtggtggagaatttgaagtataaagcgatggagaagatcagagaatggcttttgctgaagatttcgctcttccgaaagcctttgaccaattaccaaatcactcaaaatgccctcctcaaaaatcggtgttctgacgtcagatcccgtcattacattccccgcaccctttcagcttcttttacgaatttctgctcgcaaatgaccggcaagtggcgcgagaagtcaaagacgaatatgtggacaccaccagcaaaatgttcttttcttatttcaaggcgtacgtttcccggctgtttaaatttcaagtaaattagcggcctttatcacttcgcatcgcattctgttgagatggtcgactctgcgacaaagtccgatttgctcggggccgaggacgtggtcaaacatcccacgacaatctccgcattgccgagtcttttcacttccggcaaaacccaccaagtcggcattgacaatggcctgccgttcacttttcggatcggttccgttcctttcccatttagaaatgaaatttcactttaaaaggagcacaaaattagttggtttttttatagtgtcagggtctgatgcactttacacagcggcccaattttgggctccaagtacaattatgctggatttttcgtcttagtggtctgtgagttagtcaccaaaaggggggtcccaggttcaagtcctccctatgttgtgtgttaatttcaatttcttcttttaaagaagaaggcggaattattttttcattaataaaagttttcgtggcaataaaaaatcatattcaaaaagcgttggttacgtacaacatcgacaattttatgaattttttttagcttataacttggtgaatactagagcaaataaaaccattttatgctcattttgaagggaaaattctggagaatattgtaaattttatttggtttggccttaaattgtggacttggctaaaaaagaattaaaattattgaaatgtttgcccttgtaaaaaattttttcctattgtttaattttcttaaaattttgcataggccaatattttgacctcctctagcgattccaagtttattttatggaacttaagtttttaactcgagatcggctcttctaattttacaagggaaaatcccaaaaaatttttaagtttttgcaaatggcgttctgattactaaataaataataaacctatttgcactgagagcccaaaattgggccgctgtgtttacgagtccaaacgactttttatgagacccttccctaattatttttatttaacattttatgcatatttaaattctagacgcgaagtcgagcgacggttttttcattgggtcatcgccaaaatttgctgctcgatgatttgttggctccgctcattgtgccccacgtggcgcaggaaaataacgaaacggttttttatttatttagaattggtaattaattgttttactatgtctttttctaatttcagttccaattcgaaagtctttttcggagtgttcagtacgctttggtcgaccattgcagtcatgagtttctgttcatttgtgattttttcatggtcaatggtcagtcggccatcgatttatttacttcagtgatgggtcggtccatcagccttttattggtaattttctaattgttttaatggaaattaatgatcgtttttttctagaaaacgttggaagaaaaaattgctgccaatttcgatgcgatttcgctttttctgtgcatttgtttctgcgcgaaatttcgcgaaatgatgaccgaccgtgccgttgtggtcatcaatgggtgcgcatttcgtttgacagattcactgacttttgttcagttattgggatgctttggtcggtttcttatgggctcggttggatgccgtgatgactgcccacagtgacagcgtaagggcgatcgatgtgcgcaaagtgccggtggactcgcgtccccactacgtatgccgaagatatgccgagctgatctgttcgctgttggtgtgcagcgagttggcgtacaaagtgacggacccgcgacttcaa

SEQ ID NO: 75663 - DNA, 498 bp, Heterodera glycines
atgcaaacccttcagaaaatcctttcgcgacagcaagcggagattgagggactgttgacccgacttgccacccaactgaaatcgaagaaggaacggctggtcttccagataaacaattacgacgtcgttctcaccgttttaaatgtgcgcaaaccaaaaaaagaacattttatttgctttcagaaaaagggttttggatttattttccttcaggaaagggttttggccgattccaaggagaggggcagtttttgggaattgcagcagaccaaaatgggcacttacgtcgaggaaattctcagcccgcactttgccccgctcattcaattcgtcaacgaatgtgagccgcttgtcgaacaaaaccacacccaactgctcgcccgttacacgggtaaatggaagaaaggcgagggaaaggcactgacattttgccagggaaagtcgtccaaattgtgcggacattcagcgccgagtggcgaagatcgatcgacgcaataa

SEQ ID NO: 75664 - DNA, 326 bp, Heterodera glycines
attgatttgaagaaaggagctcaaaaaacgcatttctgcattaaaaattttcgattctgatgtcattatcggtcactagaaatcactattttggcgacttcgtcactaaaatagttaaaaatcactattttggagttttgtcactattttttcactattttgacatttttgggcaaaattccttaacaaaaatgcaataaaaccaaaaaatacacccctaagaatcgacaaaaaaaatttcaaaaagcgctcctaagaaatgaaaaaaattttctcaaaaaggtatttttgtggcaagaattttaattttaaaaattattttttta

SEQ ID NO: 75665 - DNA, 2989 bp, Heterodera glycines; identical to SEQ ID NO: 12104

SEQ ID NO: 75666 - DNA, 112 bp, Heterodera glycines
aggggttacacatttccctttctcctctttgctctctgttgcgctatcacaacacaattccaattcgtcaacagctttttcttccctcatcgacgagatgacttattcaaat

SEQ ID NO: 75667 - DNA, 2021 bp, Heterodera glycines
atgatgcaaaataatgcggagcttggtaaaatattttatctgaatacgcttactgctataggttcttcaaatcctttacctcaaatatttgatggtgaaactgcttcggcattttatgagtggcaaattaaatttctggattatgtggatgtctttggatcaaattggtcggaagcagacaaaataaatcgacttaaattacacttaggtgctcatacgcgaacaatttttgaaaaacttttgccaaccgagaaggatacattaagcaatgctctgaaaagcatcaaatcaaagttggatagtccacatttcagggaattagcttataggaaattggctacttgctatcagaaagatggtgagtcagtggacgagttcataaaacggttagttcccctagtgaatacaacgactgaccaatttccatcaggagcgagggaggagatgctctgtaggtgtctaatagagaaagtgaggcctgagtatcagcgttcgcttcaaataatggctccattaatagggaaaaatgatttcaaaaagctgacgtcttacattcaggagttagagatttcggtagaaagtgaaaagcgcttcggcattcattcattaaaaataggtagatcagagtgcaacagaaaagaggatgaaaggaacgagcaggcaaaacactcgacttcggtcagacaaaattatacgagtagggagactcggctcttctgcgaattttgcaatcgaccagggcacattcaaaatgaatgttggtattgtcctcgagattttcctggtccctctaattcagaaaatagacaaaattgggaacattcagctgagaatcatgccaaaaatgattgtgctagtgaaacacaacaattgagagagatgattgaagacttagcacttgaagtacgcgaaatgaaaggtaataggaatttttcttaggaaatcatcagtaaaataaattcttttaaaattttgagggttcatttaaaggttgaggtaattgtgttgtttttttaaaccctaatctccctattccatttcagattgcgggcaacactgaagcgaatgaacgaaattggtgggatgaaccgagtggttctattacagaaaacaggtctaacacccctcttcccattttcaggactgtcggccgaccattggaacgcaagcgattggcaacggaggacattggaccggcaccaagacgcgatgaaaattggcgaagcacaagctggagacaattcacggggacgacattcacacgcggcgaacgaggaggaagcgctacaaagtgctacaattgtggacgaacgggacacgtggcatgtcaatgccaagaaagacggcgagatgaccggagttgattgagaggaataagagagatagtggaaaagggggctttggcaaggaaaatgagtgtgttttgattttgggggtctaggttttaaattaaaataatttcgctaatttacttaggtaattaaaaattttaaaatttcatgcttcataggcaaactttgggaattgttttttcatgtgcttcggcagtaaaaatgaaaaaagtcctgatcagttctcgcagacaaaggttgatggctgggcactttgccagtgatgcctgagtcttgaactggatcagggacgatccaatgtaaggttgggagtgagtgacacgaagcataaaattttgatttaaaattggaaaaagtgcatgaaaattagcaaaattatttttgaaataattttctttgcttatgcgaattttgaagcgaaaatcttggtaagagaccagggacggtctttggtaaggttggaggtgtaaggtagatccgggttttcttgtttgccggccgaagccctatgaatttcacattctcacatttatttcatttcgcatttaatttcccttttgcttattgtcgcccctttcccgacgataattgatcgatcacattttatttttcacgtgtatttaatgttcgccatttcaagcgaagtatcttcagtctctccggaataaa

SEQ ID NO: 75668 - DNA, 433 bp, Heterodera glycines
  unsure (1)..(433): unsure at all n locations
gacgataattgaacgatcacatttcatttttcacgtgtatttaatgttcgccatttcaagcgaagtatcttcagtctctccggaataaagccacttatcccagtgtgtccatcaaaggcgggatagaatccctgggcttgatcatcccatggggcccttccttcgggagtttatgagttccctcccaatgttccccatctgccctcccaaattgcccactcccaacgccagcacgtccaccgcgcacggccgcgctactggtagcaccggatggttctgcaatttgtagacttttcatcggcctgggcggacaaaggagcaatggaacggaggtgagtcnaagagggagactaaggaggcgcctgctgagagaggaaaagcgcttcggcggtataaaggncccccggggggagactcaaaaaaatacccaaaa

SEQ ID NO: 75669 - DNA, 1806 bp, Heterodera glycines
atggacaacgacccaatccacaacaaccacaagtcgtccacgcacaacgacaacaaccgcgactacaacgactacacacacaacaaattggccaaccagatcaaccacacggccaaccgcacgcacaaccacgacaacgccaatgccatggtcaatggaccaccgaacgacaacagtatcgcgggtatggcaacaacaacggccccgtccaggaatcaaattgattcgctggcccaagagcacaatcacaaccgaaaaaggacgcgacgtcttctggtgctcgaatcacggcagcactctctgggaactgaaaggtccggaaaactcgccattctgccgtccaccaccggcacttactgcgcaatggacaccactaaccatcacgctgtacaccaagatccaccggccggaaccaatcgcaacggcatggcactgctccatcaaaacgacgacggaaaattattacacaaacatcgtcggcgataagttcgtcgaaatcaacaaagaatttccgttggtctccaaacgactctgccaacgaatggcacatcagcaagaatgcccactcgccaaaacggaaatgcaccacgatgataacaatcgtatttgggcaacaaacgaccaactccaagtggatttccctggaccaatcaccggactcttcaaagggaaacaaaccagctcggcaacaaattgctttgcgcaaccagcaacactgttcgtcaaatggcacagtctccaactcctgtcgccaatccatcgcgcagaccactgcaattacgcctccgagtattgccaactgcaagacaacagctcactcatctggacttcagcatgtccaaacgacaactgcttcatgtgcgacttccaagaagccgaagaaatccacggagaattcaccaagctcaacggtcaaacaacagcattttggatctcggaagaccgacaaaaggcactgaccttcaccgagacacatgcagtccaagcatgcgacgggagacaaatcgtcctatcggagcagaacttcggcattccaaaagagcaatatgacatcatcatgagcaaccacacaagagagagacgcaacgtgcaacccgagcaactcgcttcgcagctttcagctgctcaacttgccacaacaatggcactctcgcagctctatttgaaggaatgccagcgcaatgtgcgtgtcagcaacccaacgcttcaggcacggaaactcctcaagcgcgataatctgcaagcccgatggatcagcgaaacaacaatcgaagtgtttccctgtgttccaatctccctctccaacatcagctaccgaacaacaaaggactgctacaagttcattccggtcacaatacatttgccaaacgcaacaagagacgcattcctcgacccggagatgcgcatcctctcactcatctcaaaaatcgcaagttgctcaccatttcgctaccatcaccttcaagtgcaacaaaaccccaacttgtgggtgcgaatcgactcaagaaatggaaacgtccaacgactggcacaaacagtcatccatgagctttacgagacgatcctcaacaaaacggacaacgatttggatctccacccactgatcttccatcagtggcagctcgacaacgacaccgacttcgccagccttccgcacatcgacgaattcgaagattcggaagaattcaaaaacaagctggaagagcaaacgacgcaacgagcggaagcactcggcgccttacccggcggaatcgaaggatggaccgtcagatggctccaagaacggctacaggaagccatccaatg

SEQ ID NO: 75670 - DNA, 1704 bp, Heterodera glycines
atggccagtgaacagatcagagaggaaatgtccgggagtaagttttctaatccaatttaatgctataaataactcatagtttttcgagttttttttcctttatgtacattttttaaggtacggctgttgcggtgctaatcaaagacaattttatttattgcggttcttttcttttttgtacattaatttttctctattttttaagcaaatgctggtgattcgagggctgtcgcttctgttgatggcaagaaaattataaattttaacgttttaaaatgaatttttttaaggcagggcaattcctttaagcattgaccacaaaccaagtgagtagaatcttttatggattaggaaaaaacaaacaaaattctctcatttttaagacaatgaggaggaaagtcgaaggatattcgcagccggcggatatgtaataattatacaatttttatgcttttttatttcactgttaaggtggaatttggccgagtcaatggcaatttggcactgtccagggcatttggcgactttggtttcaagcagaacaattccaaatcggcacaggaacaaattgtcactggtatgaatattttgtgactaataatagaacgcgtatagcaaatagaataaacagtaaaacttgaaataatttggtattttgtaattattaattaccatttttagcatgccctgaagtggaaataaatgccatcactgccgagcatgagtttattttgctcgcttgcgatggaatttgggacgttattggcaatcaggaagcagtcaatttttgtcgggaacggctgtaccgtggggttttgccagaaaaggtgaatttcaactgttaccacttagaaaatggcaaaggcatagattattttatcattaaaacgatggtgctttcatgggactttaacatgcattgaccctctctctttttatacatcatttaactgaaccccccccccccccccaattgtcagatttgtgagcagctcctgcaaaagtgtcttgcaccggattgtgaactgagcggacttggctgtccgttttcttaattttttagttacatattcttgtttactttaggtgacaatatgaccgtcattctcgtctgtcttttgcaggtccccctcccattttttgcattgatttcccctttattttgctatgctttcccttttattaggattactctttcgacgattacctcgccaaactccgtgccaatgggacgggcttcgaattcgaacatgaagaggaagaggagggtgaaggggtggacagatattccgacgcccacccacagtccgactcagacgagcccattgaagaggaagttttctcaacaccgccaagccattcgccaccagtgctttcgtcggattcagtgagcagggagggaatgacggagcagcaggaggatggaccagtgccgaagttggagaagcaacggaacggcaccgggcaaaaaggtgagcggcacagcattttggttttctactggcaaattgaattacttccgttagttggtgtggaagatatcaccgaggatgtccatgtccctccttcacccgctggcgccgtggaatatacgcaacctgttgattcctctcctggagcacaaacgacttccaatgattcgacacaacagaggaatatgtgaaatggattatttatatgaagattttgtttttatttaattaa

SEQ ID NO: 75671 - DNA, 1362 bp, Heterodera glycines
aaattctttgccgaatttgacgtgctcgaatcatttttcgacaaagttgaactgtcagcaaccgaaagttcgcaaaaggcattcgacgcgaattcgttgttgaaagtgcgcaatcggagtaagttcaattgaagcaattaaaggtggtaaacaatccaaatattatcaaattttgctttcaggattgacttgtgccgattggtcccgagttactttcaatgttccggctgaactcgttcgggagggcataacgcacgaggagttcgccgccacgaagcaacacctccaaatttttggggatttcgactgcccacagatttcgacacgcgttgaattgtgaatttttgaaaattaagcgaatattcaaacaagttgaaattgtttttctgtcatgttttttctttcccatttggatgaagtgggcatggcgacttcatcaatgccagctatgtccggggaggtccgcttctgaacacgttcattcttgctcaggcaccgctccagcagaccatccctgacttttggcgcatggtaaattagattcctttcctacaattaaattacaatggaagatttttatccatgatcattgccaaacaatgacataaaattgtgattttgattgttgttattattagtattgaggctttgtttccctctgtttttgattgtaatgttcttatccccaaaatttaaagatatggcaggagcgtagcgaatggattttcatgctttgtgaagcgaccaccgactcactgacggagagcagtgtcgtcgttggcagtgcggccaaaagtcactgcccattcttctggccaaggcatgaccatatgttcaattttagttagccgttttttaagatttgagggagaaatccgacgctttggccaacttcgtgtgaaaaatgtatccaatgacgcggccagcgatccgctgttcaccattgttcacttggaactttggctgaacacggatgaaccaaaaacggcggactatggtcatgcaaatgaaacagggacagagggcatcaaaactaagcggggaaagtgatttcagacgatggagcggcaattccctcatcgactagatcggcagcgggggcgacgcattgtccgcacaattctaagtcctttcgtcttcaactttggcactgcgattggcgcagttacaccgacttccattggcccttccgtgtgctgatacggtaattgtcatattatgccgcatatttaaaaataatgccatttttgcagggcgcgtcattccaagaacccaagtgtgattatgtgcgccgatgggtgcggacgttcgggcactttggcactgattgaggttaaaaaaaccagcaacacacatatgtaa

SEQ ID NO: 75672 - DNA, 578 bp, Heterodera glycines
atggagggctctcttggccttggagtgatgagcggcctttttctttccggccaacttcgacagtacgaataagtagtaatcattcacgttaattaaatcaaagatacatttattatgcctcttcaaaaattacatttaaagataaacccaaattgaaattgccaattaattatttgccatttttcttgccccccccttctgttacaaattctttgctcatcttttgccatttttcccaaaatttcagttttttcggttaccctttggtgttccttctgctcgtcctcctccatttgcttattcttgccattgtttttctgtttttccgtgagctcgcctccgatgagatggaaaggcgacggacgacggacagccgacgaaggcgccaatcgcttcttccgcctgcggacgaagcgcaagcggaagacagagacgccgccgccgcagcagtggcggcggagggcgaaaacggcgaaggacggcaaagtgccaacaattaaaatacaattaccatatttcctaaaatacagcccctctctcaactaaattacaaccccccttttgaggagggttgaaaa

SEQ ID NO: 75673 - DNA, 831 bp, Heterodera glycines
gttcagaatatatttaaaaaatgacacttcatttgttgcttgtccttcccgttttggcgatggctttcgcttttggcaattgccaaagtcaaactataattagcggttccggctgtgtgtaccatgtgagtgtttactagagatgcgccgtgagtgaaaaaacccgtgaaattcacggtagccgtgattcacggcgcatctctagtgtttacctaatttgaatattttgaattatgccgtcgactcagtagcagcaaatggcatttctctccactgattagttgctatttgaaaatgatttttataaattaaaattaccgttaattgtcatcgttaattatgtgaacagaacggatgggtgactgaaagtggacgctcgcggccgttgaccaccaacgaacgcagtcaacttgacaattaccagcgccaatcgcaaagtgccgccgctgctttttccgccgcatttcgtccgccctttccttttggagggccaattaacccgcagttgaatttgccgcaggttataaaccgtttcaaattaaataaattgttaaaatagtaaaatagttttaaatctgctcttttgaaagtggttgatcgatcctcgcgctttcccatcacttaattaatttgccatgcttttcctgtgctttcagatgccatgtttctgttccgctgcctcatgcgcgggcggtgtgtcatgggttgacaattaatcagtgggccgatggacagagggaattaattattcactaatgaaacgaatttgtctgattcacagtcgggggattacaataaagcacataaatattgcggataaaatgctttcta

SEQ ID NO: 75674 - DNA, 1147 bp, Heterodera glycines; identical to SEQ ID NO: 1746

SEQ ID NO: 75675 - DNA, 494 bp, Heterodera glycines
atgaaatttgttctcccatttactttcttctgctgcctcgcctttccatgcatttgctacggtaattttaaaatttcaaaattcaaaaaataattaatttttaaattacatttcacagggatccattgcaaagtcggaatgtacgacacgtcgggcaatgctgctattgtggcatcagaatgtgctgctgatcaacaattctgttctgcgattggttgcgcaatcggtgggccactcactaattacctaattaagacaatttgatgaatttaatttccgtcttaggcactgaacagatcaccgttttttgggcttgtgaagaacaaaatgacactcaagtgctcgtcaacagagcatcatcattcaacaataacacgtgccttgctcatattggtcataagggtgccaacatgtccaatgaacagttcgattttcgcgagttggaaaaattgatcaattgaagggtaataagccaaaaaaaaattgaaattaaa

SEQ ID NO: 75676 - DNA, 499 bp, Heterodera glycines
atgttggcattttcacggatggttcggccggtcggaattggaagttcattgaattcaatttgaactgttttataaaaaaaggaaaatataaatttaattttttaataattttcatccatttaataatatattattgttgccaccaaaagacagaaacgcaaaaaaaaaaatttgaaatttatgaaatttttgaggaattttaccaaaacggcacattttttagtcaaaaagcaggcttaacataattaaacaattaagtatcttttctaatattattattattatttaatttttttgcgctcactttttcccttcatcggcaaataattcgggttgtcaaaattaaaattggccatattctctcccttggcaccaaattggcaatggcacttttggccaaatgccaggaatttgctcatctcctcacaatcgttgtccaaggaacaaccccaaaaggtaaaaatttcagagagtgtaaaaaagggtgattgacaatcaa

SEQ ID NO: 75677 - DNA, 622 bp, Heterodera glycines
atggccaatgagcaagttaaactgcccgaaaaggagaagcccggcccgattccgaccatttcgccggaggcacttgagaaaagtgagggcaaaatgccaaaaaatagttttgcataaaaaatgacagcgaactgtggcacaaaaattatgagggaaaacaatgccaaagggaaaaatggatggtaatgagtcgagaattgtgccataaaaatgagggaaatagcgccaagattgcaaaaatgccacgaatattatgccataattggaattgcatgaaaattaatttatatccccgattagatcgaaattgttagaaaaggagaattgaattttaaatagatcgtcgaaaattaaaaaaataaacatttaaattataaggcatccagtgcaaggcgggctattttcgtggaaacggatacggtactacagcggccagagaatgccgaggcggagagtactgttacacggtcagctgcgaaataggtccaatttatgtatgattttatttttagcctttgataattttgatcaatctcgatcaatcaatcgatcaataatcgattttatatcaattgttcgattagttagaccgatcgataaatcaatgcggcgatctgattga

SEQ ID NO: 75678 - DNA, 620 bp, Heterodera glycines
atggatgtgccgtgggcagctgcattggcgggtgagtgggacgcgccgacggaagattgggcggcggcggcggacgcggcgccggccgttgagccggcgatgccggttgcggacgcggcgttggcggcggttggggcggaggcttcgtaagtggacgcggtgtcggtttcttcggcattagcaggaaaaaataaatgccggaaaaatggattttaattattattaaaaatcaaaaaatttgttaatgcacatagtggcaattagagaaatttaattaaaaaaaatttgtgtgtaggtatcgtaaccggaaaatgtgctagtgatacagtgtccttttgaaaatggcatgcggtacaatgaggaaagaattcatcaagacacttaaattcatcgcgctccccttctcttaggatgggtgcctcaaatcttttcaggatttagggttttccggtagagagaccggatttgtgggccggaccctgccagaatttttcaaatgatttttcgaccctgatcaggcaatttttcgaaaaatgcatcaaaatcacaggaggccgcgaaaatataattttttcttttgaatccaatccaggatttaattatcgaatcctagcaataaa

SEQ ID NO: 75679 - DNA, 315 bp, Heterodera glycines
atgcgtgtgttcaattcaaaagcattgttttatggatttgttccaacaatttcagtttacaatgacaattcttgcttaaagctcaaactcattgtgtggcaattttgtcgaaataataaacaaatattacccagttacaaataaataataatttaattatttattttttaattattatgcatcactatcaattaaaaaatttattgtcagctgaagagccaattctgttgtgaataatatgcataaatcaccgatgctgagaaccactaattttttgctttcattttcaaccaaacaaattacttaaatttttga

SEQ ID NO: 75680 - DNA, 2419 bp, Heterodera glycines
  unsure (1)..(2419): unsure at all n locations
atgtcaatttgcgttgatttgcgtctgtcttctgcggatttgccggtttgtggtcggcatcggcgtgtgccgtcccgcactctgctgttcttctgctcaatttttgaggcactgaacttttggacccgactccgttgggtgacacttttgcgccgacggttggccatcgtcgacggatctgtgagcagtttttttcgatggcatttgtgtggatatcatttcggattttcacacattttggaactctgctagaatttcggacacccttgaaagaatttccgaaattttgaggcttaaaatttgaaatgcaacgggacggatgtgatatgattaattacaattaatgtctttcccctcccctcacttttgggcttcaattgtgcgactttcccttcgccgtcggcggccgacatcaaagaaagcgacggactttcacattgacaagcgctggtgataattgcgtttattcgccgtttaaaaatatttaaaaatgtgcctctaactgttttttatgtgcgcgtttaatgacttttggcttttttaattgcctaaaaacagggaagaggatggaagcgcatttccacttctctaaatctcgggatcagatttcgaggctcagaaaaggaatttggagttgatatatctgggtcatccccccccccaaactaatttttttttaaatttattatgacgaatttgtaatcatttttccaaaatttttcaaaaaatcgccgaaaataaaaaccgggcttggcacccttctccgaatacgtaaaatatccctggccatgggtggcaccactggcaaacacacaggcaattattaaaaagtatttcctttaattacatttttcagggactcccgtctctcggcactcgtacaaaagggtaagcaacaaaacaaattttgccacaatttcccaattttccccctcattttcagttctgcatgtcgagaccggtccgttgtaattcttgagcatcgcctatctttatgtacttaaattatctgtcttttcaccctttcttaagagctttggcgcctttcaacgcttggcggcgctgtgtccgcaatgggcttttttagtcggaaatttgtaataaattatatattttttttaatttgggggtggtcgggattctgcgatttggctggactggtgccaaaatcccgacttttttcatttacatcatccaattaaggggagctggggtgggagaaggtggaaaagcctggcgcaaaaaatagggctacgtttacccctctatctgtcccccccccccgagaattttttaaaaattttaaaacaaaatttctctaaaaacagacaaaaaaaaatgaattttgaaataaaaaaaatttcgcgattttcaaaatttttgagaattctggattttcaaaaaattttgcagaaaaacgctgaaaattttaaaagactttcttcttggatttacttattaaattttctaaaaaatttttgggggaaacgatttctcccgaaaaatcgagacggcaagcgatcccataattgtttttaattgtttaatcgccaaaatccttcccccnnccccccccccaattcttcccacagattcggcatgcctttgtgatttccattcgtcagctccgtttggccatcgaaattggtgacccggtgctgatttcgcgctgcttcctttacatttcactcgcatttgcccaaaaagggcaattccttccggcactcaaaattgtgcggtacgttaagccaataaataaaaatgccaaataattttcaaaaaatgttccctttttcagccaggaatggaacagaggcactgagcttaggtccgcttttttgctgaattgcacccgcggcgtttggtccactatcaaatggctgatgatgaacagaaaagtgatgatgcttaaataatttcgcacacatattttttccttttaatttattgttttgtgttttggctaattaatcaaattaattgacaattttatgtctagaatataacatgcagatgaaaactaccaattgttgtggtcaaaaagcctcattaataatgagtagagctcgcaaaaaaaaggcaccaaaaatagcgaaaaaggcactataacaggcatgaaaaaattgaaaaaaggcacgaaaatcccgaaaaaggcattaaaaattttttattaaagatttttagtgagcaaaactcgtaaaacttaaccaaaaaacttaattttgctcatttaatgattattaaatatttataatgttttcgaaaaagaaaatttttaaaactaaaattttttaccaagaaaaaaaaattattttttgagaaaatttttaaattcttagggggcgtattttcccgattttattgcattttaatggaatttttggtaaaaaagccaaaaggcaccaaaacggcaaataaa

SEQ ID NO: 75681 - DNA, 1139 bp, Heterodera glycines
atgcgaatgaactgcgatgattatgctcatcaagattcgcaatggcgctgcttcgttcgttcggccacttttcgaattgtctcacaaaaagatggggcgaaggattccattgggatattttgtgaccgtgctttttacaacaaatcaaccatcaggggatttgaaaatttcttttcctttacggtgagttccaattggaattattattaccttaattgacatattatgattaattaagaaattgatggacccgaaaagtggttttcacaacagagaagaggacaaagtgacgttggtcattgatgttatagttaaaaataaaaaaacggagaaatttgtttctgatcccaacaaatccaattggacactttcgatggaaattgaaaaactgtcggaatttgcgcgagaagtcattaagagtgaacgtaaaagcgaaactgtgcgcatcaaaggattttcatggcaaattttggcagaaataagtgagggaatggaaagcactgacaatgtgaaatgtttgggcattttccactcacgacaatttttaacaaatatatataattgaaccgactttactaatttaactctttaaaaaagaaaatgtcaaaaaattgaaaaagaaaatttaaatatttttggtttttaaaaattaattcatttcttttttgtttctgctgaaaagaatggctctgaactggttcaccaaatttgttgcagtcaacggcagaatcacacttcaaatctcggcctcataagggtgcattttgttttaaaaaaattagcgctttactttaaataagtctgttcaataattattagtgtcggggttgtatgaattgttttccttggttctagtctgcatttggcttgctaacgaaaattcgaatttttgaaaattctcactattccataaaattgattaaaaaggctaaaagtagtcacaaatcattgaaacagcaaaaaaatgatctatcatattcgtgatcagcgacctcgaaaacccccgggtacttggttacaggactttttaaagcgaaaaaaaattgaaaaaaaatttaaaccaaaaagaagtgcaaaaaattttcaaaagaggcctctttttaagtagcgccatttccctttcttgtcaagaaaataaa

SEQ ID NO: 75682 - DNA, 1215 bp, Heterodera glycines
atgtccaagcctcgaaatgtccataagggtaaaaacacgaaatgtccaaaactcgaaaaagctcataaaaacccggaaaaggagtctaatttagggttttcggggtcgctgaatacgaatacgaccttcatatcgccccttgcctaacccttgatccacccgaagaagaaataagttcaaaaatttttaaaatatgtgctgtactgacgacttagatttttctattcatttagaccaaatgataagtaataagcttgaaagtctacaaaaactcggaagaagcgttatatttcagacatttcaaacacaaatgaggatgccgtgaatttgggagtggagctttgcgaaccgaatgccgtgataattttctacaacgttgaacaacagactttgaacgaggttgaagttcaataatgaacctttgagcgcggaaaaacaaattttgggagacattgcctatggttgaatggtacgtatgaagcgacgcaaaaaaatagactaaaattattccttttcagaagtgttctttctttgccacttttgccttccagcgatttgttttcgtattttttcgtcgatttccaaaagtttaattatttttaagctgaactagtgacaacaatttcgaccatcaattcagaacacagctacgcggctactccaatacagctcggcatcggctcaccggcgccttgaactctacatggctaaccactgtgactccacaagaacagcctgttcaatattcgttgagctcgctatcgacttcaacagcgccttcagccatacattttttcacgaatgtcgtttatattaaaaatttcaatggactggaggcaacccatctgcattttatggttgttttttaatttactacaggcaaatttaaaaaaatatgtttgaaaggtctctgccaccaccctgccctcccggacttcatctgtaaaattaatgaaaacaccgactgatggatggacgctgcccgatctgagctgctcgccatttcattcgcatgtgacaaaagggatacaccatacaggacgccgtcattatgcgaattttgccggacgagtaatgcaacaacaatggtgaaatccatggccaggtgacgccgatcggtcttcaaattgaaggacattcaagaaaattgaaggatttcgagaattttgaggattcgattgtccatgttccgttataaattttattgtattttta

SEQ ID NO: 75683 - DNA, 3413 bp, Heterodera glycines
atgtcattcgaccatccacttcggcatggtcatctcccaattgtgcttgtccgaaagcctgatgcctcctatcgaatttgtgttgactaccggaagctcaaccaattgacgaagcgatcgacatattatttaccgaggattaaatcgatccttgacgaagtctctgggaaaaaatatttctccgtggcggactgctcaagcggattttttcacattaaattggcgaaaggacacgaagaaaggagcgcattcatctgccacatgggactgttcgaatggctacgttgtcccttcggattggcgggagcaccaacaaccttccaacgagccatggaagaagtccgacaaatgtgctcagcgacatttcttgtgtatttggacgattgcataatcggctcaatgactgaagatgaacattttcgggacatcaatacctttttaagaacgatgactgaagttggattcagactgaaaccagagaaatgcagatttgcgttgggagagattcgctatttgggacatttaatttcggctaatggcgttcggatagatccaaaggatttggagccaattcacaaattgaggaaaccgaaaaatatcaccgaactccgatccttgattggaatgctgtcatattttcgaaaattcgtctacggatttgcagaaatacttcaacccatttatgagttgacaaaaaatgaaagcacgacagaatggggaccaccacatgagaaagccttggaggaattgaagacaaagctgatgactgctccagttttggctccaccaaaattcggacaaccattcgttgtggaaacagatgccagcataaaagcaattgccggatgtcttctacaagaaaaccgtgaaggcgaagtccatccgatttgttacttcagccgagtgctaacaaaacatgaaaagcgctattcggtggtcgaattagaagccttagcaatttgtgcttccctcaaaaattttcgaccatatttggaaggagctggaaaatcaacagtgatcacggataattcggctttgacatcattattccggcggaaggacttggaagggcgactcagtcgataccaattggctatcatggcattcgatgttgaaatcattcatcgccctggaaaacggaaccaattttgtgaccatctttcacgatacttggacgacaacgacacacaaattaattggctgaaaattgaaccaaaaatttcacaaagtgaaatgcgcgaggctcaaaaacaggagacggacacacaaaagagacgggaaactttgaagaaggatcaaaattcagaggagccaaatgaatttactggaaaatggagaattactgaagatcttttgtgtgcaatggaccgaggcgaatggaaaatttatgtgccaagcagtctgagacaaagagtgatgaaggaataccactctgaccctttccaaggaggtcacctgggcgagaagcggacaaaagacaaaatccgacgaaatttgtactgggaaggaatggaaaaggacattcaaaaatttgtgagaacctgcgacgcgtgccaaaaacggaaaataattgggaaccaaatgagctctgagcccatttgtccaattgtaccagcgtcacagccatgcgaaagacttcacttggatttgatgggaccattgaagacggcaaaaggcggatttcaatacatcttgatgataatcgattcattttcaaaatatatgacggcactaccactgtgggaacaatctgcgacgacggtgacaacagcattcgttgacaaatttctatgccaatttggaattccaaaaatcgttgtgacggactgtggaacacaattcctcagttcgacatttgagtcacttgctaaaacttggggattcaaacaccaaacgaccgtgccataccaccaatcagcgaatggacaagtggaacgattcaaccgaacacttgcggacatgctagtcaccacgactggcggaaaagattgggctgccgcgcttccgatgctttgctttgcatataatacatcgattaactcacaaataaatcattcgccattctttgtgcttcatggatttgatccacggcttcccagtgagatgctactcgaaaaagacggcgaagagtacaatgacatggccatatacgtccaagagctgaccaaaaggatggaagaagcaaaatctcggatcagagaaagtctgaagaagtgtgctaatcggatgatccagcaacaaaaaggcacgaaagaagtccgatggacggaaggaatgcttgttttgagacgcagaaatgacaaaaagaataaattggaaccaaattatgaagggccatttcgcgtcatcaaaattgagaagccaaatttgcaaatccgagaacttgaccccgatggacaaccattcactgtacacatggaccaatgcaagccatacttcacaaacgaagaagcggaacaggacactgaatcattggagaatgagaaaccaaaacataaaaatgggaataaaaagctgggagattcaaaattggaagaatcggacgaagaaatgcatgatggggaaacaattgtggcatgtataagtgaagggaatccactgggccaaccaaaagacaaggaagaaatggaaacaccacatcaaattgagatccgattggatggcacaaattttttcgcttatctcagcacttcaaattttcccgcaacttccaccatttccgaaaatttaatcaaaaatgactgggaaatatttgaagatgacgacaaatacgtgataatgtggatttttgatgaaaatttcaaactccgaatttccaacggatgggacgaaatgttttttggaacgggagttcgaaaatttctaaaaaattcgggaaatttaacgatggaagacgggaaagcattttatcacgaacaatttattaatgaacaaaaccaaattttcgcccaaccaataataccggatgtttggatcaccctgcgcgatcacacccctgcgcgacaaacaaatccatttaaccccttttttgagacgatcgagccccaaaatattcaatcattttcatcttttaatcggacatttcattcaatcagccatcacactcacacaatcaattcgacaaatttacagcaaaaaatgtctcgattcgactcccttcttacccactcaaatcattctacatcaaaaaattcgtctccaacaccgcctgccattttaatttcttccgactcggactccgaaggagaatctgaccaacaacaacaacaaaaacataacaacaaattccaaccccgcccctatgcaccaatcctcacgccgttctcagtggatcaggtccaagtgattcacccggaccaagtcgagatgtataagaaggactaccgattggccgaagaagatcggcaaataca

SEQ ID NO: 75684 - DNA, 833 bp, Heterodera glycines
tgttttggagaaccagcaaaaagagcagtcaaaaggtgaggggaagaaaattaaaacgaaaataaaatttatcaatttaaatgcttatttacatttattaaaaattaattcgattttaagcaactcaaaaaattcaaaatgatcagaagaaaattgtggaaacaatcagtgcattagagcagaaccaaagcagaggaaggtaaattaaggggtaaaaaaatatatttaaataataaaacaattttattttaaaatggattattttaaggcattttcaaatttccgacaaaattattgggatgccaattttcgtcatgagaacctccaaatcattggcaacaaaagtctcattgtccattataagagaaatttttctggtatttttataaataatttactttactaatttctcctcaaaaggttactgttcttctgcctttgcaaaacatccgattttgctggacaaaaattcgtctgacaatttttactacgaaatttcaattggaaatttgaaatggtaagagagagattttttattttttgaatataaaatttttcagaaatattcaaattttaattattatttctttattattattaatttctcagttggatgagcttcggatttgcagtcaaacagcagaacaaattggatggaacaattcgaagccgaaagggcacttatgcaattgacagtgatggaaagatttggattaatgggaaagaaacaggaataaatgtcgaatattcctacggtgcaggcgataccgtaggaattggcgtcaattctgttattcggcagatcactttcaccaaaaatggaaaacaattgg

SEQ ID NO: 75685 - DNA, 489 bp, Heterodera glycines
atgtcaatttcgaccaattcaataaattgtggagatgatttcacagcaacagaaaatggaggtatgtaaatgaaatgggagaaaaattgaaagtttgaaaactgaaattaaatgaatatttcaaccaaaaaagattaaattatggtatttttagaagtgaatggcgctgcaattaatttggaaaatgatggacaatttgatggaaacaatgaattgattgctgatcaacaacaacagcttaaggtgggcgaatgacataaacaatttggataaatttgaattttatgtgggacaaaaaaattttttggtactatgtggtttataccagggatggcacagaattccgacttccgatttccgaaaatttttggggcctcggaatgccatccctggtttataccccataagaaaaatttttttttgaggcataaagatgcctccagaggttttcggggtcgctaagcacgaatctgaactcatatcaataaa

SEQ ID NO: 75686 - DNA, 722 bp, Heterodera glycines
  unsure (1)..(722): unsure at all n locations
atgggggataatggagactggggattnattttcaaccctttcctagactgggggataattggagattgggggattaatggagattgggggataattagagcaaatacggtaattgcattgggtgagcaataaaaaggggatttgtttttatacatatccaaatttgagatttgcgtttaatttattcgggccgggtcagtttagtctggccgttttagtcagagggtcggtttagtctggccgttttagtcagagggtcggtttagtctggccgttttagtcagagggtcggtttagtctggccgttttagtcagagggtcggtttagtctggttagctctttcacccacaaattaattactttttataaaatatcattttttgtcgagcatatacttatatataactttaaaatttctgttcacctacaaagaagtgtttgcgttgcgaatttttcggacctaataacaaatgcaaaggtgtatgcaaaaataaaacaaagaatatttttttaaattcagcctacacattgacattaatgctaatgtcctcaaaattattggaagccacacatgcgacatgagcgccgagcagtggagtgtcagcgacgtgtgacccagctaaaacggcgtgcagttgagacgtggaaagcgccggctacaattcgtgtacaagtcttgcagaacacaacaacaccaatgttagctgcttttccgaataaa

SEQ ID NO: 75687 - DNA, 610 bp, Heterodera glycines
atgaatgcatcagtctggaaaataggtctttttgaaaaattaaaagatggcaaaatggcggagtgccgcgaatgcaaagcaaatggaagagccaaatatgaatttggcctgccagacttcagcaccaaatcgttcaaaaaccatctttttcaacaatccatgctaattcggaatatgtcaagaattttgaagaactggagaaggcgaaaaaaaaatccaaagaaaaagttgagaaacagccgacgatcgaaaatttaataggcacgaatttgaccagcagcggtagttttgtgttggtaaattttacggattttggttttttaggcattttgtctgtggctgacaaacgaattatcagcatgataacctgtaacaatctgtcatttggtttgctatctgacccgacttttaaagctcagtgtaaatatgagctgaaggatgaaagcgattatcggtaaaagtcaaagcaattaaaaaataattttttaggaaaagagttctcccggaagcatacaaactcgtcaaggcaaaaatactcaaggatttagatgattgcgaattttcaaaatttgattttattgacgcgattacatttttgattttcaactca

SEQ ID NO: 75688 - DNA, 1302 bp, Heterodera glycines
atgggccaaatgtggggaagcgagcttaatcttttttcgaaagataatgatggatgactccttttttcagcaatctctgcgacgacgtttggttggacacattggcatggatcaatcgtggagaagtcggcatgaagttcgcgctggtcaatgctcggttcaacactttggtggacaggcatttcgagcagaggaagtggtgcttcggcgagtttcacatctgtgagcggatgacggaagaatcgggcgcagaaatcatgacatcgatcgacggctccgacttcagcacgttgccattgcccaccactccgctgccggacagtgtcgtcggcttccaatcaatctccatttggtggccatttgctttccaaattgaccttaaaacatttgcctcctttctgcaggtacatcaacgaagaggtcatcaattttctgtgcacaattcgccgtctcctcgccgaagacattgcgctggaattttccacttacttcacagaatatcgcagttggaaagtgatggcacgacacatttggccgctgttgcgggatgggatcagcactttgttcctgaagaagtgtgacttggccatgctccgtaaacacgtgtcgcccaccgtgctgttcgactgtgccggcctgcaccgaatccacacgcaaatgctgcccgagtgtccgtctgctgacggtgctgtcgatggagagaatgctgatgttgacccgacatgccgtgaattgtacacgtgggttcacacgcagcgcgaggaagggcacggaccggtgtcactgaagctgaacaaatggaaggaaggcaaatggaacgactttgtgaacaacttgttcaaggtggtgctgtgcatctttaaatccgtcattttttattcatttccccaaaatttcagtccttcaccactgctgcgttcccggtcaattacattgtcatctcgaagttgcccttccgcttcaaggagtgtggtgcccaaatggagaaccatcagacgcaagaacggctgtccatgtcaagtcgcgtttacaaagtgaagaatggtggcggagcattaaaaacgaaagtggctgttgtacgcttcccgatggatttcggtgatgaacagcttgaagcttggcggcgcattgcgaagattatggacgatgttcctgccaatttggtccacattggcttcaacgacaacgaaattgggtgagtcattggacggggcggggaatcggtccgattcgtacgtaatttttctatgtttttagggaactgccatctgccgctgcatccgaattgagaaccaaatcgtt

SEQ ID NO: 75689 - DNA, 862 bp, Heterodera glycines
atgtcgggtcaacatcagcattctctccatcgacagcaccgtcagcagacggacactcgggcagcatttgcgtgtggattcggtgcaggccggcacagtcgaacagcacggtgggcgacacgtgtttacggagcatggccaagtcacacttcttcaggaacaaagtgctgatcccatcccgcaacagcggccaaatgtgtcgtgccatcactttccaactgcgatattctgtgaagtaagtggaaaattccagcgcaatgtcttcggcgaggagacggcgaattgtgcacagaaaattgatgacctcttcgttgatgtacctgcagaaaggaggcaaatgttttaaggtcaatttggaaagcaaatggccaccaaatggagattgattggaagccgacgacactgtccggcagcggagtggtgggcaatggcaacgtgctgaagtcggagccgtcgatcgatgtcatgatttctgcgcccgattcttccgtcatccgctcacagatgtgaaactcgccgaagcaccacttcctctgctcgaaatgcctgtccaccaaagtgttgaaccgagcattgaccagcgcgaacttcatgccgacttctccacgattgatccatgccaatgtgtccaaccaaacgtcgtcgcagagattgctgaaaaaaggagtcatccatcattatctttcgaaaaaagattaagctcgcttccccacatttggcccatgcgtcgctgctgttgctgatgataaataatggtgttgtcactgtgccgtttgactggtgccgttgcgcccacttctgcgtcggttgtttcgactgctgcgtcgttgcccagaaaaggaggaaagtgaaatgaaaatga

SEQ ID NO: 75690 - DNA, 2327 bp, Heterodera glycines
atggccaatttggacaactacggcaatgatacggtaattaaatgccaagataattatatcatagccaaatttgcagttttatttggccttcaaagatgtccatcccagctggtcactgattggatttgcaggaatttatggaatcattgcactaattggcatcattttcaatttttctgtaatttttatcacaatcaaaaaaaagttggtttgattaattttaatttatatcaatttaaccattttttttataattttacaaatttatttttggtcactcaatggcacaaccaattatcttttggcactttgctgcttttttgaatcgctttttcaacttggccatttcctttttgtgtacaacgcattttctggccagaatttcattgagtgtcgcctagcagcaaaaattttatttattcctttcattggaattggtaattttaatataaaaaattatagaaaaatattttttaatatatttaaatttaggtggaattgctccagcaatatttttcactggcattgatcgactgattgcaattgctttttcggaattgtatacaaattacaatattatccaattttgttaattacagtaattttaagccatgacaaacttaaaaagcaactgtatttggcgctgctaacaattctttgtgtgttctatggtttctgctactctgcttcggtgtaccaaaattcaaaattgggtgatcagatgaccacgggatcttttgattttttaaaggtttgattttgtttattttatttaaaactatttatttttagaatggatcattattaaatacagttggttttttgcttgtttcaatgactttcattatttatgtttgtgttggaattgtgatacgtatcaaagcatcaggtaaaaatccacgctaaattatgcatgccccaatttgcccgattgatggacaaaattgtttttattcatgttttaaattttagtgtttaaaatttttgactaattaaatcatgcttatctgggatgggccaaattgaaaaataaaaagcgaaatttgcgaaactgaaaaatgcgaaatgaaaaaaaagcaaaatgcggaaagccaataggtgcgtaaatgcgaaaggcgaaaagcgaatttttttcaaaaatttaccaatagtcaaaatcatagattttgaggttgtgatgcaaaaaacaaaacaaaatttctgcattttccggttaaatccttttctcagatcacaaaaaatgacaaattctacccattttgggattaaaatttcataaatcaaggtaaaatgagggtcaggcagtgccgacaggcgccgccggaaaatttttggaaattgtaattaaatgtgatagaaaaagttgcaaaagtttcaaaaatttacaatttttttaaaaaataccgaaaaaggcatgaaaaaagcaccatacgtcaaaaaggcacgaaaattacgtgcccggaataaggcaccaaatcgcaaaaaaaagcaaaaaaaatgcaccaaaaagtttaagatagaaccttctgcagcccaaaataataataaactgtaagcattcgttttaaaaatttaacgctccaaaaatattcatttttaggggtggaattttcgcattttgcgccaaaaggcgaaatgcgaaatgccaaaaaatgcgaaaagcgaaacctaggcccatccctgatgcttattgtcttggattcataattgccaaaaatttgttttaattaactctttttttaggtttgccatccgctgattcgatcaatcgtcgcacttttcgtgcactttttttcattatcactgtgaatgtcggcggttattggttttctgcaatttcccatttgctgttaattcccacaatttcatctccgatcactgcttggtttggccatgcaattgccgcattttctgggattattggcgcagtgtcaaatggaccaattttatattttacaaggtatgaaaatttaattttttttttaattattttcaattttagtacggagtatcggcaagcattccaaacggagtttccatttgttttcagacgaatttcaaaccaaaatcaagtggttccactgcagaatacacaattatgagaatttctttgtaaagataaaggaaatttaaaacttactagtatttaattgaaatgacatcagtttgtctaattgttgtcaataagtattaaaattacaactaattaatgaattttcatataactcttttgttgaaattatgaaaatttcactgaaaaatttttaaataatttttctttgtccatcattaatttatagataaaaggtaaatttataaattcgaaa

SEQ ID NO: 75691 - DNA, 863 bp, Heterodera glycines
tcaaatgccattgatgaaattggcatcgatgatggcttaaatgagctcgaaattggcgagtcttttctgctcagagtgccgttcccacttcggctcccattttgtcacattattcttacggtaattaaatttaaaaaatataaaatatttaattaaattttagttttacgcagcggactctcagcaaatgatggtttgaaaaattttattttttgattttataaaatttaaatttcagggattttgcaaattgggacccaccggaagcataagcagagggacaatccaatggagacaaatgatcaaaaaattgggtatgttttattttaatagaataaatatttgtaattattaatattaattaaaaaaattaatttttagattttttaaaaattggatagctttttttacttataaaaatcgaaaaaaataatttaaaaattgaattttcggcgctccaatcgcggcttggcatcagctgattgtgtccgatgaatgcccttcttcgtctgccgttgcacctgccacgggcagtggccaccgttcgccgccaccgccaccgtcggacgaacgccgacataccgtaccccgtcggcgtaccaccgtttccgtgccgccgcttactgttggaacgctgaaagcacttaccgcggcggcgcaacaacgactccgtgtaaaagcaattgaaaataattaatattaattcccgcctcccttgatttaattgatttggttagggtaattattaattattttttgaaatttaattcattctaattcatttaagaatgaaccaaagggacatcataacaatgccacgtcgggcaaagaatgtgcaccaattcgggcataaatttccaaga

SEQ ID NO: 75692 - DNA, 129 bp, Heterodera glycines
atgtcctcccatcttttgttttccttcttggtcttttgttcgctgctcatttccgccattttcgcctgtggaggtggcccggcactgccggctgaccctttcgacccattgggcccgtggcatcaacgg

SEQ ID NO: 75693 - DNA, 513 bp, Heterodera glycines
atgccggatggtttgaaattcgtatttttcaagtcgcgcagtgatcagtgcaattccggaagaggtgagtgatcgaaaaacatttatacaaaacaaaaatgagtgaaaatatttggaactttcctagattctggaaattttcggagatcgaaattatgaatattttaacttccttttatttcgaattttaattttaatgcgtttcaaaatttgattaattaaaatcagccgatcactttttttgcttacaattaggttcgaatgcaaacattcaaaggcgtttgtgggccgggctttttgaagaacgaaagtggcgaagtggtggacaaaattcgccacgtttggttcaacgacgaactgaacgttgagcagaaacaggcggaggcaagaaaaaaagagggagacaaaacgccaaatttaagtgccaaaattaaaaccattgcccatttcagttccgcaaaattgccaaagaaatgctcaaaggcgaatcggttggaatcggagaaatttaaa

SEQ ID NO: 75694 - DNA, 1275 bp, Heterodera glycines
atggctgcgaatttacttcatggtgaaggaaacatcactgatgcagatgttttgctcgttgatgaaagcactcaagctcagtgggcggtggtggttcacctagttgcgcggatgcctaagctcaaggcattgcttttgacgggcgatcggcatcagctcggagtgcatcttcaagaactacctgacattttccactccggatatggattggaaagcgtcatccttcaagcagaggcttcgatagggatgaactacacattcctcacaaagatgtacagaagccatccatttttggcaaagctcatcagctatgcctcatatgaattgcacaatgagcaactcattccagcaagaagcgctgaagaacgctcactcatcacgggctcagattttcttctgccggttcaagaatgtcctgtgggactaattaatgctttctcatcattccgtgtggacccaaaaagcgattcgctcacagatgaccatcaaacagaagtggcatcgttcttggtacaagcacttttggaacattttggcaacgatttttcgtcaagaataatcgttctgtgtatgtacacgtaccaaacttcggaaattgaacgaaagctgaagcactgcggtgttcgtgcactcacagttgatgcctaccaggcacaggagtgcgatgtcatcatcatagtgacaacaagatccaagtattccgagatgggatccggaagaacggacaacatgcacttctttgaagacgatcaacgggctactgttgctctctcaagagcccgccacgctgtcttcatcattggagatttggtttcaataagtgcaggacaagtgtggaagcgcttcatcgaaatggcgataacaagaacaagcgtagtccgagccgagtatgttttggcacttttgggacgaacactcgtgaggtcgtcgacatgcctatttgattcggccaaaagagaatcggtggaggatgaaggctttcttgaaagttgggcattgaagcatgggttgcgcctggaccgaacgaatgcctttggacaacaacaatcacagcagccgcgagctccctcattccaattccagaatcgccactttcctgcactacagacgacagggccctcagatcaagccggtccatctggcaacggtggtcaacaaagaggtgcgcctactttggcaccacagtatggaagaggtcaaggaagacgtggcccggacaaccagtggatgcactacggcggaaacccgaaacgacagaagggtggcagacgctga

SEQ ID NO: 75695 - DNA, 1556 bp, Heterodera glycines
atgtttcctttctctggtggggatccacctaatcgaagcgctgcggcgtcaaacaatgcactgacagaccctgaggggctctccaatgatttgcctgagttatcagtagttgataaattaatgtttgctggaaagattttaagcacaccagcacggttgtctgatgtggacaagctccatacggacttagttcggactgaggatggtgtcaatcgcatgacacgtcaccttaacaggaagataaatcaaaccaatagggacttgactgaactcaaggatgatactcaaaccttgataactcaagtaaatactcttgcaaatagttatggtacagttcaagtgttgcaaaaccaaaatcagtcaccattagtcaacaaccctcctgtcttaaattgggcaactccctctccactcaggaatccaaataatagctttggcaatgctaatacttcggtggttgaagccatacatagtgaggaagaggatgaggaatttgaattaaatccttcgggattccatcatgttaacatgcttttcgctgaaagcagtccctctttcacgatcttctccggaaattctccattagaattcgatcgatgggcaagaaagttcatggacctgcttgactgcaatggcagaaagtgggatgattctgaaaaggtggcacgcctcaaggcatgccttgatggtgaaccaagacgtatctttgataatttaatgcctgcccacaaagcaacttcttcggaagccattcaaaaaatcaaggaaaaccttgacactccacaaaataaagaactcatctatcaggcactaagcatgtgtaagcaaagggaaggagaatctgtagatgagtttagtgcacgactgattcctctaattgaggccaccacggcggaccttacaactaatgctagtgaggaagtactctgtcgagcatttttggaaaaattgaatccaaatctcaaatttctcactcgaaccctgagtgggcccgtcagaagggattttcaaatattgagaatgaatgcacgggaagcagaaatgatgcatagagagattcctaaatctattccagcacctcttttcccaatttcggaacaacaaaatccgagattcaacaacaccgagccgccgaaccacccggaagccaactttagaacatgggctcccacaggctctaacagagagcctataagtcccagacagaggaaccggaacaattgggataacaatgcccaagcctcaagaggctcttttaacagatcaaataatcatcctcaaaatgacagaagatggaacaatcgcactttcagaaatgaaagacgatggaataatcaaacccctcaaaatgaccgacgctggaatgctcggccagtttgcaactactgtgggaaggttggtcacctcgcgtttaaatgttttaaacgtcgtgaggaatttacccaaccatccaagaatttgaatttcatcagagcaattgatgaacaaaacagattgataaacgatctttcaactaaagtcaatagtttaacttttagaaacgaccaatccgctga

SEQ ID NO: 75696 - DNA, 254 bp, Heterodera glycines
atggattttattgctcaaaatgccaatggatttgaccagaaaaacgaatatttggaaatagtatgttttgctaattcatttggtaagtgaataattcaaattttacaaaattcctatagcaaaattttaagaaagccccaatggacaatatgccgaatgaattaatttgaaatggacagacgatgatcaaaaaagtgatcagcttatggtatttcctatttcaacattattttaaatcatatttctcaggacta

SEQ ID NO: 75697 - DNA, 695 bp, Heterodera glycines
atggtgttcatctttttcctcttcattttcctcgcccaggtaaatttaattttaattttaatttaataatttttcattttcattcatttttaaaattaatttttatggtgttaaggtgtgtattttttgggccatgtttttgaacatgccggcccgtggagccggcattcgtcgtcgccgacctcgtcgcccggatggagtcaatgaggacaatgcgcctcgccctctccaggtgttcagcgtggtgcgcgaggtaatgtttgccttttcctttcctgccccctatttttagcatttttctttttttttgaagcgtcgcacggggcgagagtcgccccagcgtttcgggctgcgcgttgagcgcgttggtgtggaggaggtagagagggggggatgggaaggaaatattttgtttgtttttcctttgcccaggtctcgaaggaccctcccgagcgtcgcaccgaagaggcgggcgccaaagtggtatgggaagggggggattgtgtgcataaatgcatttcatcataatcttttttgcagggagtggaggccaaatgagcagcggcgaaaaagaatgagggattttgaagagaatgaggaattttgaagagagtgtgaagaattttaaaaggaaaaattaaaggatgatttttaaaaatcacatttaaatttttaaaattttcctaccaaataaa

SEQ ID NO: 75698 - DNA, 472 bp, Heterodera glycines
agatgagatagaaaaaaaacaacaataggcttggagagcccttgaagagctgcaccggatgcaagtgccgccgttgctgtacgtttagcggttgctgtgcaatgacggaaaattgctaaatcagaaaaaaccaaatattatcaggaatacactctcccatctcacgcgtagacaaaccgaatggtatatgttcgaacggcaagttgactaccgtacctaattaatatttttgggatgccaattgttaagtgcgtaactgttatgaaaaaaggattcgaaaaactgtgataaccccattcagagactagctaaaaaaatcagaataatcagaataggattggatttgcgtaccaattattatttttataatgggtaggttaaatgcgaaacagttgacaaaagttgttataactccattcagagatgagatagaaaaaaacaacaataggcttggagagcccttgaagagctg

SEQ ID NO: 75699 - DNA, 464 bp, Heterodera glycines
agatgagatagaaaaaaaacaacaataggcttggagagcccttgaagagctgcaccggatgcaagtgccgccgttgctgtacgtttagcggttgctgtgcaatgacggaaaattgctaaatcagaaaaaaccaaatattatcaggaatacactctcccatctcacgcgtagacaaaccgaatggtatatgttcgaacggcaagttgactaccgtacctaattaatatttttgggatgccaattgttaagtgcgtaactgttatgaaaaaaggattcgaaaaactgtgataaccccattcagagactagctaaaaaaatcagaataggattggatttgcgtaccaattattatttttataatgggtaggttaaatgcgaaacagttgacaaaagttgttataactccattcagagatgagatagaaaaaaaacaacaataggcttggagagcccttgaagagctg

SEQ ID NO: 75700 - DNA, 184 bp, Heterodera glycines
agcccttgaagagctgcaccggatgcaagtgccgccgttgctgtacgtttagcggttgctgtgcaatgacggaaaattgctaaatcagaaaaaaccaaatattatcaggaatacactctcccatctcacccgtagacaaaccgaatggtatatgttcgaacggcaagttgactaccgtacctaa

SEQ ID NO: 75701 - DNA, 359 bp, Heterodera glycines
atgcccgatgaacgtgttttacacctcgaatgttttaaaagcggcgattatggtgtaagtaactgtgatgaattccatataaaaaaattttttcctcaattttaatcagatgatggaattgtacgggccggaccgtgctaaagagatgctgatcgatttgcgcgactatgctgaggcgtacggaatgccatgtcagcatgtgaagatgctgttgtacaaaatggacaaaggactgatcaaatggaagggaaccaagccatgaaacggatgatgagtgatcagagattttggctactggacgaaaggggggataattgaactcattggtgctgggggtgatggatgcgatataaaaaaaa

SEQ ID NO: 75702 - DNA, 620 bp, Heterodera glycines
ggtgcgacttttggtcgtaaataggagtcaaattttgatggttttagctcaaactttgttggcttttgttgtttaggctctctcttggcggtaggacgtgatggtggtggttcaatttttgctttcgcacgaggcgggagcggaagccggggaggtgaaggtgggtaatgaaccctgtattttttgtgttccaaatcatcatcatatgcttcgtccttttttaattttcttctgatggcaatcctctgctgagcagtgtccatctgctcaatttcacgttgagcattgtagggcagcacaggcaagtcgccatagtattgtgatggcgctggcagcgctaacccactctccaacatataatcatcatctgtatcactttccggtaagggggcagcagctgcttccgcaagaaggtcccgcacaactggttgccgtcgttgtatatcatttcgccttttctcccactgctccaaacgaccatctctccgcgatgccctagtcggtctgggaggacgttgtgggcgaggcggaggacttcctggcggggatggagcgcgacccggaggacttggtgggcgccgatgacctctcttagacggcggtggtggatgtggtggagg

SEQ ID NO: 75703 - DNA, 703 bp, Heterodera glycines
atggcagatgccatgcaggacggcgcacgttggaagaaggcgaaaacagcaatcaatgtgctcggcaaccttcttttggcggaatcattagacaacacttccgctaatgacacttcgctgaaaaatgataccgtagacatcaaaaaagaagaagaagcaaatatggaggaagaaaaggtgcaggaagagcccaaagaaaaagaggaaaacaaggaggaccttggagacattgacaaaaccctcgatgagttcttcaacagtattaaagcatccacttcaaacatgtagaccatcattgtgtgtaaaaatgttaaacacccaagcattcaacgataaagacattggctttaaattaccatttggtctaattatttcgggcccatcgtcgtcgggaaaaactcaatttctgctaaaattcattgccgaatcggaccatttaatcaccccaaggcctgtatcgatgctctattgttttggtgaaatgaatgcggcggtgcctgtacttcaaaaggcgggagtcgatgtgtacgcgggagtcccatccgaggaattaatcaaacgtctccctaagccccttttgctcattcttgacgatctgatgttgtccatcgatgagagatacctatccgatttgttcactaaaaaggctcatcatcaccaatttgcagtggtgtttgtcacacaaaatttgtttgagcgcaaa

SEQ ID NO: 75704 - DNA, 2787 bp, Heterodera glycines
  unsure (1)..(2787): unsure at all n locations
cgattaataccctatgtgagcactgtacgccggatgagcagaacgaaaagtgagcggggtgccaggcgcgtacttgtccagaagggcgcaggatttggcggattgttcgctgctcttttaacacccgttttggttgaattggcaaagaatgtcgtgagcaaaaatgcataaatacccccacatcattattgttttttcatgcaccattcattcatcattcatggcaaataaatttttacttgtccctcaagaaatttaccggggtctcacctccatgtcggacacgggcgatattaatttggatgccgttaggcgtgacttagaccgcgccagggtcgtacgaacacatccttctcgcaaaaatgtcaactacaaccagcagcttaggcgatatttaaaaatgcggcaagagttaacagacaaaccggccaaagttgagctcaccaaagggataagcgtgctgttgaggcgaggcgctgaagatgaggagggtgaagttgtggacactccaccccggcctcccgctcctccaccaccacctccgccgcctggacgacgtccatggcgtgggccaattcctccaccacatccaccaccgccgtctaagagaggtcatcggcgcccaccaagtcctccgggtcgcgctccatccccgccaggaagtcctccgcctcgcccacaacgtcctcccagaccgactagggcatcgcggagagatggtcgtttggagcagtgggagaaaaggcgaaatgatatacaacgacggcaaccagttgtgcgggaccttcttgcggaagcagctgctgcccccttaccggaaagtgatacagatgatgattatatgttggagagtgggttagcgctgccagcgccatcacaatactatggcgacttgcctgtgctgccctacaatgctcaacgtgaaattgagcagatggacactgctcagcagaggattgccatcagaagaaaattaaaaaaggacgaagcatatgatgatgatttggaacacaaaaaatacagggttcattacccaccttcacctccccggcttccgctcccgcctcgtgcgaaagcaaaaattgaaccaccaccatcacgtcctaccgccaagagagagcctaaacaacaaaagccaacaaagtttgagctaaaaccatcaaaatttgactcctatttacgaccaaaagtcgcaccgccgcctcggtcgaaaaaagaacctgaattcccgcttgaccttcggccatccacatccaggcaggctggacacttgcctcccccagcacccaaaattataccaaaacctgaaccgacaaagaggcctgtgccataccgtatcccgaaaagagagccaaaaattgttgaacaacagccacagccgctgcaacaaccccttcctgcttctgccgtcgaagaagaaatgcccaccgttcctccgcctaggcgggggaccaaacgccactaccccgtaaatggtgagaatgatggtgaggtgcgcattagaaaacgcgtgaggcaagcgcgaagggtgagagtacagtactcacccgaaccgggcccatcaacttctgcacaaagggatgagcaacaacaacagcgtgaactgtttgccatcccgtcaaatcagctgaccatgaatcagcgggttgaacgactgtacatcaaatgcaaccgttatgcggatcgtatgggcgttcgaggaaatacaattaacacagcaaacggcaagccgttggcacatagcaatttgcgaatgaccatcaggtatataattgacaggagagcgggccgccctaccattaagccacctggagcggccatatttgaagagaggcttaggcaagatccaattttgtattcatggacggctcctccaaagaaaacagcacagagcaaaacaacccggacgccgcagacaatcaagaaggaatttcgcccgaaaaagtggagttgatcaactccacgcttgacaagctgtacaacgacccatcctccccagcggcgttcgcaggtgttacagcgttgtggaaagaggcgcgaaaaaagttgaaaaatttacggaaaaaggatgtgcagcattatttggaggggcaccgcacctacactctgatgcgcccccgaagggtgcgctttccaagagccaaaactgttgcggctgggttcatgaccgatgttcaagtggatttggccgattttcaggcgctttcgcgccacaatcggggtcaccgatacctgcttgttgcggttgatgtgctgtccaaacgcctgtttgttgtaccgctgaaaaacaagagagccgacgagatgttggaggcattcagacaactcatcgaccaaatgccaatggtccacatcgcatcttctccgacaaaggcacagaattcaagaacagattgttgaaggaattcttcgatgagcaggaaattgagaagcatgagtcagtgcattcatcagtcaaggcatcggttgctgagcgggccatccggaatgtgaagcagcgactgtaccggtattttgctcaaaaggagacgctgaattgggtggatgcagtacagaaaattgtggacggaattaacagcgctccaactcgtgttcacgggatgcgccccattgatgttgacttttcaaatgcgcagaaagtgtggaagcgattgtacggacaccctgcccttcaaaagcggacgccacgcttccgtaaagatgaatttgtgcgcatgagcagagagaaagggcaatttgagaagggatatttaccanaattatggagacgaaatcctggagattgat

SEQ ID NO: 75705 - DNA, 1334 bp, Heterodera glycines
atgaacgcgcaaatgttggcgggtcttaaggaggagttcgcggcgtacaaggtttgttgcaaaagggaaatgcaattccaccttataatcgccactgaaggaacgtgccgagttcgctttggccgaatccaatgttggcacttccgcggcgacgacaaatggtggcggtggcgctgctttgtcttcggaatgtcagcaattgttcgacacgctttcgacacgtaacgcacaaatggcggagttaaggcaagccaatggcactcgcattcactcaatttcctttttattggcttccaaatgccctctccctccctttgctttggcaattattaatttgcgtctctttcagtgcaaaatgttcctttttggaggaggagttgcgcagtgggcaattgcactcgaaaacactgctggaggagctcaattcgctgcacgaccaacagcaaacgcaacgccaacggtgggcgagcgaaaggcaacgaatgatgggggaacacgcggaacgaatgcgagcggaagagacactgcggactgagttgcggagagagttgcaggcaaatggagggcgaagcccccgggggggggggggaggagggtcaaggaattttggggctgaggtaaaactatttttgcgattgaccattttttgtgctctcttgctcgttgtcagcagttattttcgggctactttttttgcggcatacttttcctaaaaagaaaaatggggacagaaggagtccgtcgctgatggtgccgctaggcgccgccggaatttttttttcgaaaatttaatttaattaagacattttatcgaccaaatttgaaatgtttttttaaggaaaatagctaaaaagcgtgtttttaaaattcttgaaatatttttaaaagggtaacgcccaagccgcgtaacccttggcatttgtgttttgtgatctttaaatcttgcattaaaaaaaaccatttttattttcttaaaggcaacacgcgaacgcgaagcagccgcagctgcgagccgacaaatggagcaacaaaatgggctccaaaaacagcagacggagatggacgaattgcgcagagagtgcgacagactttcacgcgaattgggcgaagcgaaagtgggcgaattggaattggaatttgaaattcaaatttcgcttttccattcgtttgcctttgtttagacattgctcaaatgctcttcagcttcaaaatgcccttctcagtcccttctctcttttcggcccaatcagctgaccaccctaaagcatcaatcgaagccgtcgccgctcaatttgggttacccatcgcaactgttcaccgccacgacaaataaa

SEQ ID NO: 75706 - DNA, 908 bp, Heterodera glycines
atggacattaatccgccgaaaatgaatgggccaaaggatgaaactgacaatgaatcggagtcaagaaaggacgggacgaaggaaaaggacggggacggaccaatggccaaggaccaaccaggcgaagtgccggtgcagcaacagcacggcacggggggcggcggcacggcgttggcgaaggtttgccttttcggtgccatcgcccaacggcgccttttcagttggatttgctttctcgcgaggacctggtcaaattggcgaagaagcaactgatcatgctgaaggacactcgcagacagctgacaaaggccaaaaaagaggcaaaaaacgaattgtcattattagggcatttgcaaagactgtccccacaattagcctattaatccccttttttgttcagtccgaagaatacgcggtccaaatgcgccaactctctgtcaaagtgtcgtcggactcgaactccgctccaggcaaaggcgacgcaatgatcgcaatggaattggcggactataaaaatgcgttaattgcggcacggaaggaattggcggacaatgccacgaaaatgggcgagaaggaagcaattgttgaggtggacaaaatgacaaacggagacgggaattggtggaattaaattccaatcagaaaagggcttacaagacaggcttatccagggggagggagaatttgccccaaatcccaaaatcaaaagtaataattttcaaacaaaatttggtgcatttttaaaatttaatcaatttataaattccgttattttgaaaaactttcaccctgattctgaatgtactcaaaattttgtttaaatattttacgattttcccattttaattctgaaacttttaaaaatgggtgaccctttagcaaaaacaactgaagaaacaagaaataaa

SEQ ID NO: 75707 - DNA, 527 bp, Heterodera glycines
ttcatttaatccctccccaaatttttaagctcttggcttacaagcggtcagccgcgcttccgttccatgtgggagcgttactgtcgcggtgtgaatgccattgtttttatggtacattttggtggccatttttactttcatcacgacactttcgtcattgttcaggtcgatgctgctgacaaatccaaactcgagccggccaaaagtgagctgatgcaattgctgagcaagccccaattggaggccatccccgtgctggtgcttggcaacaaaaaagaccttcccgacgctctcgacgagggccaactaatcgacgcgatgaatctcgagtccatccaaaaccgggaaatctgctgctattccatctcctgcaaggaaaagtcgaacattggtacggcaccaaattacaaataaacatcgccactattttgatttcaaatcctattttgtcattggcatccgccatttatttgctgttttcagatatcactctgcaatggctgatccaacactcaaagacggcacgt

SEQ ID NO: 75708 - DNA, 264 bp, Heterodera glycines
atggcagtgagttgtcccagaagccaggagcgccacgtaatataaaaaacagctctcactcaagaaaactaactcaattcacaacaacttcacactttaattcaagtaaaacagaacattacagaagacaaacacaccaaaaggagaccaaccaacaacaactcaatgaatgaggaaagggcataagtcagttacaaatcaataagataaaagggagacaaaaacagacatgcacacaaacaaaatgccaataattataataaa

SEQ ID NO: 75709 - DNA, 943 bp, Heterodera glycines
atgactgcagtgcattcgtttttgagttcgaattcgcctttgaacgtcgtattgggaggcaaccgagggcttgaaaatgatgctgtttggagacacagtgaaattttggatgaacgagaaatgcgacgccgattatttgcagtgagtgccaacaacaacaacctgctcagatgtatgaaagaggagaataaacgtagagagatggaacgaccgattcgatcgaataattttctgcaaaattttgaattgagaaatcctaacaccacggcatttgctcaggtgtaccctcccgttcatgaatcggcacctccaccaaattttgatcgaaatgaaggacaaatgcagtacacacaaccgcgggtcgacaacaaccaagacccgattttcgtgcggcaaattgcggtccattcgaaattaaccgcaaggcatatcacagcaaatccccaacatcatttaactatgttggagaatgaagcttctcaaggccaaatttggcaaaatgatcgaattttggcccatgcaatcaaaagtttggacaatttctcctattcgatgacattgaattcattgccagaattgaagggaaattcgggctcagatcaagtgagatcatttttccaacgcttcgatatcgccactgaggaatggcctgaagctaaacggctaaacgcacttcggtcgaagagttcgggacgcgttgagcgggcacttaatgttgccgtcgcaaacaatccatttcagtacgaattcattaaacgagcattgattcatcagcttgagtcgacagatgcgcgacatatgtcagcttttgatgaattaatgaatggcgtttttcgccggaataacgaagccattgatgactgaaaccaaaaggaggtgttggacaaattctgatcgaaagcggaagaaagttgaaaagaaaccatcaaacactgcgacccaa

SEQ ID NO: 75710 - DNA, 1208 bp, Heterodera glycines
atggtcaaccggacccgcatctcggaaggtggacgaatggaagaccgttgccaagttcgggaagccaacgccattgaacaaaattcgattcaagaccccaccttgtcccatccccccatttctggctgtttccctggacagtctctccacgtccattcacaattccgcgccggcagtgtcgcaaatcgcgacagaggagagggtcctggtaattttggaacacaaaattgttcatacactacagtgttaatgtattgtgatgataaaaactttatgatttaaataattgtcgaaattattcgtcgtgcttagatgaaagatgcaattgagtgataccaatattttaaaattaggctcattataggcgaaagtatgagtaattttctgtccaaatttttccatttgattaagcattttaaaatttgtctcacttttagattagtatattacgtaaaaattaatcaaatcacatcattaatttattttaacgtcatgaaattgttaatattctaaatggtttttatttgcgttattccttgtaatttgtatctataaaattttatttagatctcacgcaaaaaatacagatcaatgtatcaagtcacagatccatatagaaattgtttttttctgaagtattgcgtgtttgaacagttatctatttgtcaaatatgtatctttcaatatttttcatctgctaattaaaagaccatatttatttatggagtttttatcaactcttattttaaaattttaaaattaatattttttcacatgtgttcattaaatagggttttatttgtttaagtcgcttaaatttattatttggacaatcaataaaaatatttataaaaaattttcgaaatatttttatataataatttattttcgtttataaaatattatgttgagtaaggttataatagagttttaatagcaaatctaattattcattatctttaaaagttttgtttttaaataattaatcttaaaaaattaattttttttaaattgaaatcctgaaaaatattatttaacctaaaaatttaaactcttctagtagatttattgcaatcacttcagttaattagattagctctgattagactaaactttgtacatgttgtcaaaaatagaataaatattcaaattatgttttagaacaattaaccagttttagaggtctattatttgctaactccttttaa

SEQ ID NO: 75711 - DNA, 1233 bp, Heterodera glycines
atgacaaaacaaagacaatctcattcagttcgagtgccaatgcattttgctcaaatgtttttgctgtttatgatctcaactttccatgctcaattggttgctgttgataatttaaatccgagacttgaaaaattgtcaattaaggtaataaaaacattctattaatacatttaattatctttcatttatttttttaattaaaatcattttgaaaatatattaaaaatgttttttaattcatttttgtattatcaaatttataataattcttttaatatttaaagcataaaattttaaaataattaaattattttgtaatatttttgagtaaagccattctgatctgagcaaggtagaagaattaattgcgaaaaaatatttaaacaataattcttttttttcttcaaagagatgcattaatttaagatttaatgattgtcttattataaagggttaattgttatttatcaatattttcaaaaaaaaatatttcaaaattttcaaaaattttttacaatttatttaattactgaatcatttcgaattatttattatttttttaattttaggagccagaatttataccaacttgatacatcaatttttaaattaaataattaacgaattaatttttttttcattttattattatttatatattcaattttattctctgtctcactccctctctttcactcttctctctctcactccctctctctctttctgtcaaaaatgatgcatctcattaacaacgatcgcgttttttgttatcatcataaaaatgatattttatcattgacgattttcgactattattttattactttttccacgacagtggcagcccttttcaatcaatgctaacaatgatgaatacgtgaatggcttatttatttatttttttgtatttttaaattaatttcaagttttgctaacctcgtccaaaaaaatttagctgagtttgttgaggattttacgaatactgttcgttcttttccttggtgcgccaccacattagactccgtttatgaatattttatttcttttttcaaaatttttttttatctattcgggtttaaaatttatgaacagataacaaacaaaatttatttgtgatcaaagacctttaaatttttattaaaaaaattacattgaattgaatcatatgattaatattgaatataaagtaaatgcatacaaaattttctcatttttaaaataatttcttaa

SEQ ID NO: 75712 - DNA, 454 bp, Heterodera glycines
atgttaaagcatctgggtaaaatggtggtaaggaatatttccgaatttctctcgattttcctatgggtttttcgtttacctaactttgtcatggctgatgtcggacgagcacttagaaaatctgtaatcccaactacgggtcggggtcgttttcgcgtggggcgagtttttgaactataacttttttctttgtcaaccaaatccaataatcttggtatcattcgatagccctaagtgttctttattagcctacaaaatttggaaaaattttgttaaggtccaaaaaagttatggtcagaagagttcaacaaaccaaattttccaacttttttggctcgaactttttttatactgaacgaaattttttggaattttgcaggctaatagtgcatctggagggctttcgaatgataccaagattgttggatttggttggcaaagaaaaaagttatag

SEQ ID NO: 75713 - DNA, 1183 bp, Heterodera glycines
atgcctcaaacagaaaccttcgctatcttaatcgtaggattaatgcaacaaatgaggcaatctttaaactttctgaggaacttaatactgggctggcaaccatggcatcccggattgattcccttaactaatcaattccggccccctagtccccctcgatttcataatagaaattggcagcaaactcccaaccagaccccctcatgttattattgtaaaaagcctggtcatgtaatcagtgaatgtcggatcctcgcctataaaaatcaaaacagaaattcgcaaaattggacgtcccaacctcctatgttcacccatagcaaccccaacagtattccaatctcccgaccccctccctataacagtggtagaggaaatcaacctcatcaaagaggcacatggcggaaccaacagtcttttcatcatgatcaaaggggtgcatggagaaatcagcaacccttccaccatgacaatcggaattggaatcgctacccaaatcccaaccagccttatggccgaggacgacaaattaattcccttaacacctatgattcccttcccccagactcattccaaaatctttcaatgtctgataatggtccccacccttcatttaacactcttacattctctgaccaagtccaacaacccgttactgcctcaccatctcaaatcaaagaacagctcgtgtgctctggctctgctgataagcaaccaaatctcacggatgctttaaaatccgaaccaaagcctgtttcccccactcctattgtcacaaattgggaaccacacccgcgcagctcaaatttttcaatagctccctttctaactcgttttaattttatcttgtgtatcattactctttctctaagtgcttctttggtatcatcctctcacagtcaatcatccttaaaagtcctccctatggtttgtcagacacacgttgagggcacaatttggtctcttcccatttggctaccatgtccaaaattaaagcatactccttctgacacccctatcaaacaacctattcgccttttccaaccgaacccattcgaacaaaaatccaaggcatgggtgtgcaggaaggtaaagaaatccctgattgagtacaccaatccatggaatgatttaatcattaagcaactcccgtccgaaaatctcccagtattattagatgaat

SEQ ID NO: 75714 - DNA, 1204 bp, Heterodera glycines
atgcaattcggtcgcattgacaacgaatcgttcacaatggacgtggtcagtgttaagcattgaacatttagcaattaaaaaattaatttattcgtttgcttattagcgataccctctctcaccggttcaagcctttggaattggtcagaatattcaatttcaaaatgaatttttgaatctgttttttcaattaagcaatgagcagcttccatggcaaattggcatgcgaatgaacagagaaatgaaaaagaagaaaaagattatgatgaagccaatgtttacaatttatttggaaaaataaaacaaaaacaaaaaataaaataaataattatatttgggagaagggaattaattaattgttcttttaacaaatagtgtaaatgtgatcatttgctgccacctttcttactgtatgtaccataggtaataagtccaatagaaaaaattccaaatggcgaaaaccatcggaaaaagcagccgcgaatagcggtcaatttgaagtcctttgcgtgaaaaataaatgctttgtcgcagaaagtgatttgtgatcttgtaaaattgggttttttataaattattaaaatttaaaaatgcaataccaaaggattcgaatcaaaatctttgatttccttaatattttcattaatgtcaatgcgttccggcggctttaatgatgcgcgaaactgaaaaattaacagaaccgtttaagtttatttaataatttcaattcgtgagtgattatccaaagcttctcgcgtgctgctgatcattttgtttcttctggcgaaatgtgccgacgacatttattcgtggaggacgcggcacaaaatccaacacgggaatggtcagagtaattttgttttattttgttcagcaatagaatcagtgaataaataagtaattaacagtttaatccaatattaagtacatatttatgtaccaattaagtctaggaattgcagctggtgccgataggatccatcggacaaataattttttatatcttgttaagaaatggtaaatacgatattcaaaaaatttccatatttttgatcctttatacagaccagataaacagcgatttcaattagtgcatgttactatttttttatattttcaggatccattcactggtcatccggatgaaacacgttctcgtggtcagcaacagtcctcgcatatctgcagttgcggagcagttcag

SEQ ID NO: 75715 - DNA, 346 bp, Heterodera glycines
atggaaattaaggaaaaatcaaagaatacttccacaagtgcggtgcttccattaacggcggaagaacggatgaaacgtcgacaaattatgaggacggaagtgttggttggattttcattttaaaaaggccggcttttatttatttttctatatattattaattaaggaaaatgtggaaccttttctcaaaatgaagaaaaaaagtttggaagatgcgcaggaggacgagcgcgagaatttccgccgttttaaaatgtttgagacgagcgcacttcagcaaaaggcaaagtcagaaaagaatggcattttggatgctggttgctatgaatttatggttcaggattga

SEQ ID NO: 75716 - DNA, 801 bp, Heterodera glycines
atgcagcagaacattttggctactcgattagttcagcaggagcgtgagcgcgaggctgtcaataatttctaccaacagcaacaacaacgggctgttcaacagaaccatctggtgcgaccgctcataatggtgccgaggttgtcctctcaactcgacttggtaaggttttagttttgccttactaataattcgttgactgtaggccaatgttttgttgctacataacccggaaagtgttgacgatgccgcaactttggttttgaacgggggttcaagtgtcacttccgcccttgcccatgcggcaaatccccatcacattgtggccaatgcgatggccactgctacggcccctgagccacagccgggtgagtcccttggcaaatggttttttctgttcaaactttctcctccgacagttggcgtctcccttgaacaaatcaagaaacactcacaaaaactttcgtatgtgaaggaccccgatgtgccgtaagtccctccataataaaaaaaaacctatcgactcattggcttagggagcaagaacgcgaccgatgcacagtttgtctatgcgatttcgataccgacgacgaattgcgagcgttgaactgtactcatttgtttcatacggaatgcattgaccggtggttgcaatacaacaaaaaatgcccggtgtgccgtgttgacatggacaaaggcggtgcgggaagcagcgccatggctgccgaagcagccgtcatgctcaatgcttacgctgctgctgctgctgcagcctcgacaacgtcgaacgcgacctcttgttga

SEQ ID NO: 75717 - DNA, 821 bp, Heterodera glycines
atgggcaaaaatgatcaaaccggagagaccgaatacggactcaaacaggtaattaacgaaaaaattatctatcatttaataagagtcaattaaaaattactataattttaattatatgatttttcgggcaaaagcttgtgttgaaaagtcgactccatggagaggaaattctgggaataggggggagggtaactcttttctgacttttccgattctgaggtggtcggctagggataaaatataatcttaagattgaagtgaacattggccaagctggtggcttcgtgaattcagcaaatatcacaaaattgcacagacggacgatggccttggccgggtttgacacgtcaaaagagaaaatgccggacaatccgtgcgataccatgctgatcaatgcattaataatggcatggtaagtccaatctggcattagcatctatttaattttatttagcaaaaaaagagttgtataaaatggaaaaaataaaagttatggattaattaattttataaaatggaaaaaataaaagttatggattaattaattttttaaacatttaaaattaatttaaaatgaaaattaaatacaataattattccttggttatataaggcttattattagtttatatatttattgattgtttaatttcttaatcaaattaaaggaaaaagtttgatgacaaagatgcaattattttaattgtcgctggtaaattataccgagactatgagcaatatcagctgaattatttgatggaaaatgtttcaaaaaatgaaataaaaattgttcaaatgtcattaacagaagccgctgaaga

SEQ ID NO: 75718 - DNA, 263 bp, Heterodera glycines
atgatacatagaaaagtaattatagaaatctccacctttaaaatactgctaatttcagttcctaccgtatgcactgactgcgcttgttcaaaaattacgcgtggaaaagccgttaggaacagtgaaaatggcttaaaagcggcaatgtcaggactaaagcaaaaagaaaaaaatgaaatcaaaatgccaaattacagagtttattttcaattagaatagtgaagtgggaagcaaatgccctttcgttaatttattcgattgga

SEQ ID NO: 75719 - DNA, 1366 bp, Heterodera glycines
cagcctgggctagtttttttcttccaaccatttttgtttcacctccattacacatacaattagaccgagttggagcagaacgagttttggcttgctcgcttcaacgccgcgctttcattgccggtgacggaacgcaacaaaattctcagagaacggcttggccacctcggcgaagggagttcgattaggccaccgttcttttgtgatcacggtgggtaaagtgaagaaagaacaaatctaattggacaattagtcgacaggacagtaaaagaaaaaccaagcctaaagcccaatcactcggttgggcgggggggggggggaaactgcgtaaagccatggtttttttttggttttgacattttatataatttaatttttaatctttgcactaattcgtgaaccaagttcctctaacataacgaacacatagtggctaaatcttcatcagtctttctttaatttctgccttggttcgaaccccaagctgaagaaatttatttattttattaaatttttttaaataaactactattttaatcatcaattaaaatttaattgcttttaagtcttgctacaaataaaaattatatacaattaaatatttctttccttttaaaacttagcttaaaaatccgataaaaattttagccaaaaaattctcattttttttggctttaaggccgcaacattttcctaggcgaggatgtgttcctcaattacaactgttgcgtgttggacgtttgtcgggtggaaattggggacaaatcgatggttgggcccgcggtgcaaatttacgcggctgaccacccccgggaccgagcagttcgggaccagggctgggaatacggaaggccggtgagcattgggcgcggtgtgtgggtcggaggcggtgcggtcattttgccgggcgtgacggtgggcgacggcgcaatcattgggtgagtgggtacacaaattggcaaaaaaaagaagcaatgactgactgataatttattgttcaaaaaaacccgccactgggcgtttcgtttaaccgccaaagagtagaaatgaaaaataaaatcgtaaaattgcttaaaaatccggtccgggtcttgaaaaagccgggtaccggaacccgtccaacctctactataaatcagcgatgttccggcacgtcccgaatccttaatcttagccccgatatctttctcgtcctgaatcccgattcgtctcgaaaatccatgcaatgagtgagaggtcttagcgcaaggaaaatgttcattcaatatttagagcgtatgccgtggtaacgcgcgatgtgccggagggtgccaccgttgttgggaatccggcacgtcaaatcaccaaaaaagaagagcaaaccgaa

SEQ ID NO: 75720 - DNA, 1199 bp, Heterodera glycines
atgaccacctcttcctcctcctcctccttctacattgtgttaccttccaacacgcaggtggagggcaaccgtacaaactcctttcgggtgcgcctgccacgcaaacttcagttcggctcacaatggagtgtgggtttggcggtgttgttgtacccgcattcatggccctcactgggcacaacggaagagcaatttgtccgtgtcgaatggcaaaccggcgagcaggtgcgcatcccggtgccggccagcaatgtgcgaaatcctacacaactgctgaacagcttgcaccacgcactgggcgagggcagtgaggagctggccagccgattgcgtcaaatccagctcagctaccatcagctgaccggagaggcagagacaagcgccaaaaaggaggtggaacgtctcggttcattggggctacaacaacaaccaagaaatcagaccaaacggattgatgaagaaaaacagcaacaacaacaaaaatctgatgaaatgttgaatcaacagcagaatgaacagcaagaggaatggaaacggacagagttcaatgcccattatcgtcgcacactggacacgcttgtcgctgaacgaatggaggaggcggagcgcaatttgttgaacaaacatttacccttgggtctggagctgtgggtgcagtcatatcgcaaggcacgcctgtcctgccgcttcagcttggacgtggagcagcaacggttccgactacagattgacccagtacggatcaaacaggtggagctgtccgagcagcttgcctacatactcggcttccacacgcgccacctgtcttcaccgatgagtgtggctcgctaccagccggacatgaagggcggcgtctcatccttctacgtttatgcacccggactgattgagccggtgatcatcggtgacgtatgcgtgccggtgctgcgcatggtctgcattcgaagtgcacaaccggacgacatggttgaagaggcgtacaccgctgttcagtaccatcagctgatcaccaaagagattgccgaaattttcattgagatcagaaccccaaccggcgcactgatgccctttcaatacggcacctgcacgttgacacttcattttcggaaaactccatatttttgagcacacacgcacatatattgtttatttgtttttcttgcattcacaccacatttatttatttttttgcgcgtcca

SEQ ID NO: 75721 - DNA, 1537 bp, Heterodera glycines
atgcacgtggatttcgacccattggcggtggactggtcccactttgcggaaccgccgccacgcatggacaccatgttgatgagtggtggagggagttcaatgggtggagggggtggtggtggagcggcgccgtcataccccgtcttcaccggacttccctatcaacgcggagcgggcgggattggctcaatgtttcgcagcttccttcgcttcttggtgccaattggtagacaggcgggcgcggcgatcggtcgccagggacttgagacaggatcacgtgtgctctcacagatgcttgaggggcgtaatgtgaaggaggctatgacggaggagggacgtgccggacttaaaaacttgttggacaaggcggcggacaatctgagtcggcagcgctccgtcgcagctgctgccgcgaccaatcacgggggcgccggcagaagtggtcgtggtggtggtggaggactgtttgactttaaacgttatcgcaagattgtgagcaacaacaacaacaacaacaacaaacgcaagtcgtcgtcatcatcaacaaacaacataaaaaggaataaaaaacggcggacaggcatcttacaatcaactgttggcccctcactgtcaacgccagcagcagcagcgatcgccgccaaaacaaaaggcgttcgttttgacgcattgggttccttctgaccaaagtgtggtagcacataaaaacaacagcaacaacacagcaaaaaaaaacaaaagtaaaaaatgagttgtccaaaaaaaatcagtgagcagagtgcgcttgcgttcaacagcgcactgaacgtgtttgccgttccgcccaccaatgtgtcggtgtcgcgttccttcttccgtgagctgttgccgctgtccaccatcagtcaggagggaccgtatctgttccgcatgttcaatgacaacctgtgggccgacatgtctcgtgtctacctgtttctggagttgtccatccaaaaggaggacgctggcggacgatgggtaccaattgaagcggcagaccaacttgtcggacctatccaatgcattggacaaacgtttattcaacaactcaaggtcacacatacaacatccgaacactcttcacttgcagaaaattaccaatatttaggttgaagtgcaaaacactgagttgtatgacagcggcacattgtacccctacaaggcgtatctgaccaatgagctgtccttcccaaacagtgcaaagggtcatttcatggccagcgcgggctaccatccctcgctgaagcatgacaacccgacggatgccggcttcttggcacgctgtgctcgctttgagggaggacgaaaggctcgcttcctttcccgcctggactttgacctgggcaaccaggagctgtacctattaaacaacatggacgtcctgttcaccatctaccgtgcaaagaacacattcctgttgcaaaacctggcgccagcgccggcggcaggagtagcggccaggcagcagtatgccttgtatctgcacgacataaagctgtacatgaaggtggtggag

SEQ ID NO: 75722 - DNA, 883 bp, Heterodera glycines
atgtcaaacctaagctggatgattttgtacgagccacgtgagggtggtcgtatggtaccccatccgctgttcgaccccggtccggaaatgtcggcgcgcgtcattgccaccgcaccgcttttttcgacatcatatttttgtttgttttttattatcttttaccttacatgtcatgacaatgcgcgcatcacaccgctccgtgaataataataatttttaagccacccaacacgctaatgaatcagacgacagcgtggcagatgctgtcatctccggcggcggtagcggtgtagcatacactgtaacagaagctgcgttgctgaacaacaccaccagcacactaataggcacgacgtcagccgccgccgtgacatcaacgacggcgatgaccgcggcgggggcaagagtggatggggctgttcagatttggtccaccctgttccttttcgccaactacgcaatcgtgctgccaatgttcctactgtgttggatgatggttgtacactggctccgccgctccggcctcatgccgccgcctcatcagtcaccgtcgacaccccaacacccccaccgctacggtggccttcacaccatatttgaggacaccgttgagcagaaggcagggcatgagaaagacgtacggcaacaaaaagaacaacgcagtcacacttcatcagctgctactgtcaatacagaggccatggtgcgtgaggctcaccgggtgacctcccaacttgctgccgcaattccggagcctatgcgtagcgctgtgacctcctccgtggccattcccatccttgtgtcggcggcacaaagtggcggtggtcgaaaagaagcaacgcaacacaacagtgaggaagaagaagaaaaggaacgcaattga

SEQ ID NO: 75723 - DNA, 1303 bp, Heterodera glycines
atggctaagaagcataataaggacggcaacaagcaaaacagtgggtccaacgacgatgaaagcaaaggcagcgacagcagcagcgaaagtcggtacgatgatgccatgtcggacacaaaaagccatttttctgtaagaattttaacaatttatttacaatatgattcatctacaaaaaattttaagcgcatggacaaaaataatccgagggtttgccgcttgctgaagaaaaaccgaacggccagtgaaaaggaagaagaggagcgaaacgtgcgtgaatatgatcagctaatgggctacgcgtacgacgacctcatcagcagcctcaataaagagtgggtacggtctaaagtggttacaacacagtcaacactccggaacacgaccacgacaaggatgggatttagcgtttcacagcatgttagcaggacataaacaacctcgcgacagcgggtgcggtctcactcaaccaccaaaagaaaagaggatggttcttcttatgggaaagagcgcaaatgttcaaattgtgggtccgctgagcactggttgtcccaatgtcccgaaagacaggttgtaactcgtgttttcaacccaaaaaattttgtaaacggcatgttttagtagttctttctattaaggaactgcagcgggttcggtcgcattcaaccaccaaaaaaaaggacgattttccatattggaagggtgaccagcacaaatgttcaaattgtgggtccgcttggttgtcgcaatgtcccggaaaacaggtcttttttactcatgttttctgtaaaaaaacattttatggcatattatttgttaaggaacagatgcagtcccatgggctgtatccttcagaagcagtagatatagggcgcactctttgcgggccctattcgactttttttagctggaccttggggttggttggccagcggtgttcactgggcctatttgcgcccaccagacccccgcccccctccgccaggcgtgcatcaacataagcgtatgtgtccccccaccccctccgccacctctgcccatttgtcttccttggcactttgcgggccgtatttgactttttttagctggaccttgagggtgggggttggttggtcagcggtgttcactgggcctatttacgcccaccccccgatccgcaccaacacaagcgtttgccaccccccgcccctctctgccccgtttgtcttctttgacactttgcgggccctgttccacttttttttgctgtgtatatttgttcaacgttttttactaggcgaaacatttgaatgaaaaaaataaa

SEQ ID NO: 75724 - DNA, 747 bp, Heterodera glycines
atgaaggtgcacgtaatgattgatcaaatcttgatcattttggttttcattgggaccatatgcgataacaagccttcgtattgcctgatcattaatcggcggattttaagcgaaaaaaataggtaaataaataagggcataaaaattgcgaaaaatggtaaaataggagcgaaaatttgaaactcagtgcgttttttcaatgaaattaaattaaaatcgatgaaaataacttattgagaaaattaattacaaaggaattgaatttcattcttttttcgaagcaaaaaaataattggggtttctacagaaaattctttttttcagttttttgttagtttgtattcttaatcattttttcatatctttgatgaacctattcaatgttaagcttttaatggttaaaaaattgaatgtcaatctttgtgactagtaattttttcgaatttgtaattagttatttttgtcgatggcttatagttttagtaaaacttattgataatagtggaatttttatgaatataatatttttgacagcgcggcgcaaaagtccatttttgctgggcggtgcaaatgtcgcggcgcaaatggagcggcgcaaatatccgcggcgcaactgtctgcggcgcaaatggcgcggcgcaagtgtcgactttgctgagcggcgcaagtgtccacttttgctgtgcggcgcaaatggcgcggcgcaaatgtctcatcacgcaaaaatacatataaatatgtatgtaa

SEQ ID NO: 75725 - DNA, 186 bp, Heterodera glycines
atgaaggattattgtagagaacgagccagaccggatcctggcaaaaattcgccggaccggaccggattggcactttcaaaagaccggattctggatccggtctctcataatccggtcaatccggtcaatccaggtttttctcgccggaccggattgccggatccagaaaatccgataccggatccg

SEQ ID NO: 75726 - DNA, 773 bp, Heterodera glycines
atggatttaaatggtccaaccatttcaggcccacccgacgaccatccgcacgcgtcggatggtcaagcgttggccaaatggctgcacacgccgcgcgcggacggcaggccgaaactgctaaatgtggaggcgatgacgggccaattccacgagcaaattgaacgactcaaagaagtgagtgatgatgagtgggccggtcaatttggcatcattttacttgcatttaaaaaaagaaaattatcaattaatgaattttaccccccgaaaattatggatttctttttaaatatgggtgaaatatatcgaatccatgtcccgacatttgcgcctttgtccaaaatcgggatcaaagtcaagttttttcaatccctgatcgcctaaacagatgttaggcgtaagggatttaaacattccgttttatggtgcgctgaaaaatttagaaatttctaaagaaaaaaatttgttagccgatttcgtcaatttttttttttttggattcgaatcctcttttaaagttctttttttaaatctctgatagtcacccctcagaataagcaaggggacggccgaaacaagtccaagacgccgaaaaataacttttattggtaagtttatccctcattttttgtgccattttaggcctttttgttcgcctcgtcgcccgtcagtttcgccatccgtttgtcgatgcatttgcccggtgcgtacgttccattcgccgtggacaatggccaaacgcaggaacggctgacattctgttgcattgacaaaag

SEQ ID NO: 75727 - DNA, 59 bp, Heterodera glycines
atggcccagcaaatttggcccctggcggcgtccaatgtgtgccagctgagcgtggacag

SEQ ID NO: 75728 - DNA, 1346 bp, Heterodera glycines
tcagattttgacaaggcacgcgcctaccagctggacaatatgcaattgccatttgttaacgacgcattcacttttacgacttattcggtgccgctttattctataaatttgagattattttactaaagttatctccaaaaaaacacaattttttgctctaacgcagcctaaaagtatgtattacgaaagatttaaattccccccccccttttatttttcaaaaaaaaatgcaataaaattgaaaaataggcccaaaaagatagaaacaattgtaggaatatctgagttgacaaatttgtattaatgcctacctttgtttagataatcattttgtgcactctgtacccatggatttggagttcgtgcgcacaaatggcctcatgggcttggccaggtggcgccgaggtccccccgaatttacgaattttctcaaatctttttcaatttccagatttggcactccatcgttttcatttgggtgtcttccgtcgtggagacgctcatttcgttgccattctcatattaccacacatttttcattgaacaaaagcacggatttaacaacgaagtgatccaacaattttttgcccactttttgccatgaaattcttttcagacagtgccatttttcttcaaagaccgtgccatgaaattgggtgtcagtcttgcgctcagctcaccggttgtggccctgttggtgtggatcattcgaaatgggggcccgaacttcccgatttatgcatggcttgccctttcgctcatcatttttgtgcgttttttcgaatttttttgtcagttttgatcccagacacgcaaaaattctccccgtaaatttgcataaaaatttggaggtcagagcacgcggagttctttcgttttttgaccctttccttccgttttctttaaattttgctataatctcccaactttgttcttttgaatttttttgctgtctttgtaaacatttgttcttctcactcgtaaattacggtgttttctcgaaaaacataataatttatcataaaattccaaaaaaaaaaaatcgcggaaaattttttaaattttttttctttaaattttgttgtgttcaggtgatgatgtttgtttaccctgaattcattgcgccccttttcgacaaatattcccctctgccggacagcgaattgaagcgcaaaattgaggcgttggccgaccgtgtgggctttccgttggccaaactttacgttgtcgaaagttgccatgaaaaattattggtttatccgcttttttgcattttcagattccaagcgttcctcgcacagcaatgcgtatatgtatggcttttggaacaacaaacgcatcgttct

SEQ ID NO: 75729 - DNA, 301 bp, Heterodera glycines
aacacttcctcagccaatgacaacgcacagtcaaaccaacagaaagaacaggttcagaaggttggtatctcatttccttctgtctgactttcttttcattacttttataaatttattttttcagtggaaagtcggtgatcaatgcatggcactctacgaagtggacggacagtggcactcggccaaaatcgagcagatttcgcctgaggaaaacacatgcactgtctcttacattggttccgaccggaaggccattctgaagttggagagcattgtgtatgtttttttttataaatcataa

SEQ ID NO: 75730 - DNA, 762 bp, Heterodera glycines
agttgtcaaggacgccgccaaggaggcgggaaaaaggccgaaatgcctggacgggacaaacgaaacgacgacggcaccagcaacgacgacggcaacaaattggctgttgtttggaatcgtcgccgccgtcgtcgttgttgtcattgtggcggttttcgtcataatctggctctgccgcagaaggaaaagaggtaatttaacttaaaatacgtcgggtttaggttactcggcacaatttaaaaagaccgaagctgcaaaaatgctttcttttttcgggatcatgattttttcggcggggcataaacgaaaaattccattaaatattttaattggccattatcaaaacattacatatttaattaattattttaggtagccaggttttggatgacaccgagtttggtaaaatgtatgatcggtcgacttcgaaaacattggtacttctcccttaaattgctgattttaaattttaatggtcctattcagaacacttcctcagccaatgacaacgcacagtcaaaccaacagaaagaacaggttcagaaggttggtatctcatttccttctgtctgactttcttttcattacttttataaatttattttttcagtggaaagtcggtgatcaatgcatggcactctacgaagtggacggacagtggcactcggccaaaatcgagcagatttcgcctgaggaaaacacatgcactgtctcttacattggttccgaccggaaggccattctgaagttggagagcattgt

SEQ ID NO: 75731 - DNA, 539 bp, Heterodera glycines
atggttaatgcggaggttcttaaaaataattattataaaaaataaaagatagcacaaaaagtcgcttgtataaataaaatctaacaaatgattaaaaaatgtattataaaataatgcaaaaaaaaaatttctgtttttaatcttattacgttaaaaccaataaatgaaaatgaaagtatttaaaatatcttataaaacaaaaatcctatttttgaagtaaagtgtgtttaatcaataaaaaattatctaaataaaaacacttgataaataagggaataatatttatattggttcaaaaatttcaggtgaacctatcaattgaaaatataaattataaataaaaaattttaacaaatataaaaagagatgcacgaagagatattaacaaaaatttcattgttaagaatgatggaatatcaaaatgtcttaaaatgaagaaataattaattaaacaaaatatgaaacgagagcaccaaatgcatatttaaaacatagtaatgataatcaagtaaatgagagtttaaactacgagaatataa

SEQ ID NO: 75732 - DNA, 1048 bp, Heterodera glycines
atgaatttgtgctatttaatatttttaataattttcattgcttttaaaattgaatccgggaaaatccgaccaaattttgacgaaatatttggcgaagaatggaataaaaatgaaagagaagaaaaggcgattaaaattgaacaaaatgagacaaacgagaaatcacaagcagcagttgatcaaatgggtgaagaaatggcgacatacccaaatgatcaacaaaaaagagaaataattcgaaagtttgaaacaattaaagaaaaattgagagaaagaggaaaatatcaacggaaagaccgacacaaaattgatgtgaaaattggaagaattttaggagcaaaatactataaaattaaaaaatggaaaaaagaattaaatttaaacaaaaagaaaatgaaaaagagctttatgaggagaaaaagcgcgaattcattggacgatttgatgaatttaaaagtttatataaaggcaaacagaaagaatttgtgaaggaattgggcatttcttatgacacgtttataaaatggaaaaaagaattggagccaaaatgccaaaaaagtaagaaaactatttaatcatttaattctgttatttttattcaagcatcacataaatattccgataggacaaattaagaaaagtaaagcaatatttcaaaatgaatgaaaaaataagaagatgagcaacaaaaaattgcccaagaattggaaattggaattacaacttttttcgatggaaaaaggaatttgctacaatttcgaaactttgatttatattttccatatttattagcatgattcattcttatttatgaagctgtttgttttctttgtgtcttctgatttaaattgggtcattttaaattaaatttgttgatttgaaaaaatgttaaaactcgaactaatttgcttttttaagtaatttaattcattgctaacttggttttatattttttttagtcataaaaattaatttcttaaattgtaacaaattgaaaaccgttgatgaaaacaatttctttgtccaaatgcaaggcatttaaaataaa

SEQ ID NO: 75733 - DNA, 826 bp, Heterodera glycines
atgctcaaccagcggctttactcattgtgccgcatcgattcgtcgccgaaggatctgaaggaggccgaaagggtggactttgtgcgaaccattctctcgccccaatcaattttccgccaaactcctgaagtctctcccctcattttgtttttaatttttgcttttatttcatcttttaaagatcgcccgtcttttggtttgtctgatcgtcgacaatgacattgatgacctgacaacacttggcaaagctgcccaacgtctcgtccaacttcgtctgtccgtccctctcttggaattgctgaaatatttgcgcaacatcaagggaaaggacatcagaaccatcccaaacatttcggcattttttgctaagacctttgaggcactctttgacaagatcggtccgctttattcgcttgtctaattatgacaattaattaataattagtcctcaatttttatcagatgcaccagcaactgatcggaaggaacttgcttcgctcgttttcttcttgatcaggtaggtactcgttgaaaaggctgtttaaaaggaatcttaaaattattttaacttcatttaatcgcaattttttctttttgcgtattttcagctgccccgttgagggcgatggtcatttcgctcgctccgtttctctgctggcgtcgagtggtgccaacttcgcctcttcgttggtggccatttccgataattcaacgggggtaccgttcgtaatttaatttttctcgtattagttaattacttttttcacaggaagtaaatttggccaatgaaagtggaaagatgactgatttgtgtggtggaaattga

SEQ ID NO: 75734 - DNA, 504 bp, Heterodera glycines
atggccccttttggcaaaggtgcagaattgtggtcccgatgggaattgggagccctgctttttatgatgaataactggtgatttgtattgattttatcgagcaaatttttgaagaaaaaaataacatgctttaaatgaatgaaatcattattggatttttattctctgaaaaataaaaattgatgtcctatttcaacacttttacagcatgttttatcatcggtaaaatagaaaaaataaataaatttttagtttttaattaattaattaagaagcatttttcgcgcaaaactcaaccgctacagcgaacaatgaaaaagagaaaagtggcgaaaattgcgctgacggaccgaaagttgcgacaacaattgaaagagaagaagcagagacaccaaaaagtgacgatgaaaaagaaacgaaatatttaacaaaataaataatatttaaaatttagttcaaattagaaaaacggaaacgccaagaaaatcgaaaagaataattcaa

SEQ ID NO: 75735 - DNA, 1228 bp, Heterodera glycines
atggaactgctgctgctgacaaacacagcagttttgcgtgaaattgtccaatgcaatttttatttcgttggcattccgtcggtcgacgaaagtgacgcgattaaatcggcaaaaattttgtctgagaaaattgaccaattcgccgaaaagtcgacggagcatttggtgatgaaacggattcgactgaacctagcatttatcacaatgtctttggaaaagtatttccaaaattattccacctttttcgaagcgttgaaagaaaaaacgactaaggaaattgatgaactttttcgcgattttggaaaaatggcacaaaaatttaacgccgatggcacggcaaacattctgaacttggaaagcgttaagccaaagctgctttattacttctttttcagctgcttttaccgcaacttgatgctaagaacaaatctggtgattgtttctagagccaggacgggattgggtcccgacgaaattggaattaatccccgggtcgggaggtaatcctatcccggtcttatttcaatactgagtcttggttcggcgaattagagtggttgggatcctgacctgatctctacatttgatctggaactgtcaattttttagtcagatacaatggccaacaaacaattgctgagttggctgtactcaatggaaaaggcaatggacggtcgaatgagtgaaatcattggccatcaaaacccatcgcattccgttccaaaaaaggcaacaaatgaatgaggagagaattgaaaccgtccactttatacctttttaaggacttagtttaaattcattttgtagaaagttttgctctcttagaattttcattgtctgttaggtttttgaagggacaacggaaacgaattttatgtatcttttgtattttacggtattattagagataaagcgtagcaaacaattttaatattcgaagatgaaaaaagtgattatggggctaaaaaagaacgcattgaaagcaaaaacagtacttgaaaaggaagaaagagcaaattaaaacccaaaattcaaggacaaaagacttttgcactttcaatcacacagcttgagattcaagaattgtcgttgcaagataattaaaaaaacataaagcatgtttaagatgatttccgcattgggacttcgaattccacggcaatttccgactcttgaagaaattttaacaagaaatgccacgctttttcttgtggggccggaaattaaa

SEQ ID NO: 75736 - DNA, 1506 bp, Heterodera glycines
agggatccggacagcgaggaaacgaacaaagcgacgaggaaaggggcgccgatttcatcggatattccccgataatcccaggcgtatgtgaacattttgtattaaaataattaacttaatcacgaaaattctataaaactctaaaatattttagcaacgaattgtcgatgtgaaaatggcggttgacttccgaaggcaaataacaaagtacgccttcacatacaaaatggtaatggaactgtttgagtttgaatatgtgagcaaaaatgaattggaaaatgcggacgaatgcgccgtttgtttaaatgaatttgaggaagaagaaaagttcgtcatgatacataagaatgagcggcaacagacaaagccagtaaagaattgaaattaaaattgaataattaaataagcattgattaagcatgtgtttcatgaaagctgcatctttaaatggtttgtgttgataataaagtaatgagctcataattatgcattgataggtttgagaaacaccgaatatgtccaatgtgcagaaatgaaataaaagcaaaaaaagtaaaaagaaaaataattttttaaattataaacttctttgattagtgatgtaaattaacaagtttcttttaccatattggcaaactaaattttaattttcattaacaaatgagagtgttaaggtgatggtggattttcaatgaaattttgtaggtgggtagacagaccatccctgggttatattacaaaacaaattttcctaactgcggaataaatttaaatcataatttcaaaattagttattttcaagtgtagaaactaaacattttttttgtattttttgactttaatttgtctaaagacataaataaaaaaactaaaaattaattggaatgcaacggattagaacctcaaacctaaaaaaccaggggtggtggtcccctcccacaaatttcatttggaaattgcaccatcacctgaacactttctttgtaaattcagcagataaccttgttgccgctgttgcaagctgaagatgagcagcagtaccaaactgagtgtgaaaatgcctttgcctgtctcatcgaaatggcggaaggcaacgatcaaaacgaaaattccttcaaaagaagccaagcaaaaatcgcattagatgaaatgacaaaatttgtggacaatatgaatagggaagcgatcattttattcggcatggaacgagaagaaatatcctacggagagcgaatgatcggaatggaaaatggtcaaattgtgctgattagccggcaaataccgatcaaagagtcgcttgagataattgtgcgcaatgctccacttcaagcactgatggagatgaagaaggaaagtgccatcaaactgcttaatgaaataaattgtgccgatttgaagtttcggaatttggcactgcaaacgatgcaaacaattgaaataatgacagaaaacgaaactgaagctgaggaggaaataatggccaagagattgcgattgatttattag

SEQ ID NO: 75737 - DNA, 2452 bp, Heterodera glycines; identical to SEQ ID NO: 12164
  unsure (1)..(2452): unsure at all n locations

SEQ ID NO: 75738 - DNA, 614 bp, Heterodera glycines
atgtccgtccgcaaatgtccgtccgcaaatgtccgtccgcaaatgtccgtccgcaaatgtccgtccgcaaatgtccgtccgcaaatgtccgtccgaaaatgtcccactgcgagtcaaacaaattaacgggggcggagtcattatttatttttggccataacttttttgagttaacaaaaaatttttttttttgaatttttcaggcaatagagaacctttaggcctatcgaatgatattaagaatgaaaaatttggttgctttagagcaaagttataagaaaatttttttttttttttcaaaaaattcctcaccgtctgttcattttttgcggttcaattagcacaacaatttgccgttttacaactgatcgatgtcacaaaaatgctgaataataattgtctttctctaaacaataagcaacattttctttctgtattatttttatagtcattgaaaccgaactaaaaaattcgggtagaaaaaaagcaacgaaaagatgtaaaaaatgcatcggttgtgttgaatttgtgcgcttttattgttgattttttaaaatacacgcccaattcgtgatttcaaaaaaccaaaaatatacccctaaaaaccgaataaa

SEQ ID NO: 75739 - DNA, 586 bp, Heterodera glycines
atgaatcattcgatgccgacgcgggtcaatttcacgatgaggcgagcaattggggaacagagtgaaattaatgcaaatttaagcctttatcaagtattggcgatcaatgaaaaggtgcaaagtgtggatttaaacttgtggatcatccaaaagtggaaggacgaattcctcggatgggacccgcacaaatacggtaaaataccgaaataaaacggcatatctgatcattaatactgctgtttccaagaccaatttaattaatttattcttttctactgcaccttaattatttattactttttgagagggacggaagggagggggtaattaaattaataaatatccaattaccctgcttgggatgagttgccctttctcggctacgtgtgccattttcccgactgtatcattcaggtggtatcaatgccaccatccttccctatcaccgaatttggctgcccgacacgtatttgtacaattcgatggtgatgaaccgcgacgaagtgagcaaaaaaacagcagagaaacagtgcatttttaaaacatttttagagcgaacgttacataaatgtgatcgtgagcacag

SEQ ID NO: 75740 - DNA, 982 bp, Heterodera glycines
atggcaaaaggacaaattggcattgaccaatcatcagatgaaaagtcagaaataaataaaaaaaagtcaccccgaaagagaagaggaacagttaaataatcaaaaaattcagaaaaatggtgccgaaaagaaatttgacggctggaaatttgctgcaaaagaggcggattagcagcggtggcggaggaaatagcaaaaaatggaaaaagccatggacagcaaagggaattgacgaagaaatggcagagccaaatttgggagagtcggcgggcgaatgggcgatgttggaacggtcaattgaggaggaggacgaggagagcgaagcggcgacggaatggcgaagtgccaacccaaacagcggactgaacgaggaaagggcggcgaacgcgcgacagaattggcgacgcatagcgcagaaagcgtgcgcacaacgtaagaggaaaggaaaaacctcgtaaagccgatcgaaaggattatcggacaagcaaaagccgaccaaaaaagattggcaagattagctatgccattaatcagaaaatgatcagcagatcaacaaacggacgaattaccatttaagtgatcagatcgaataattttgggctaaccgacttggaaaaaccggcaaatcctactcgtttatagtgaccgaagaactgattggttgatgaaatgcttccctcgagattcagaccgagatgctcttgagcgggctcagcccaccaattctgccggaggccgaattcccgaaagagagtcggaagagattccattcgcggatttgtcaccgggccggctttccttggcatcccccgcccgtcacttcagcccctcctcaccccacggcatttcctcgtccgttctgtcgccgcggctccttccgtcgcttcccaatgcttcatcatcattaactgctgcagcttctgcgactgatcgtcctcgtcatcctcccaatgcttcatcatcctcagtaccaaaagcaccc

SEQ ID NO: 75741 - DNA, 2735 bp, Heterodera glycines
atgaattctaataaatcagagaaagctaacaccgttttagtggaagctgctaaaaaagagacagagagagcctggagggatgtagaggcattagcagaagaagttggtgattttgccaaatcttcgcgggaaacacttaatcgtgcaataaaatctagggaaaaagctcctaatgctaatggggttcgggaattgtatcttaaaatgtcagattcaatttgggaaatattcacaatccttgaccaaatcaatttggagtcagaaaaagccgaatctacgtggcgtgatttcgagagatgcaaaacttttgaccaggcaacaaagctcgaggaacaatcgcaaaattcattaattgaagcccgaagattacattttgagtcccgaagggtgcagagccaaatgttaaattatgaaaataggctccaaacaattgtttgggagcatatgggtatataagaacaaaaaataatgatataacaaaatggaaaattgtgccataattgagacatattgtcataaaaacttaaaatttggctttaaaaaacacaaaaccaaattttattttgtcaatccattttttgttaatgctgagcaaaaatttaaactaatactcacatcgctaatcgatgaaatttataaaaaggaacagggaaaatttaaaagcattttgaagctttcttttggttttgaatcattttattgccctcttaaatgccctagcgaaaacacagccgaggctttgttccaacatgtcctattaaaagaagaattatattcgcttttctatcctttggatgatgtcataacactagaagtaactataatcccagatgtcaacaatagaccaagaaattaattttataaaaaataaaattacgagaaattggaaaatttctggaaaaatacttaaacgatcaaataatctcgaaatttttgcaaataaactttttaaactggcgaaaaatttttatattttagcctttagtgccgctgaaatcgaaaatttatatttttcattcttagaaatgctcgataaaattcaaaaattaccaaattttattctgcatgaatatagaaaccaagccttagctatgcaaaaattggaaattggactcagagaaataaacatatttaaatgtcaagaagccgagaatttatcggacctttctttttcaaagatagatgaattcagaaaacgagtgcaaaattatcgatttgacacgagaatgttgtataataaaatcagagtaacagcactaaggcatttatttaaacccgaaaaggaaatatttctctcgccttttagaatttctccagggaaagaacttttttacagcatattccgtacagaacccaaaaaaagaaatttttaattctacattttacaattatatttagcacaaccaatcttgcgtaatttgaagatcatttacaaataatcacaccatattcttttttgaaaattttttaatttctctttagaaggaataagtaatttatttaaaaaaattttccttggttatgtgctcccaacagcgataaaaaagaaaaaaacaatcgttccgcctaatgttatttcggttgataaaaaactaatgattgtcaatgccctaaggcaatttgcgcaaaataaaaaattaattaacgaaaccataatataagtaagaataacatgtttattgaacaaaaaatgttgcggagggtgttattgtatatgaaaaagtaataaaaaaagtgaaaaaaagtaaaaaatttcatcataaatagctgggactagtcagaataaactatcacaaaaatggcatctttgagcgtttcacatcatggttcccatccaaatggtttttattttaatttattttttataaaagtttaataaaatagacatttgcacaaaaacattcgggccaattatccaaaatcatcaattcccaactgtccaatacttcgaagcgaaactcatcggccacgggtgattatttttgctttaatcatttaagttttaatattagcacatatgggatcggctttgcaagccgggaatatgcatcaaatgaattcattggttggagccacgactccatcggttgggactcgatgggggatattcaaggttagatcatttggggtaactgggatacaaattccgggcactattgttaaaataatttagggctggacgcctttggcggccctgaagtgctgaagtggcacacaatgggggctgaagatgtcattggcgctggttttctcgaagggcgcccattttttactctgaaccgggaacttttccgtaaaattttcacccgttttttaaattgaattttttcttaggcattgacgaggtctgcgtggaacccggccgctttgccgcatttccaactgtttcaatgattggcgaggggtcttccgcgggcgtgaatatgggacccatattcatgtttaatttgaaaaaattgttcatgccgtagccaaacaaaccaaaattttttaaaggcgcaaaaattgatgagcataatttccaagaattttgaggtacaatttttcaaaatttgctcccaaaaaaattggaaatcattgtgaattttttaattttaaacatttttctcgagtttttttcattttgtgtgtgagcaaaggatattccctatcccttgcccattagtaccggctacgattttaattatctgttgttgttgattatttttatttgtattgtaaaacattttgttaaa

SEQ ID NO: 75742 - DNA, 1221 bp, Heterodera glycines
atgaaaagctgggtgttatggatatttgtgagctggtataaagctagaaagcaggggatggtaccaggattttggaagggggtggggtgattagccttccgggatgaaggccttttttcataccatttttgaaggtgttctcgaaattgttgttttggtattttttaatttaccctattttattttaagttttaaaaaataaaatccaaaatccagaccgtattttttcaaaaattttcattaaattatgtcttggggctgaatatctttgttactgtgaccatccctgaacaaagtgaaaaaaccaacaaatcatgttttcctcattgcacagtccaaatccgccatctatagctatgatcgagcttggtgcgaaagtctaggcaagaaaaaagaacaagatcgacaagaagaagaagcagaagaacaaggggaagaagaagaagaagaagaacaccgaccagaacaagagcgacaagaacaagagcggccagaagaagagcgaccagaacaagagcgacaagaacaagagcggccagaagaagaacgaccagaacaagagcgacaagaacaagagcggccagaagaagagcgaccagaacaagagcgacaagaacaagagcggccagaagaagagcgaccagaacaagagcgaccagaaggagagcgaccagaacaagagcgacaagaacaagagcggccagaagaagagcgaccagaacaagagcgaccagaaggagagcgaccagaaggagagcgaccagaacaagagcgaccagaaggagagcgaccagaagaagaagatcgaccagaaggagagctaccagaaggagagcgacccgaaggagagcgacaagaaaaacagagacaagaggatggggaagaagaagacggggacgatgatgatgatgatgatgatgataatgaggatggcgccgtccagtgcaaagtgattttgcgaagaggaggcgaaggagacgatgatgacagtgctggagggaattcgggagggaatggtgcaaaggatggtggagggggagatggagaaaaaaagggaaatgatgggaaaaagcaggaagaaagaggagggggaggagagaaagcaaacgagcaatacaaaaatggttcaaccgaaacagccggaaaagcgagcgaaccgtacgaggaagcgaaggtacaaaccattctgagcgacaaaaaataagtgcatgaaaaaataaa

SEQ ID NO: 75743 - DNA, 1225 bp, Heterodera glycines
atgcaccaattgttgaccatcccgatgccatttattgaacactttctgcaccgacttggcacatttgttgaaaggtcaccagttgggtgattaattaattgatggtcaccaattgtcttaggacaattaaaaaagacgggggacgaggccccgcccacaatataagaaacttctcaatttttttttgaaaaagaaaattataaattcgattacctaattttcttcttaccaatgaattgatcgaaaattttggaaagaattggacttttcagggatttgggaattgagttttgtacaaaactaaatttattggcttcatagaacatgaaattctgaataattgggtaaaattaaactggaacaatttaattcaaattgagatcagttttgtgaaaaaaaaaatttaaatatatttaaagaataaataaaatttattttaaagaaatttggatgaaagcgttaaaacagccgactgggactttataaaaacaattcaattggttgtttcgatggaaaatgatggacaaaaattagtggcacaaaagcggcaaaaggctattgggccggatgttagcattgactgtttcaaattgctctactcattggccattcgtttgtgcttgcaaattggccaaaacgaagttgcgcaaaaatatttgccaacattttcatttgcatggaattttaccgacaaaagggcgacgaaattgtatgtttgtacataattttaaaaaaattgtccaattatatattcaacccaaataaaataaagattgaaaaataatattaaaaagaaatttgtgggttggccttttattatttctttaaaaaatttgtttaatccgaaatttgcctggtgttaaactcaacggattacctattacgattgttgaaattttgaggcctaagttatctagacctaaaattttcaaattacataccaaaatactgttgtgagtataagacgtctccgtcgctatagtttattcataaaaattaaacaattcaattttttctaatttagttatacaaaatcgaatttcttcgaatacaaaatgaatattgcaaatgaaatggttgaaataaatttgccaaattgggatttgccatattttgtgtatttggacaatgaaaaagagtttaaagtggaaaatgttaaaggtaatttgatatttgtacagctaattaataatgaatagcagagcaccaaaattggcaaaacgca

SEQ ID NO: 75744 - DNA, 1136 bp, Heterodera glycines
atgtccaaaggtaaaaaattaaaacgaaaaccccttggatttttcggaaatttcagtacctaccttaaccctaataaaaattttaaactttagaatccgagcggaaaaagaagacggaaaagcaaatttccgtgcccagcaaatgtccattcaaagaggaaattttgatggaggcggaacagaaacggacggaggcaaaggtttcccaaaaaaattcattagtgccgtaaattgtgcaaaatttttgattttttcattaatgccatactcggattgccatcccttttttgttgccagtgaaaatgttatagagcctctcattcaagctaaaaattaagaaaaatgcatttttctaactccgcttaaatttcaaatttgactggatgcgcgcgattgaccctaaaagtcggaattatttctgaatagcttaatcctatcaaaaattgttgcggtaaataatctagcaaccttaatgcaccataacgttttatagaagcatccaaattaaatatttataggtagcccaaagggagccccgacttttgcggcccagacatttgtgcctatgtccaaaatcggactcaaagttgaattttttcaagccctgtcagattaaacagcattaaaattaagaaaattcggtcttgtggttcattataatcaataatttgttgttttaaattttttttattttttgaaaaatccattaacgatcaaatgatcggataaaagcactttaaatcacttatttatggctgtttagtggatcaggaattaaaaaaaaaacttaattttgaacccgattttggacatagccgcaaatgtcgggcatggcccaaagtgacccctgaaattaaaaaaaatttaatggcaattactgtttcaaaaaaaaaaaaatttcgaacaaatcggtgaaaatttttctagattttttttcttcaaaaatttctacgttagtaaaaaaaattttttttaaaatggcaaaatgatcattttcggcaaaaaaatggctataaattcctgctttttgctcccaggcgctggaattttttaaaaaacattgcacaaaaaatagaaatttttttttagttttcaacattttttatacctgtgagtttaacattgtttcgaataaa

SEQ ID NO: 75745 - DNA, 177 bp, Heterodera glycines
atgccacaaaatgtgatggcggtggacacgctgtacgacgcggcgtcggattcgtcggccgcacttcaaaaggcggcacaatgccaaaaaagcggcactgttgttgtcgttgcgtccacaaagcccgtcgaggaaagcgaagaagcaaatgccaacgaaatggatatggcgacgacg

SEQ ID NO: 75746 - DNA, 1434 bp, Heterodera glycines
atgctaacggcatttatgaaaggtcaccaagaaacgcaattgagtgaatattcaaagcagaaatgtgaagcgcatcttgggattttgtattatatgaaaaacaattggcaatgtgacaaaattgatcaaaaatttgtcgaatctgaacggacagaatgtcaaaatatcgcaagtctcgagaccgaaactctcgagcagcactagtatttaattgtcaacatttttatttaaaaaacgcattttccatggtaatccatcggcttctgtaagtgttttttcttattctttttatttttcattgatattccttctgtctccacttttcctttgcttttgttggttttataaatttcactttattttttgatttttggttaaaaaaattttgggtaattaatttaacacattttttccgatttgttgccacttttcatttgcttcagttccgccgattttggcattgctcgcctttaaaaatttaagattttaaaaatatttatcttaatattgtcattttacaccagggctcggatctgttctttttttataagaaatattctgatttcgggctattgttctaattttgttcttatttcttaaaattcttcagaaaatttgtaattttatggcgtaatgtcacttagattttcaaaattttccacggcggtgccgaaccggttaggggtcaactccgtctggccaactccgtctcagcaatgttcaaaaagctataacttttttctttgttggccaaacttcacaatcatagtatcattcgaaagccctagatgtttagagatatttataagctatttatcagtgattaatcagctctcaaaaaagttgtcagttgaaaaccgcaaaaaaggcagaattttcaaagttttttatttctatctttttttatagttcgaaattttctgtaatttttagtaggctaatagagcctgtgaagagctttcgaatgatatcaagattgtttgattcggtcaataacttcaagagttatattgactaaaagttagctcagacggagttggccagacggagttggcccgttccggtgccgaacgggaccgcctaaccccaaaaatactttttttttcttaaaaattggctcagaatcccaaaatttggacaatttttggtcaaaatctgttaacaaattatactcaaattttcaaaaattttcccggcggcacctatcggcactgccgccttccgccccgcttgttccctaaaaagtgtttgaaaaaatgtaccgcaaaaaaatttcgtaaaaatctgattttttgaatgcactcaaatttatgacttgcttatttgctccccaaaattgttaaaaccaataatgggagactaaaaatataatattttaatacattttcaatcaatcaatcatttatacgcaaaagcgtgacgccgaaaaataaa

SEQ ID NO: 75747 - DNA, 1223 bp, Heterodera glycines
taatttgttaccaaattgtcaacatggttttcgtaaagcacattctgttaccactcaactttttgaagtggtggtggatgagttcagttttgctttagaaaatagaaaatcaattgatgtaatttattttgatttggctaaagcattcgacacggttccacataaccggctaatatctaagctaaaaagcattggtataaataattccttattaaaatggattcaaaattacttagaaaatcgaaagtttttcgtcaaaagcgggtctgatttctctgatgaatatccctgtctcagtggtgtgccgcaaggctcaatattgggaccactgttatttcttatttacatttacgatttaccaaaattctgcgaaactgaaaatgttaaaattaaactatttgccgatgatcttaaggcctatcatgttctttcaaatatttccttttctccactccaaaattttattaacaaatttaatcaatactgtaaatttaacggccttaaaatcgcttcaaataaatgtttaactttacatttaggacacaaaaatcaaaaaataaattattttattgatgactttcaaattcctaaaaatcccggaaacgaaccagtcagagagaccttggcatttattttactaatgatttgaaatgggcacaacatattgacattatctcgaaaaaagcattacgatctgctttcgctatactaaagtcaatcaaaactcgtgatacgaaaatacttgtaaatttgtttaatatttattgcagaccaattttagaattcggatctccaattttcaatccttatttaaaaaaggatatagaaaaatcggagaatgttcaaaaacttttttgagagtaatatttagacgtaacaattatactgttgatttacctaattatgctgaattgttaaacatttatgatcaaaagtcgcttgagagtcgtaggttaaaaatagacttaaaactttttcatgaaacaatttttggtaaaataaatttacaaaataacgaatccttttctttttccaaaaaccctgtaaaaaatgaattcattataagaacagcttattgctcaaccaatgttagatacaactcgttctttattcgaacctctcgtctctatagacttttacctaaagagacgagattactaaatccaaatgagtttgccaaacttcttgaaagatctgatcttaatttgttgatttctttgcca

SEQ ID NO: 75748 - DNA, 658 bp, Heterodera glycines
atgggtcgtacaaagtgtgtcgaatcgtcattggtccttcgtggctccggaaaaggcggcaggggcaccaaagacgcgcgaggtgtccaacaaactcagcagacaaagacgggcttcgatggacgttctgaggcgccgatgcgcaaaactgcaacagcgtttagacaacccgtcaccctcgtgcacaccacgtcaagacgaagtcacaaggcaccggagcggaagcagacgaacaacacggccaaagaggagagcatcgaaaaggcggagaagggccgacaggtgggagggcgggctggagacgttcataccaaaaaccgtctccacagatgttttgggcaaagtctttggaaggtcttcgtgcaatggtcccactgagattggccgacaaattctcggccgaagacgattttaacattactcaacgcatggaattgccgcagaaaatcgaagcaatggtaaatccaagcgaagatattcttgcgccatccattttcaggtcccttcgatgtcggaggacgcagcagccgcaaccttctgttcttctttgcatacttttgaattaaatggcagtgaaatcgtcgggcagcaggcaacacgcaaacagattgaagagaaccctttcgacacactcaaatttgtgcagccattcgtacag

SEQ ID NO: 75749 - DNA, 851 bp, Heterodera glycines
atggaagagcgaatcaaaactgaattgcgtggtatgttgttttgattatttttgttttccttttttgtcttataattccttcgctttttaaggtagacaaccttctgaagtccaagaccttctgctcgacagctgcaaagcgaacacaattagcgggctgacagaacaattcacaagtctcacaacactttcgctgataaatgttggattgactacattggatggtcttccgaaggtatttaattataattccttttatttcattggcagaattttaacatttcttagttgccgactttgcgaactatcgacctcagtgacaacaaactcagcggtggtcttgataaattggtcgaatgttgccctcgtctctaccacatcaatttatgcgcaaacaaaattacggtgggaatttttctcttttttttgattgtttcttttagtccatggaggcacttgctcccttgagcaagttggaggaattggcggcacttgacctgttcgactgtgctattaccgtaagaatttattaaaaaatcgttttgattcaaagtaaattattgcaatttttctcaaggagggaccggaatatcgtagcaaagtgtttgctatgatcccacagctgaaatacttggacggatttgacataaacgatggtttagtttgtcactaaaattacttttgcatttttcgctttagtcgaggcagaaatttcggatgaggaagaggaggagggagctgaggacgcgctcgaagatgaagacgactcagaggaagaggaggagggagtggacacggacgacgaggcggcgcttgcctatttgaactcatcgaaagctctcaatgtttaa

SEQ ID NO: 75750 - DNA, 1569 bp, Heterodera glycines
  unsure (1)..(1569): unsure at all n locations
atggctgtctgcgagtattcgcatccgatgnaggcggttcaggcagtttcgatgctcaacaatcagcgcctgttcgatcgtacgatctccgtccgcatggaccgttatccgaaggaagtggaacgccgcgagggaggactgcctgttggtttttgctttccgaaattgcattttacaatgaaaataatttgatatcgaacgagtcttggtaaaaaattgttttgaggtatttgtaacaattaattgtaattattcgatcacaattaaagtaaatgtcatatccgtttccattttcagtttggtctgcgtgctgttggaatgggtttgggggcgaatggcgcgcctctaaccgatgtggccagcgtgatctccagtattagcccttcgcagacacaacccgggatgaatggcacagctggcgcaccgatcactccattccaatcgcccccaaatgttgcccaatttggccctgtagctgctcaacctgtggcagcggggcctccaagcggatttcaacagggcttgcctgatcatggcatcagtggacatttccaggttttgatatctgccgttaccggctagttaattattaatgtcttaattgggtcttttgcccaatagtttccaattgctcccttttcagtctcctcaacccacctaccaaccacaagctaccagtggcttcttcaacccccctcagccctctccacagaaccgtccatccggcggaatggccttcggcggtggaggcgcaacgccacaatacgcaccgacaaagcaaatgggcgttgtcggaggagggacggcgagcgctgcagtttatggacacccaccacaacaacaaactcagaaggtgcgcgcagaatacaataccacaataataagacaaaatttaagtacgagcacaaagtggagccgaagtttgaaatgggcgcgtacccggggtacggaagtggcgcggcacagccagcgatgagcagtggggcaacggacaattaccaaccgtcgcgtgtcattttgatcaaaaatgtaaaatttggtcgtataattgaaatttttttgtccgttcagcttcccgttgattacacatggcaaattgtcagtgaccgcgtgcaacagtttggcgatttggagtcagtggaaatgataacgcccggtgtggcaaaagtgcgttttgtgaagctgcgagatgccgaacatgcgaaggccgcgttgcagggaaccacagtagaagggagggctattggcatcgaatacctttgaaatgcgacaagcggaggcgcgacgtaaaaactcaacgctttttcatcttacttccctgtttggtcacaactatccttcttttcggtataaattttcaattgggaactgaatactcatgaaatttataaatgtttcctcgcaaagtagaatgtcataatgtttatctagaatttttccaattatttacaaatataagatcgggagggggagatgctgatgcaatctgtcccatttcccgtaaaaacaattaattcctcgaaggcgagtaaaaagctaagcatttcatgagtgtttaagccacatgaa

SEQ ID NO: 75751 - DNA, 1227 bp, Heterodera glycines
atggcacaatacgtggaaatgttccaccggcaggcgccaattgaaagccaattccaaaggcgtatactgaacaatttgaacgccgaaattgcacggggtgcgttttttttatttttcaaaaaatagaaagttccaaaaatcgatttcaaaaattttcgactttaattatgtttttttcgcgtttaaggtgccatttcgaatattaaagaggcggttgaatggatacgattcagttacttttacattcggctccgcaagaatcccctaatggtaaaattttgcaaatttccattttttcataaaagaaaattattttagtacggtgttgaatggagagagttgcgccgtgaaccaacgctggtttcgtttttaaacgatttttgtcactccgcggcacgtcgcttggatttgaatcggatgatccgttatgatccagtgtaaacaaatatatattttttggctatttattatttatttcttgcatagaaatgaatttgtttctgccaccgatttgggccgaattgcttcagtaagtgtcattatcttttttgaatgacaaaactatcatttacttaatgagaactacctaccaatttcggggaaaaaaattttgtgtgaatttatacaaatatttttaaatatttctataaatttatttgtcatatttttaaatcggcagtttacgggcaacgtttgtgagaatgttagtccttgacacatatccgaatccctgacccgaattcgaataaaaggtcatgtcgaaaggtttgactttcaactttttcatctaaattattattttttgtggcatttcacatcagcagatcaggacacacccattccctaaaataaacctctaacgaaaaaaatattccagcatttctacatcactttcgaaacggtggaactgatcaacgccgagtcggggccggtccgtttcactgaactgatgaccgacgaaatgatcatctcactgatcgcagcatcaagcgaatttgcgcaaatcaaagtaaaaacacaatgtgcttgttgaccaaaatattttgatcaataaaaatggaataatttgatcagaatcgggacagtgagatgaccgatctggacgagttggcctcatttggtgcggcgctgaaaatacgcggtggacttgcgacaacggcgggcaaagtcaactgtcttctgcaagtgtgtgccacaaatgctatttctgaggcgtttgttaattga

SEQ ID NO: 75752 - DNA, 1067 bp, Heterodera glycines
atgaaagcgttggccagcgaaatgaccacaaattttgcaaatcgtctggccaaattgggactcaaagtgcgcgaattgaccggtgactcgcagttgagccgacgcgaaatcagtgaaacgcaggtggcccaagcaatttattgtaataattaactaattatgacgttaattgaaagccacaaaatattacttccccaatgggagcagctcatctccctcaccgaaaaatctataaacaagattcttttttgtttaaataaaaaaaattaatttttttttgaaaaacttgaattttaaatttttttaataatgaaagaaatttttagaaaaatctttgaccgattttttaaaattttgcttggaaacgtaatgtgcgggcgtaaaacgcaaacacgttcactcttcgaacaccctcaaaaaaaaaaaattattttttttttgtgtaatttgatgctgggtcattgtaaattctatttcatttttgcgaattatagtatttaaaaatgaccaatggagccaaattttgaaataaatatgaattatgtgtttatttggcttcaattttttaaaaattaattctcgactaattttcctattttctgtcagatgttggtgctgacgccggagaaatgggacgtgatcacgcgcaaggcggacgacgaagagctaagccaactggtccgtctgatgatcattgacgaggtgcatttgttgcacgacgagcgaggccccgtcattgagtctattgtggccaggacacttcgacaggtgcgttgtctttttttcgaaaacaccaaatttttgagaaacgcccggggaaaatttttaaaaatccttacaaaaaaaaatttttaaacgaaaatttcaaattcattttttttctctcacaggtggagctgtaccatcagaacttgcgcattgttggcttgtccgccacattgccaaattatgaggatgtggcccaattcttgcgggtggacccgacccgtggactgttccattttgacgctcgctttcgtccccgtccattggcacaaaggtggcgccctgctccccaaaaaaattga

SEQ ID NO: 75753 - DNA, 735 bp, Heterodera glycines
atgccgagtttaaataaattaacattttatgaatctgaaatggtactcgtcaatgtgttttgtgctcagctattagactgtcccgtcaagtcactgcgcgaccgacttaaccaccccgaagatcgtgtaaatgcgatgaacggattgatggggaagaaagttcgaacaacctacaaagatcgcaatgggatgcacaagacctattttgtcggcggtatcacggagcgcggtgcagctttcgttccggcttatggcaatctacgggcaccatacaacgtaaatgtggcagcttatttttatgcacggcatcgcataaagctccatttcccttacgtgccttgcgtaattgaacgcttttccgggagagctgaggaccgtttctacccaatggagttactgggaattgtggatgacgaaaacaaagggagattgtttggacgaatgtttatggaaattggtgaagaagcagatgatgatgataatgacgaggatgtttcaacatcctttgactcaacactacgatttgatatgggacgagacgagtgttcccaattatggcgatgatcaatatttgcaatattcatcttctattactaaactatgcacttttctacctaaaaattacattttaacactcttaattatttaatcaatatatatttttcactctattaattcggcatttttctacccaaaacagacaacttctttttttcatttattcaaattcacaaa

SEQ ID NO: 75754 - DNA, 1497 bp, Heterodera glycines
atgtacgagatgaaagtgaagaagcaaaagaaccggaacccaaacattgtgttccacgactcattcaacttgatgccctgcgcattggctcagctggtgccatcctacggattggacgtcgaagacaaaccctttttcccgcatttggccaaccgtccggagaactacggtaaacacatctacccaacccctgacgactatttggccaacggaatgatgccagagaagcgacgacaattcgatcattggtacgagcagcaccgcgaagagccttttcaactcgatgaagcactagcgaggtaaaacatttttaaattaaaatatttattttggactttttcagttattgtacgaatgacgttgaaattctaatggcagctctcgtcgcattccgccgcgagttttttgatgtgtcgaagcggaacgaatatgtcgacggaatcgaccaccgggaaaaccacgatggcattgatgttctacgggaatgcatgactgttgccggtgcgtgcatgaagcacttcaggttgaaccatctgccggcggagcaccttgccattgtccctgaaaagggctatgacaacacccagaaccagagcaagctggctctccgctttcttttctggtatgctgaggaaaacaacgtacaagtgcagacagcctactcacctgatggagaaaaaaagattgcaaactacactgtgaacggttggattgaggcagaagggcgtgtaattgaaattaatggtaatttttctatatttttaagcaattaaaaaaaagttgtttgcaggttgtgtttggcacggttgtagaaaatgctctccctctgacaacatgatgctgcccaacgggaaaactgctggagaacaaagggagcgcgatgccaagcggttacagttcttgaggactcagtgacacgagttgatgtcttctgggagtgcgagaattcacgaatgttggacagaagcagggaatgcggaaaaatttgcagaaatatgtggatggtggaccgttggtgatccgtgacgcgtccaccggccgggcggacgggaccactaaagctcttcacaaaggcagccgtcgaccaaaaaatctcctactttgactttacttcactctacccatacataaagtttgtcatttacataaattttattacaatttttaattttcagtttcacaacccgttatccagtgggccacccgaaggttcacgtgttgaacgaggatgtgaattggacgagcccagctgacaacaactttcctttggcactgattaaatgttgggtgattccgccacgaaagtgcaccattccggttctgcctgtgaaagttggtgaacgtttatgttttccattgtgcatgaagtgcgcgaaagactaccctactggaggagttgacgacgaatatcactgcagacataatgaccaacaacgcggatgggtcagcaccagcacttcaattgagctcaacgcagcgcttgaagagggctaccgc

SEQ ID NO: 75755 - DNA, 732 bp, Heterodera glycines
gtgtgggattggcggttcgggcacgccaattgatggaattgacatgtaaatgttaaattaaacgaacttagtttgcttctcatttgcaccgtcataaggtgttgtaagcttcatgaccaatgctatgatttggccgtggatcggggcctttgttatgacacttacgtcgaatacgctgacccttattcttggacttgtcagcagggggagccgaactgttcacaaaagcagttcgggtgcaaagcagcgctgtgcgagtgcgataagtgagaaatattaggggattcatttgatttgcaaaaaaaaaaattgtcataaaaagtgggaagaatattcccggagtttttcggacgcactggtcaaaatcagctaccttgactaattcggatccttactcgaataaaaatgcaaattttaaatcttaagaattttgcttgagttttgttcggaattagtcaaatgcatgttcagccgttttcacgactaacaccatttttttaaattgctaacgaaaaaggtcttcccttattttttttaaataactcaaaaacgaattttttttaaatagcccgaatttccccctcgtggggttgagcacttttttgtttgccattgccattttctctgtttttaagaaatgttgtcaattgttggtcgaaattcaaagtgccttctaaacgggaaaaatgcacaaaaacaaaagtgaacagaacatatgaaacggtttcttat

SEQ ID NO: 75756 - DNA, 306 bp, Heterodera glycines
atgccggccgtagtaatgagagagaaggtgggcagaattcgaatgtgaaaatatgatggaaattgattaattgtgaggaaaattctgatgaggttttcattaaaaatatgattttttttaccgaggaccaattttttatgttaggtaatattcggaatttcatctgccgacgagtcacgaaattctaaagaagaaattcaattgatcaataattggggcagaagacttggggacgatcaatgaataattgggatttaattgtatttgtttgatcctgcaaatttcaatttgcaaaattaggagtta

SEQ ID NO: 75757 - DNA, 1870 bp, Heterodera glycines
atgagcagcagacatcactggagggcggctgcttttcatccttttacggcacaattggaacgggttggttttgaaaatggagaaaatttaaatacactgggaattgtcccaaataggactcgagaattggggcatttgtcatcattttcgggataagatgaacattttgagactgatgagtagggcatagaattatatgcatattgcatattttttttcctggactgtgggaggcctgaaacgcatgaaaaacatgtttttagcctggtttgaagcttctaggatggatttccatatgcatattttgcatatttgtgcatatttcgcgatttatgtgcatatttgtgcatatttcggcatttcatgcatattttatgtgcatatttgggcattttttcaataaatcctctattaaaacgaccccctctattaaagcggccatttgtgctctaatgaccaaaaatttttcaaaaatatcagatttttgggtatattttctgataaaaaagtaactttttaaaaaattggaactttatgccaaaaatagtcagaaaaatagaaaattctccattttttgctcaattttcttcaaaataaataaatattacttttttggttctaaaataatcattcatactatttttagctattttcgggatttttatgcttaaatttaacaaacttgaagagatttgaaaatttgccctcaatttggaaaaatttatgtgcatatttttcactttttatgtgcatattttcatttttggtgcatattttatgcgcatattttgcgattttatgtgcatataattctatgccctactgatgagagttgccttttctaggctttgtcttgcaaaaaatccaatgacgaattcgcaactgttgagttgaaacaaaatttttatcacgggagtcgagagtcaagaaggttgagaattttctcaagaggaaatataattttaaaatttctaatacacctgaatttcttaatattttcgtaatagaaaacatttttggtttcctaatcctttttttgctctattttcaaaaaatccttgtaaaaataagtgcgtttgttagagtttgcagaaaatcactcagtgatcaagatgatccgggaacggccttttcgataacaaaaaggaccctaggagtcctgaatttcgatcttttccatactcttgaaaagcaatgaaatattttttaaatgtcaaaaaatttagtgccattgttgtaatggttggctccctctcaacgcagttgtgcctgcttctgatcagcttcattgcatgtcacttgcttctgatttgcctgtctccccgttctcatccgccactgatcagcccttttttatccatccgaccaaaggcgcctatggcacttcaattttgttcaacaaccattccgatcaaatggcaccaattcccgatcactctacgatgcttgatccgtcggaggctacatcattcattaatcaaccattgtgatggcagatggataaatggataagcataaatgacaaatatactacaatacagtgcaaattgatataattaatctcgagactcacggaacttgactcaattacgaattacggaaaatacggcattgctcagaattttttaaatggcccctgaaacttagggcatggtttcgaaaaccgagaaatttttcttgccaatttactcattcaaaaatcggctttaaattgagtataaaaaaatcgccggaattccacgaaattgtcggataaaaattaattaccgagtctcgagcatcaaatatttcatttattaatttaatttttgttgtttagataagaaagagctggtcattcattcaaaatgccttttgaaaaaaattttca

SEQ ID NO: 75758 - DNA, 314 bp, Heterodera glycines
atgaacacatttggaaagggatgtaagaatttctattttagcttaccagagttttttttgactcaaatgaggtctataaaattttcggaaaccacaaattttcaacttgtctgaaatactttaaaaaaaagtcaaacttcaaaaaaaaaatcgaaacgatgccttttccattctcaaaatttgtttttaaacctttgaaaaaagtttcctttaagggttaaaattgtaaaaaatggaaaaatttcagtcagaaatcaaatgagaataagctgatagcttatagccaactgatacataacagcagcgacaagcaa

SEQ ID NO: 75759 - DNA, 620 bp, Heterodera glycines
atgacggcaatggtaagtgattggtaaagtaactttgctttttttattggactgatcgaatcgaaaacgtcgggggggggggggggggggctaatcgctgtgagagtcggtgttggtcgtgcggagctaacccccgccggtggatttccgatcacactctctcttttctgatcagtttctttccgatgtctacgacttgtgcgtccacgtgcggtctgtgcgcgacgggcgcgtgcgcggacactcaggacggatgcatcggactaaggcacatgtgcgaccagaaggagttcgaggaggacatgcaaaagtgcgcacgcacttgcaaattctgcacacgtaggaaataaatatttaatttttaatttggaaatgattgaagtgagtgatcactcttccccacagcaaaatgtgctgatctgaccaacgattgtcagatcgccgatgaaagttcgtgcgaaccgccaccgcccgatcacttggaagtgaatgtgtgtgatttgttcagatttaatcacaattgattcaaaattcgaatttgcacatttcagccctattacgaggaaatggccaaagtgtgccgcaaacggtgccatttatgtgacaaagcaatcccatga

SEQ ID NO: 75760 - DNA, 591 bp, Heterodera glycines
atgctcagagtaaaattatggcaaattattgccctgtcattggcactttttttggccggcattcaaaagagatgggctgtacaagcacaggatgatcagcaagacgaagaagagactgacccgggaggagaagacactgacgggaatgaaaatggggatgatcagcaaggggaggagggggacggggcaacggaggacgacggcggaggggacgaagatgaccaagcgacggacgatgaaggcacagaagcagagggggacgaagacgagggggcagacgaagagactgaaacggagggggaggaggaaaatgatcaggtggaagaggatgagggaggggatgaaacggaagacggaaacaatgcggaggatgaggaggagggagaggaggagagaaaggatgaggaggagggagaggatgagggggaagaagaggaggaggaagaagagggaaagggacaacggaagcgcaaaaggaaagaggaaggggaggaagaagatgaagaagaggagggggaagaagaagagggagaggggcaacggaaacgccaaagaggcaacgaaagcacattggaacttctgcgctgtcag

SEQ ID NO: 75761 - DNA, 3660 bp, Heterodera glycines
atgaacagagtgagcgagacaagatgggaaagtttggcgccaattcgaaaagagtacggatggtacggcgtgaattgtttcaacaatgtgcaaacagtgattgaagaaggaaaagcagggattttggatgggaaaagactgataacttcgtggggagactctttaaaagttgataaaagcctgggggaagacggcagctggatcagactgccaggagctgtggaattgctcatgtggaaaattccatcggatgaattttggcattcacattttgtgattggcccagtaatcacggaaatttggccaaaaaaggcagtgatcgtggatgagctccaatacacttttccgataagcagaaatcaggaaagaaaatttccggtgttcggagtgcccgacgatgcattgaaaacggacaacaatgtttttgtgcatgtcattggtaaagtaaactcaaccaagcgagcgcgccaaagacgagagaccgtgagtctaaaacctggacaaagaaagccaaatgtgccgagaattgaaccaacaagaaggccgaatttgcgaagaggccaaattgctgaaatcgccatgacaacccgcccaactattactaccactaatattccaccgacaattcgtccagtttctacaacacatattccatcgataattcccacaatcgccactcatactccaccgacaacccgcccaatcacaacgacacatattcctccgacgatccgcccaatcgctaccactaatattcctccgacgattcgcccaattactacgactaatattcctccgacgattcgcccaatcgctaccactaatattcctccgacgattcgcccaattactacgactaatattcctccgacgattcgcccaatcgctacgactaatattccgccgactattcgccctataactactacacatattccacccacaacccgcccgattgctactactcatattccaccgacaattcgaccaattactactactaatattcctacaacaatccgcccgacttcaaccattcatagccctattataatcaaaccaacaacgacaatcccgacaaccactattcaaacgccaactaaattaatctctaccacggctacaccaaacaccgtttctcctcacaccacaaagagtgcggatgacaccgctccgaccactgcgtcgtatcattccattcttgatgagcttagaggattggccgaagaagctgatgaggaaggcattttaatttctccaacgataaaagtgacaccaactccatttgttctcccaaatgaaccaaatgaagaaagtcccaccactgtcgttacaaaaagggaaatcccggatgatgatgaatcagaaaaactttggaaggaagaaaatcttgaccacgaaaattctcgtcttaattatttgggatggaagacacatcggacaaacatccaaaatgcgcgagagaaatggatgagcgactgtcacgaacgaaataatgcactttccatcgcaaaggcattagctcgtcagatgccggaagacgcagcccgctctctctacaaaagagatgacataacggcattttggaccagatcatcacaacttgaccaaaaatggtccattgctctttgcaaacaactgaaggctgaggatgtgctatgggatcagaaaattggaaaaaaatgctttcgcgagctacccgtgctggtggcaaggcgcacacttttcgtcaagccagggacgcgcgacttgagctataacgggactgaaactcactgtgatgagcagggtaacaacccttgggcagctgacttcaacaacaatgacactgaacttcaacaagccaattcaaaacatcgatttgtctcaaaacaacagacaaattttcaaaatccattaattttcttcacacgcggatcaatttttgaatctgaacaggcacgcctggaacagaatctcaaggaattgacgagacggatcactcggcctgaattgaacttccctgacatagggacagttgacattaatcagaccgagattcacggaagcacggtcacagacattttttccatcggcgaaatactggtggaaaagatgcaaaaagagggcgaaagtttcagaaaaaaggcagaagaaacgattgaaaaaggaaaggcatggatggaagacccaattggaatcatcaaatacatcaaatggatcctaatcacaatcgctattattttaatcgtgattggatgcacagttcttttgtggaaaatcaaaatttattccactctgtttttggcgccaattcatttactacaatctctgctcaacaccataatgaattgttttaattccggaagaagattggccgaacaagttcgatatccgatcgtgatggaagtcgaactccaagaccgagccaagccatcagcaccaccagaggaacctttactcgaccaaaaagcatacgtgctcaattatcttcccaacatttgccaaattgaacaaacaagacgaaaaaagaaaagatgttacgtcaattttttcatgaatggagtgaaaacgaaggccttattcgacacaggagccgacatcacgtacattggccactcaacggcacaaagatgctttatgatggtccgaaaaggggactatccacaagcaagagcagcgaactcaactcccattcgttttatcggctcggcactcgccaacataaaactgggagattttgaaggcaaattcccaattctcgtcagtgaggacgatagctgtccatgcactgccataattggaacggatttgatggatttcatcagtgaacaaggcgaagaagaaattggattgaacttcaaaagaggactcgtacgtgttggaaacacgcaactaccaatgatcgccgctgtcagcatcgagaagcaaccgattgaagtacaacttattgagacccaaacattgccaccgctgtctgattcgctcgtttggggaaaaattaaccgaagtttgggaccagacgaagttttcatcactgttgagcgagagcacgattatttcccgctgcgagtcgggaaatgtctaacaagtccaggctcaacgcgaattgtgccactacgattacttaatttcggaaacagcgtaataaaagtgtatgagggatcgcgacttgcgtggctggaaacaatagccgatggcactgaaattaatgcactgaaggaagatgagaaagaaaacccggaaatgataatgactgacgaggagtggatgaaattcaaattagaaagtgacaaaatttcgccagaggcggactggacggaccagactttggaatttccaaagaaggaagaagcagtcgcacccatactggaaagaattcgattaaacgacaccattctgagtcgagacggaattgaaaagctgaaaaacatcatccgacagaacgagaacgcttttgtgaaacctggagaagtcggactcttcaaaggacaaacgatacaccgcatcgacctaatcgatggcgcacggccggtccaacagagaccctatcgttatcctgtcgcacttcaacccgaaatagagcgtcaagtcaaggagttgctgcgtcaaaatgtcattcgaccatccacttcggcatggtcatctccacaatcatgcactgcagttaatcctagatga

SEQ ID NO: 75762 - DNA, 2285 bp, Heterodera glycines
  unsure (1)..(2285): unsure at all n locations
atggacaaggacaaggacaataaggacaaaattgagcccaaaggacgaagcgatcatccaaatcggccatgccactccgctggtacaaaacgggatggagtcggcacaaaaaacgggattctcccactcttcgaatccaaagcaacggcggctacagtttcggcccgcacacgatacacgccacagttcaagactttcgatgtcttaattgtttaacttgctttagttaataacaatttaatttttctctttttctctctctcttttcttatttctctctcttttttccctcccatgtttttcttttggccggcagaaggaaaactttggcctgtctcatttgcctactgtcgctaccgtatacccgtaccacaagtcccatccctcccactccttgttttgcccatcccgccattttgtgaattttgttgcctattgcctaaacagctgcctcaattcccttccccctcctacgaccaggcagggccccatccctggacgtttggagtttttgatctgagctcattaattaattaatcacaggggaaaaagggttggggaaaagaaatttcagctaacaaatgccagtcccgggacaagacgaaaataaacacaatttggcaaatcacgagaaaagactaacaaataatgaaacaaaattgccaaaacgaattcgaagaatcaaatgaggcaacaactgacgggaaaaacgaagaaaaaattgggaaaacggggaaaacggacaattaattaattgctttcggagggaacgaaaatggacactaaatgcacatcaaagagggacggtagacgatcacatttcgatcacattggcaaatcatccaatcaccgacgaccaattgtttcatcactattttattacgcctgatcaacgacaaattctttaattcattcactcatcttaaaattctcaatcatcaactgcagttaatcctacaatattttctattctttctggcgaacttcgacaaattatttcttaataaaacatctctcgactacactctacgaagtctagtactattttctaaattctggtgttaatcagcgaaacatattccgacaattccatcaaaaacggccgacacgcggagaagaccgaatcctttagaggaagaaggactaaacgaaggacaaaccgaaagggataaaaggctttggctcatccatcaaaaaaggcagttgcgtaatatggatttagacgccctgcggcgtcgaattgtgactctcgagcaagagatgcgtgaaaatggtggaactcgctctgggctcccgatgccgaccacatttgacgggacgacagatttgcaggattatttgaagtcctttaatttaatcgcgaccgcccacaactggacacccgcgcgatgtgtgcaagttctcccgctgttcctcagaggatcggcaagggcaatttacgagagcatcgaaccggatattaaagataattggcgaagtctaattgatgccatggctgataagttgaaacaaatgtctccgagtctgacagcaagacagaaattggcacaacggaaacaacagactggagaatcgctggaagaattcgcgcaagcgatccggaacctcgtcttacgtgcttatcccgacaattctctcgagatggactttggaaatttggtgctcggtgctttggaaaacgatgttaaacatgcaaacgaagcccgacttcgacaattccgttcggaaattgcgcgagacttttttcgggcaaatatggcaccacgactgaaggaaagagtgatgtacatggaagaaccgcaaacgctcgaggaagcagtggcccaggcaagacgtgtggaacaagttcaaggaaatttggccgatgacatgtggaaaaatacacaagatgcaaaagccgaagttgctttagccgaagttaatgcagtgcgaaccgaattaaatgaaattcgtgaacaacaaaggagccgagagaatccaggacgagatcaacgagaatggcaaaatcaaagcaattcttggagaggaaacaacgccgaaggacaaaatcaatctaatttttggagaggcaatcccgaatttcggacaattcgccgagggaatttcacgccaaggggattcacaggataccccaggggactcaacacataccgaggaggatttaatccgcgcggcgctaacttcacaccgcttggcaacaacttccaaggaacaaacaacaatggcaattttcaaccgaacttcaaccaaaatcaaaattggccacgangggcgcggaccaacag

SEQ ID NO: 75763 - DNA, 350 bp, Heterodera glycines
acatcgaaagtcttgaactgtggcgtgtatcgtgtgcgggccgaaactgtagccgccgttgctttggattcgaagagtgggagaatcccgttttttgtgccgactccatcccgttttgtaccagcggagtggcatggccgatttggatgatcgcttcgtcctttgggctcaattttgtccttattgtccttgtccttgtccatttggctgtggtccgtgtccgccgagtctttccatttgcctcatttggggtctgtgaccaatgtcagcgccgtgttagtgttttgtccagtcgtattgtctcctcaatgtaatttcgggttgatcgttggcacggccttaacacatca

SEQ ID NO: 75764 - DNA, 2282 bp, Heterodera glycines
atggaccaatgcaagccatacttcacaaacgaagaagcggaacaggacactgaagcattggagaatgagaaaccaaaacataaaaatgagaacaaaaagctgggagattcaaaattggaagaatcggacgaagtaatgcatgatggggaaacaattgtggcatgtataagtgaagggaatccactggaccaaccaaaagacaaggaagaaatggaaacaccacatcaaattgagatccgattggatggcacaaattttttcgcttatctcagcacttcaaattttcccgaaacttccaccatttccgaaaatttaatcaaaaatgactgggaaatatttgaagatgacgacaaatacgtgataatgtggatttttgatgaaaatttcaaactccgaatttccaacggatgggacgaaatgttttttggaacgggagttcgagaatttctaaaaaattcgggaaatttaacgatggaagacgggaaagcattttatcacgaacaatttattgatgaacaaaaccaaattttcgcacaaccaataataccggatgtttggatcaccctgcgcgatcacacccctgcgcgacaaacaaatccatttaaccccttttttgagacgatcgagccccaaaatattcaatcattttcatcttttaatcggatatttcattcaatcagccatcacactcacacaatcaattcgacaaatttacagcaaaaaatgtctcgattcgactcccttcttacccactcaaatcattctacatcaaaaaattcgtctccaacaccgcctgccattttaatttcttccgactctgactcggaaggagaatccgacgaacaacaacaacaacaacaaaaacgtgacaacaaatccgaacctcgcccctatgcgccgatcctcacgccattctcagtggatcaagtccaagtgattcacccggaccaagtcgagatgtataagaaggattaccgattggccgaaattgatcggcaaatacagttaatgatggacgcgaaggctaagatccaggcggaagaggaagaggaagaacagataaaggaacgaagagcacgttcggagaaggccaaacaagaaaggaaaaaagaggaaaaagagcaaatgaaggcgaagtctgaggccaagcgaaaggaagcagaagagaaggccaaagcaaaggccaaagccgaaaaagaagaatggaaacgggcactccgacgtccggcagccacgccggaagaaaaagcgaggaaagaagcggaaaatgaggcgaggaaggaagcggaagaggcagcaaggaaggaattggaagaagaggcgcggaaggaagcggaagaaaaagcacggaaggaagcggaagagaaggcggcgaaggaagcggacgaaaaagcacagaaggaagcagaagagaaggcaaaaaaggacgaagaagaaaaaaagaagtctgagaagcaacaacaaaatgtggaaaaaagagcggaggaaaaaggagaaaaaacaatgattgccagaggaatcaaaaagaggcgcttaaccgaagaggaaaaggagaaaaaacagaacatggaaaaaatggaggaagtacacagagaaataagagaaattgtgaagcaggcagaagaagatgcaaaaaagagggaaataagggaaaaaatcgaaaaattgacggcaaaattaaatagggaagaagatggaaaaaggggcgaaaaggacatagcggcgttggaaagagagcgcgaggcattcgaaaaccccccggcgccgccaaaggatcggatgcctttctattccagcacagtggcacgcttcgaatgccaaagcgatttagactcggcacccaaaccgagagaagaaaaaagtgaccgcgaaagaagcagcctcgggacgagcgggaaacggctgttcagaaacactctgaagtcggcggtgcaggcggtgcatgagaaaccgtgcataccgccagaagggctggggctcagacgaagagaaagcgccacggaggaagccccaagaggaagaaggccaacaccaaccccgggccaaagacaattggagaggagcccgattcgaaaaaacaattcctacctgaagcgagcactggccctggaaaagcccgaggagacaatctacaaaatcaggaagctgctgttggaggccgccgaccgactgtcagaattggccgacttactgtacccctacgaaggcggacagaaaacgaaaaaggacgagaaagagacggtggaagagaatctggggatgggctgttcaagcagttttat

SEQ ID NO: 75765 - DNA, 425 bp, Heterodera glycines
atgtcgtcgtcctcaaagccgaggaattcgatgggtcggatgaagcatttgctgagctcggctgaggacgcggatgtgcactttttggttgggcagaaaaaggaggcgagatttcaatatccaattttgattttctaatttttttaagttttcagcttctacatgctcacaaattgattttgaagcacgcttccgaagtatttgaggcaatgtttcggtttgacgcacagaaagtaaaaacagaaaatggtgagaaaaaagaaacaaattttttattaattttttttgaaattcagcctctgccgaaggtgtcgtggaagtgcccgacgttgaagcagcggcgttcagagtgatgctcgccttcatttacgcggacgatctgagcgaattgaacggcgaaaatgctatggctgtgctttatgccg

SEQ ID NO: 75766 - DNA, 911 bp, Heterodera glycines
atggaaatgcaacagaacgagtcgctggtcattgtgaacagtgacggggaggaggaggaggagttcaccgatgtggtaagttttgccaactaattttttgagttatttcaaaaggtattaggtcactacaaaaaacatacttagctttttcacgaattttgtctcgaatttaactaagtaaacaaattttgagattgagaaattacatgtatttttatccgaggcgtgaaatatttcttttaacggattgccatccttttgccggtgtgaaaagttttaataacgttattttgttatgagcaatattattataaatctaaatatttttaacgccctcccgagagaaggcgcagttccaaaaattagtccacactgttccttacaggaacgaaaaagtgttacaaaataggcaaatatatgttaatttaaaaactaatttatgatgggtttaaaattgaggaaggggagagagaactgatcctttatatttctctttttgtacgccttcttttccccctcgcccgtctcttgctcttagttcactttctctctttttcctcttcttgtcaaaattgaggaagagagtgagacgcaagggaagagagagaaatgggtcgcggtcgttttcgtacgagcacaagtttttggctataacttttttctttgccaaccaaatccaacattgttcatatccttcgatagccctatgtgtcctctattagcctgcaaaatttctaaaaatctcattaaggtccgaaaaaagttatggccagaagaattcatacaaccagattttccaacttttttggcccgaacttttttaaaacttaacgaaattttttgaaagtttgcagactaatagagcatctgaagggctctcgaatgatatcaagatccttggatttggttga

SEQ ID NO: 75767 - DNA, 1663 bp, Heterodera glycines
atgttaagtaattatttttgtttcattatcagtgcgtgcaaaacaaaaattgcaactgaagaaaattttttagtttattttcataattcaaataaattaataaatattattttttaacatatgtaaattgaatgggaaaactcatggttttaatggaaataaattaaacataaagcctgcaattaataaaatcaatttatataataattattttttattttctcattcttaattaattaaattcttataatttataattgcctattaaaattatagcaataatacataatcaattaataatgtgttgatttcaatgcgatcaacaatgttgtcccagcaaacaaacatacacagcaaaggataagctgaaaacggaggagcagcaattctcacggaacaaaaatgtgaaatgtaaaaaattaaatacattttataaatattaaaataattttaaatgattttttaaaaataattttattatttaaatcgctgtcaaaaggaatagatgcaattaaattttgaataatttttaatgacaacacaaaatcatttaatttactggtgcaaaaattaattaccatatttttttcaattaagatccactggggggcttcatttttggccataatcgagagggggcaggggtggctttattggagggggaggtgggctctaatcaagagggggcggggggctaattagaagaaacacacggcaattaaaataattaaatgagggagagggggctctattagagaaaatacggtaataataacaacaattaaaattttaaaatatatattttttaaatattgtttcagttttctcgcccgactcttctgatgaaagtgaggatgacgagcatcataatcatcatcatgacaatcatcatctgctgcggaccaaaacgaacctttcgaattacaactttttacaatcatgcgaagacaattttttccgatcattcgatgccacaaaaattgccgacaatttttgccatgacagtgactcatcgctgtcattatcatcagcagcaactgaggaggaggactcggaggagtacaacagccagcagagtgacagtgaggaggacagcagcaaaacaacctcatcatccattgacgggtcaacgacgacgttcaaactgaaatccattttgtgagcaattattaactaattaataagatttgtggcctgaaattgatcggggagtttattaaatatttcatcagggagtgatcactgatcaggtttcatgaatgatcaggatttgtagaatttttgtccggctgctctgaccggatttaagaaaacatgccctactaggctgagtcagaataattttgccacaaaaagtgatcaggatttatcggtgaacatttatcaaggaatgatcacgagggagggatcaggattagccgaatttaaaagaaaattgttcctctaattacctgttgaatattggcacaggtcaacaagtgccaagaggagtccaacagctgagaagcatgcttacgagaggcgtgtcagttttgcggaccgctggggcatgcaattgacatcgtttcgcacaattccgaaccgttttgctgatcggttttatgacgaattggagctggacttcaatgaaggtggatcaattaattattaatctattaataaa

SEQ ID NO: 75768 - DNA, 1080 bp, Heterodera glycines
cggagaaagatatcaaagcaactgaagtagcgttagtcacattaatggcaaatattcacaaacaaatttgtatacaatttgacaaaaatgcattccctgttgaagaaattgcaaaaattactgttgaaaaagtcaatgatatgttggtgggttaaatttttataattaatttctttgccagctattttttgggcaaaaattttacatttttaacgggaatgggggccgttcgtcacagacgtttttggcacagacgattcggcgccagcccaagttttttcattataccgaacttttttctttgtcgaccaattcgaaccattttggtatcattcaaaagcttttcacaagctttattaggcttacaaaaagcataaaaattttctagaaatagaaaagttattaagaaaaaacttcaaaattttgagtttttcgcaattttcatattagaacttttgtggtaattgtccactcacaaaatttaataaaacatcactatttttagtaattaattacgtaattacatatttaatttttcaactcaaacttcgtttgattttttttcatatttagcagttttgttgggcttaaaagccattttttattattatttataaatcaattttgaattttattcaattttttgcattttttttgttgtttaaatccattttctggcaatggcctttttatgacattttttttggcattttgcaactctttttgccacttttggaggcttcattgaaaatttctttaaaaatttacatattttttaaaaaaatttttaggaaaaatgtcatcaaattgtcaacattcgtcgtgagaaagcagaaaacacacaggcacaggcacaaaacacaagcaaaaagagcaaaatgtcagggattagcaaaatatttggcggaaattcaaaaattaaaaaaaaattggcaaatttaaccgatgaattaaaatcattggaacaaaaagagcagcaactgtttcgagaaattaaaagtgcagcggaaacaacacaatttgattggaggcatctcgaattgccatgcacaaaagtgacgacgaaaatttagggaaaaa

SEQ ID NO: 75769 - DNA, 1131 bp, Heterodera glycines
atgtcctttaaaaaggacatttacaagttaccaacttgcttctccataccaaatgtgcgtccttcaattcaagggcgctccattatggcattttgtgtgctaaaaactatatggtttagtgctaaattttgatgaaaacaataaaaaatatatattttaatgccgtccttaaatttaaggacggtccacctccattaggattttgtttcaaggacggtccatctctgttagtgattctgtgggtcaaaaaaaagtgctaaaattattttttataattttttattttttaaataatttttcatttattttttttctgttacagaaactcttcgatcagatcaaaacactatcaataacaattactttgaaaaagaatgcaagtacaagaaaatattaattgaagttttatttttgtgtatgattttttccttattaatttttttaaagtatgaaaattggtgatttaaatgataaatttttgatcgattgtacttattttaattgttgataaaaacacgaaaacggcgattttatgtgattattatattttattaattattgaaatttaaaaattagtaaattattaaaaaaaattcatgggacaatgcagttacgaattttgctcaaatttttccccggattttttttttaatttaaggacgaaattttaaatgatctattaatatcatcaacatggtgaaataagtaattttgaaggatttaattaaaatttaccaagtgactattggcaattctacaaaaaattatgaaatatacttagtaaataacaaaaaaaaaattgtgtttggtgaccaacccaccttaatagtcaagtctgaactagtattagaaaaattttaaaaaaaatccatttttttctttaaattcacaaatttttttgaaataattttatagtaaattcttaatttttaaaacatttttcatcgcaaatttcatataaaaaatttctattggcaacgccggcctaaaacctaatcattattttaattttgaattgcaaggagttctggaagcgactttttggtcatttttaggccaaaatctgctaaaaaaaatcggaacaaaatttcagtcatacttttgttttttgtaaaaattttttaggcaaaa

SEQ ID NO: 75770 - DNA, 410 bp, Heterodera glycines
atgaaaattggcatcttattactaccatgtctattgatgatcaaaaacactgttgatcagactgtttctgtgaaaataaaacaatcgaaaggatttgatcaaatatttggcgaaggatgggagaaaaatgttgaggtaaatggaatgggtcaaactgatcaaaatgggacaattggacaaagacaaaatgacgacaaaaataggacaaaaaatggcaaaaaaagtgagtcaaaaatattggcaggacaatttgatcaaaatttggaggtgaaagaagaatcggcaagcgaatgtgatcaaatggaacaaatgtcagaagacagtggacaaatttctgatcatttttcaagtgaaattgaacaaatcaaaaggaaatttacaaatggaagagagaatttcgattaattaaa

SEQ ID NO: 75771 - DNA, 882 bp, Heterodera glycines
atgccaaaaataatagctaaaaatttgggcataaatattagaagtatttataattggaagaaagaaataaaaagtggaacatttataaaatttcaaaaaattgatgatgaaaaaagagaaattgtggaaaaatatttaaaaataaaaaaagaattcatgcaaaatggaaaacattcacagaaggaatgggaagaatttaatgcaaaaattaaacaaatgtttggagtgattcttcagacaattgaaaaatgggccaagaaattaggcaataaacaaaatgctaaaaaaggttaaatttgagtaatttcactcgattttaaaactttaaaatttttttcaagtttgaaattatttttagagcaaaaaattttgacaattgctgaaaaaagggaaatgatgaagcaatatcatcagatgaaaaaacaaaatccaaagctcaccgaacgacaaattgtggcaaacttggaaatttcaccgagctcattctacaaatacaaatccgaattaatgggcgaagcaaaaaaattttgatagggatatattggatttaaaaattatcaaaaaatagagaattctgaattttaagccgataattttctttagtgtttttttatcgttgataatttaaaaaggtttttttttctttttttttaattggcatttaatccacaaatattttgcattcaccttctaattttatttttaatgtgctttaaactaaacattttgctgacgggatgtccactgacagaatatccattagtgatcgaatgtctgggaaccaatcgaatgccaattttacgcacattttataccaatgcctcatccaaatttgttttttacactccatataatttttaaggcattccttcgtttagccaa

SEQ ID NO: 75772 - DNA, 1499 bp, Heterodera glycines
atgcttttgctgtatttccgcatttcaagtgattacgcatttttgaaagatgcacatcgcgaagtgctgaacagtgagcgtaaaagtataatccagagtcttatcagaagacttgacgatttgtacaataatggctttcaacagcccgtgacaatgttttgccaacgcgcggttggcattttgtaaaattcaaaatgtttttttttcaaatataattaaggattatatggcaagcgaagatgacaacggacaaattgtgcttaagcaggtgattattataaataagtatttttgtataaaaatgtgcttttgggttccgaaattctgctaagaatcaattttttctatttagttatttttgaatattaatattttagaattttaaatttaaatgatttattaatatttgtaaaggaaattttcaatataaaagtaatataagcataaaaaattttaaaaaatttataaaaatcaaaaaactaacctaaaaagcgatctatgtttttgagacatcaaaaaaaatgaaattttaaaattgtcaatctagaaagtaaatttttaatttttttcctttccaaaatttttgattttaaatttttcaaatttgaaatcttctgcacttgaaacataaaaaaaatgtatatttttttgagtatttctaaaaaactttaattaattttccattttattcccttggattagttaagaaacacataaaatgttgtacaatattctttttaggttgaagtgaacacgggcgcagttggcagcttcgcgacaagcccacgcttctcgcaacttcatcggcgaatgatcgcaaatgcgggccttgacgcatccgagacggtgacaccggtggaccaatcggacaaaatgtatgccgagacactgtactattcgtggtaagaaaattaaacaaacaaaataataataattattattattaaaaactggtcacatttttggccaaaaacggctataaattcctgcttttggctacggccttgttcgaatatataggttgtgtttttgaataattgaacctttttaaggaaattttcattacagtgcggggttttatgctgtaatacgaattttaggcaacaatttggaaatgatcaagcagtgatcctttttgtacatggaagtctatacagtcatttgatgcttgagtctcgacaaattgtgaacacattagaggaaataacatcaagaaaaatcaaaaaccgcttcattaccctaaaagaggctttcagtcggtcggtaacgaagccaaaaaaaagccacattaaaatggcaccatttttcaaatataaatttattagtaatttagtttaaaaattgaccccgttgacaaatcactgatttttgatgataaatatgtggtggctgttctggttgatcgcattggtcgagaaatttccgacgcagaattggcactttgtgttgaatttgagcgttcaacagccattgtgaaaatgggcatttatattttttaa

SEQ ID NO: 75773 - DNA, 648 bp, Heterodera glycines
atgcatataaaattcgggaagggactgaatgggggagggggtgagtcagtgtttaaatttgcaaaggagttccattcatggaaaccctatgattttttgtttttcagacagcttttttcggcgcgatttttctaaaaacttttgggaactgatgggagggggtggatccggcggtgccgataggcgacgccgggaaaaattttgaaaatttcagtgcaatttggttaaagttttgtaaaaaatgacctattttgtgatttagagccaatttttttaaagaaaaattaaggttttgtcagctctgacggggaaattggaattttaaaatgaatttttgagaaaataatacaagttttcaaaaaaaatttcatttaaattttgaatattcaaaaaagacatcgtttcaaaaaattttctttataaaaattttacaaccaaaaaatgcgcggcgcaccgcgcaacaaaaaaaaaaccgcggccgcgcaccgcacattcaaattgccgcggccgcggatcgcgcaaaaaaaaacgccgcgaatcgcggtcgcgctccagccctggtccggtggcgccgataggctccgccgggaaaattttaaaaactttacacacaatttcttagcagatttaatacaatacttcaataaa

SEQ ID NO: 75774 - DNA, 747 bp, Heterodera glycines
  unsure (1)..(747): unsure at all n locations
agaaactataaagntgagtctcatgtctggtactcaattacatgcagagatggcgcggattccgatttccgatttatggggttggaattccgattctcaaaagactggggccttggaacaccatccctgcttacatgcataggccaaaattaaattataaaatcatttcatataattatttatttttcaatgactttttttttttttgattaccgtctcgtccaaaattaacaaatttaatgcaattgccaccattcgctgctgcttctgctccgcccaccagcagattttgcagctgtacgcctttaaaaccacgtcaaatcgaatgtttttgtcctcggcccacactttttcgggaattattgcacataaatcgtccgtataagagcgtcattagcaccaatgtttttacttttacgtaaatgacccgtcaaatgaaacaatacaatatttgcaaaatttaatgcatttggtgcgctttttatgcgaaatttgacccgatagtccttgagttcgcattggccaccatcggcaactaaacaattaattaatactgcctttggtgctgggtcgttacttaaaaaccataataatgggcgttacttaaaaaaccatcataataagaaatcaatattcctttaattaattatatgattacaatttgaaattacatgagttaattgcaatttgatatttatcccttttatattttattgctttcctcaaattcacacatttttatttgga

SEQ ID NO: 75775 - DNA, 1457 bp, Heterodera glycines
atgcgccttgaggatgtgatgctaatgccgattctcgaattgtgccaaagcaatcggcacgaaatgtggaccggtaagagacttttaaacacatttatatatgttttttaaaatattttttagtcattgttctcggccacaagggacttcttctgttgcttggtcttttcctggcctatgaaacgcggcagctgaagccccgctatttgagtgaccttcgctcaacaattttgtccgtttgtaatgttggcgttttgtgccttttgaccgggccaatcattgcgtttttcctgcgcaatcagcaaaaccctttcttcggctttgtttctgtcacgggtaaaaatactcatcaatgaatggacttggattattaataaaatattattaattaaaaaattatatttatatttaaaacgaaataattatcagggctcgcaagttttttttcaaaataagacaaaataggtgaaaaactaagattcggaccgcaaaaataagattttttcgaaaactaataatagcgcgaaggaaacgcaataaaaacatgaaaaatgacttgaaacaatattttattagcctaaaaaccagggctgctaattgaaacttttcaaaatagcattggccaataggaaaatcatcatttggcgtcaaaatcagcattttgataatttaattcaaaatgaaaaaataattgaaaaaatttttttacggcgcgctttttccaaaaaacttttggtgaatgggggggggggggggtgtccggcggtgccgatagatgccgacgggaaaattttcgaaaacttgaatgcaatttgttaaaatattttcaccaaaaatgaccaatttttgagattttgagccaattttgaggaaaaatagacattttgactattttttaacagattttctctgaaattttggttattttacactcaagaatgaaataatctcttaattcttttaaaaaacgaattaattcaaatattcgcttcaataaaaatagtcaaataggtcattcaaattttgcatttttttttattttcaaatccaaaaataagtacaaaataagcacgtaacgctgaaataagcacaaatcttagaaataagcacacttgcaagccctgtattataatcaacccttaattgtttatttccgattatttttgtttatttgttaaccaattaacagaaaagaattcccgtcaaaaatgaattttcatctaaaatataaattataatttttgtaatacaatacaatttgtcagtgctcacttgccttttcgccagtttgggcttagttatcgtgcccaaattgctgttcatttaccactggcccccaatttaccaaggaggagcaacagcaaagcacgcagcgccaattgttggaggagtcagcgccgaaccgtagcgaacagctacgggatccgcaactgctaaaggaaaatgcggagattaaa

SEQ ID NO: 75776 - DNA, 375 bp, Heterodera glycines
gtctattgtaaaaagtattcaaggatcaaagtttggatacaaaaatcagcttactcaaaatccattaataaatgctaaaaagaacccataattatgatacgttttatatacatctcaaaaaaaaatttttttttgctaatttggtataaattttcaaaaaaattttttgataaatatttacgttttttatttattttttcaaaaatccatactaatttattctgtgctgataacatattttttgactgtcatttctcctcctccatctgctgagtgttgctgctgttgaattaaaagaatttttctttttctttttttggtaatttttgcataaaatttgtgttcatttttcccatccaaaaaacagaaaataaa

SEQ ID NO: 75777 - DNA, 1822 bp, Heterodera glycines; identical to SEQ ID NO: 12202
  unsure (1)..(1822): unsure at all n locations

SEQ ID NO: 75778 - DNA, 290 bp, Heterodera glycines
ccggctacgaagcctaccaatgccgtggccgttgtgcccatccattgccggccaaactgaacactaccaaccatgccatcgtccagtcgctcatccactcaattgacccccactccgtgtcggccccgagttgcgtgcccgttcaggtcattcccgcgcaaaacatgttagaagttcttcctttctcgcttcagatgagtgccatttccatcctttacaaggacattaacaatgtgattgtcgtgaagacttatgcggatatgcgcgtggattcttgcggatgccattga

SEQ ID NO: 75779 - DNA, 725 bp, Heterodera glycines
ccactgaaattcgaatcccttccaccgcaatgagttcattttcatttccgtgggcgacttttctgtttttctccctaatttcttgcctaatttcgctgacagaggccaacccgaagtttctctgtgagttcgccttcttcatctgatcattttttgtcggactttcttctctccctttttccattaatttcccccattttttggtcattctttccctccccccttttttcagtgtcctgcaaagtaatcgacggcatttgccaaaatgacgaactttgcttggaagaaatgggcattcgtttccccgactgttatttggagcgcaaaattggttaataatttcccaacagatgatccttccttggtaaattttcaatctaagattttctccaaccccaaaaaagcgcactaaaatccacgccattcactgaaggggcaaatggaccacaacgatttctgaaaaggactccagcgatgaaactgatgaaggtgctaataagggggaaagtgaacggcataatgtaattaatgccaataaaggtgctaatgatgaaagatcggattccggtgggtcggagatgagcggagaatgccaaacgaataaaagtgaggatgagacgagcaaagacaaacaaataataatcagaaattgccacctcaaacagtccattcattctgtgcaaaaagacatttagaggcgaatgtttaataaatggaagaatcaa

SEQ ID NO: 75780 - DNA, 591 bp, Heterodera glycines
atgcacgcgttcgaaattgacgagcggaccttccaggacttgaagctggacgacgaggcggaggatgacgcagcgacgggaggagcccagaatgtacaatcatcatcagcaacaacgacgacgacgggcaaagttgtcgtttttgatgctgaactgttccaagacgaggcgggcatggtggacgacgacgacgacgatttgttgcagtcaaattcgtcgacggatgatgatggtggtgatcaacatgatgatgatcagggtggagacggacagaagtgacccctctcctagccctaactcccgcttaattattggtaattgcattgaacaaggaaaaaacagaaattttttattgccctatgaattggcatgtgtttttttcattggtattgtgcgtgcttttttttgttcggtttttgctcattcattgatttgtttggttggaacatcagcagcagagccaatgtttgtatgtgtcaaaattttttgcgtgttaattgttggataaatattttacagataatttttttaattattaaaatctctcgtttttttaaaggattggaaaacgtttttaaagaaaggaataaa

SEQ ID NO: 75781 - DNA, 1946 bp, Heterodera glycines
  unsure (1)..(1946): unsure at all n locations
atgtatcggttggttcattttatttggtttttgcttttagatgtcgaccccaagtcggttctctgcgttttctttaagcaaggcctttgcaccaaggggtaatttctacaaacgtttttttttaatctaatcgtcacttttcggaatgtttaggcattttcttagcctaaaaaaactaaatccctaactcagactcaaaaaatctgaatttttttttgttgtgtaacttacaaatttttttattatttttcccccaatttccagcaacaaatgcaagttcagccatgacctgtccatacagcaaaagacaatgaaaaagaatttgtacgtggacagcagggatttgggcgataaaaaagacggtttgtttttttttattgcggaattttttttatttgagggggtctaaattcgaaaattttattaactgaatatcggtcgatgctcatcaaactttttttgtttcaaatagtttccatttttcaacgcttaggccttgaaaaatttttagagaccaatgaaaattgggacgaaaaaacgctgcaagatgttgcggagaaaaagcatggtgaaaaggaccggaagaggcccaaccaaacagacattctctgcaaatatttcctcgaagcaggtgagggaggcgaacgaggaggaggattggggttttttaaaatttaaacaaaaaatttgccaatttttgcacgatatgggtctactgggcgccatactaccacgaaaaatttccttgcgattttttttctanattttttccaaaaaaaatgctaaagtttttttttattgaaaaacaactcgaattttaatgagattcggaatttgtttcgcaatttttgttgatttttttttgtggtttacgactagaacccggatgggatcgccgggattttccctatcccgtcgactttttcaaaatttcggactctaattgctgaaaaaatttaagtggagaacagcaaatacggatggttttgggaatgcccaaacggcgacacatgcatctacaggtccgttttttttgcggaaatttttaaaaattccgcaaaattttgcttaggcatgccctgcctcccggctacattctgaagaaggacaaaaagaaaatggaggagcagaatcggctgacccgaatcacgctggaagaattcattgaaacggaggtaaaatggatttttttttaaattttaattgggtatttctttaaaaatatccaaaatttacccaattttccgattttaacaaaccataacgctcattctatacaaattcgagcagaaaattttggatcattttcacgaacataaaaaattttttatagaaaaaaacgggagtggcacggagccccgacatttgcggcccgacttttgcggtccagacatttgcggctatgtccaaaattggattcaaagttgtgttttttcaagccctgatagcttaaacagcatttaaattaagaaagcactgtattctagtttattagaaaatttaattctgttgtttgaaaattttattattttttcaaaaattcattggagatcaaatgatcggatacaagcactttctatcgctttgttaaagcttttaggcgatcagggattgaaaaagcttaagtttgagcccgattttggacaaaggcgcaaatgtcggggccgtaaatgtcgacgaacgcttagggtctcaggaatttaaaatgttagaaagccttacggacatttgcggacggacacttgcggacggacatttgcggacggacatttgcggacaatttctgagaaaaaaaaaattaatggaaacatttttttctaaaatctaatggaagagtgggcctcgtcagtgcggctcttccaaaagaaaacaaaaaatgtaaaaaaagtgtgtttcggccctaccgcagacacacaaaactaaaaaagcacacatcaacaaataaa

SEQ ID NO: 75782 - DNA, 1976 bp, Heterodera glycines
  unsure (1)..(1976): unsure at all n locations
gtggattgtacaagatggtggcattctgatgctgatcgcttatttgttacagcagcacaaagtgtggaaaggctgcaaattgaggtgggaaagtgaagacaaaatattaaatattattttatctttttcaaaattaattttaaatatatttaaatcagaatttacgtgatcgctcaagagggggagcaaaatgaagagatgaaacatcgcctgcaacgtcacatttacatgcttcgcattgatgccacggtgggttaattagcgcactaaaaggcgtacaattaatatgggattaagccccaatccaatgcgatgaattgcgaatttttgaaaattactcncctgatgagagtgttgctccccgatattttttcaatttatcccagccacccccgacaaatttttcgagaatttcatcccctatcccccacttttctctccccgccgaggatcggggaatttaaatcgtaaataataatttaactgattttttaaattaattaattagcagataaaattgccttgtttaatcactcgtcgctaattaccttttaatgaatgcatttctttctttgcaaggtgttcattgtgaatatgattgagcccgaaggtgttgaggacgacgcggtgcagaagacgctgaacatggagcagcggacacggacactaatgaaggcaattaacaaattcaaaattgagtttttaatccattagtgagtcttcagaaaaatttgtccgccctctcaaatgggggactgtccaacggcggcttcacgcccgatgaacgcttccgaagtggcacaaagtgagagaagcaagaaatttatataaactattatttttaaatattttaggctatcatatttcctaaaccccttaaattagaccccccctagaaataaagcccaccttttgagggcaaattgaaaaataaaaccctcggaggctctattttaggaaatacgatattttgattaaaatctacattgggcaaaatggtctatcaatttcaattaaattttattttattattttggaagaaaaaagtttaattatcaacgaaaaaatgcttgtgagcttttctttttaatagtccgctttatgactgactaattttggttttattaattgaaattaatttaaaatttaatttctttattttttcacagttcgcccaatggaaatacgttggccgtgcccaataccgtatgccgaccgccacgagacagtgtcatcgagaccagctttatacagtaagcttttgaatttcgggaataatttatttgcttttttagaaaaactttccaagaagaaaacaacgacactgtaagcagtaatgagataagcatcaaggacattgacgacacgaaggtggagggaggaactaattaaatcaaaacaattaaaaaacctaattatcagattaattagatatttaaatcgtttcttataatgctaattaatgaatcaaaattttatttgttcattaatttaatatatcgcacttcaatttatttaaaaatatttattttttttcaagaaagctaaatatttttttatgaaaaattggttaataattaaaaagaaatcttttcaaatcgctctatttctatattattaccataaaattaataaaaagaataattattatttctcaattgtttttaggttcaaaaaatgaatgccgccgtccgactgaaccaagtcaattttttaataatcttttttcacatttcaaccaatttcgctcaggttattctcgagtattcttcggagagtcaattggtgcttttgtcgttgccaaaaccgcccaaatccatccaggccctcgtcgaaaattatttgtcatatgtaagaaagccaaaattttggttttaaaattccaaatttttcaggtcgaagccctcacggaaggcttgccacgcgtgttgctgatcggagggtcgggcaaagaagtgatcacggcagattcataa

SEQ ID NO: 75783 - DNA, 1368 bp, Heterodera glycines
tttttcccggacggtcctgaaaaggtcgacgtcgcattttcatccggtcgactgacagtgctggtcaaatcgcgcatgctgttcggctatgagtttgatcagaaaacggcccaattcacgtgagacaatttttgatttcattaaattattcgaaaagaaaaaggactgagatgctttctcgagtcatgactaattatcacccgagaatctcgaacatttgcccttcttttcgaggttagaataaaaacggaccggggttgggattaacgaattcaaaataaatttttattcgacaattttcgaaaaataatcctaatgagaattttggaagtccaaatgggactcagatcacttccaattccgctatttaaactcatttatatcattaaaagaaaaatcatatgttcgaatatcatttctaaaataaataattttaattatttaaatatttcaaaatgttttatttgtatttaatttttaggcgtgaccaccgttacccccgcgaattgcacagccgaattcttttctaccccgagggcgcttttccgattgtcaatggaagcgtaattttgttcaaagtatggcaaaaacaaataaaaaataaatgttctaaaattgaaattcaggacgatgtgttcgccacttacaacgtggagagcaacacgccgcatttggtaattagttaattaattcattccaattaattgattgattagaatcattagttacgcaattaattaattaatgagtaaaaattccagttcggaagcatgtccgaatttttccccggactgccccaaaatttgcgcgccggttttgccgccacgcccgattttaccacctaccatatgctgaccaatgattacggtaatttgctgccacaaacaataaccgatcgattttgcatattgtgccctcaatttcaatgaaaatttacaattttgaacctaataaaaaataaaaatgaacttttatgccaaaattgggcttgatttccaaaagctctttcttttccgcattaatagggcaattagcacaaataattaacaaatgttttcagcatttttgtacgatgttcgcgtggcacgaacagtcagctcacaaagcattggccaatttgttggctgtgaggggaacaaattaatggtgaaaagcaatttattaaacattctatttgtataattaatttataattaatgtttcttaattaacactttaaattaatttaaattattatttttattaattttaattattaatttatatttttaataaaaataatagttttaaatttcgtttgttaattaattaaatttttagcctcctggtccaccgatgcctcatcttttcttcccataccagccgtaa

SEQ ID NO: 75784 - DNA, 1285 bp, Heterodera glycines
atgcacgttgctttttcttttgtgtttaggtgtcgtcaagagcaccacccaaagtgcaacattttcgggcgcaattgtgttgggtgtgtgtacctctacacatcgcagaaatgcgacgtggtggaggtgcggtgcagctgctactactgttgcgacccacagtacgccgcgacgtgtccggacggatgcaaaaattgcattaaggacggggaagggggatgctcgcagaaatcggcagaccatttcaagactttacagtatttggcaatgagaatccgttttaatgatctaataataatattaattagaatcccgatcagtagaaatgagttgtctctttcgtcattggaaccgatggaaaaagttaacgcgcactttgaaatggtaattagcataattaagagtgatttactcactcacatcaattccatatttataaacagatcgatgcggacaaaaatgccggaatttcgccagaagaggccatcgcatttttggttaaaacaaagaatggcacttcagctgacgatttggccaaaaacatggcctggttttcccagatggacagcaatgggaacaaccgaattgaacccggggaatttgatcgatcactgacggagtgaaagatgcgagggcgagatgatttgcttaccggaaagaaattcacaaaccaaacgaattccatgaaaatatgacaatttaaaaaggttttgttaaattgaaaattaaccaaaaacggcaaagatgtttttgtacaactgttctggactgtattgtcactgtaatgatgatatagtggtgtcatggcagttcgtacaatggcgtttcgtacaatttcaaatgggaatggccataactttttgttcgtcagttaatttcctgaaaattggtataattcgaaagctctacgtgtttagaagctatcattaagcagaagctaagcgattaatcatctcaccaaaaagttatgatttatagtttacaaaaaatagctttttcttgaatttttaattcttataaatcataagtttttggtgagatgattaatcgtttagcttctgcataatgatagcttataaacacgtagagctttcgaatgataccaattttgaatcaaaaactgctaggcccggcgaaaggtagagagacccaactattttccgagtttcattcggaatctttatcaaaacatctttacttgtgcaaaagagtttacactcgttgcattaatttgttggattagcagtcctgttcaccacttaagaaggtggaacgttataataaa

SEQ ID NO: 75785 - DNA, 981 bp, Heterodera glycines
aggaatcacttatggggcaaaacaaaggcagcctttaaatacgcatatgaccattatttagtaaatttaattaccaaccatttttattaaaaataataaattggtaatttaagaatgactttgattggtttctcaagactgacgacgacacttttgtgattgttgagaatttgcgcttccttctgatggctcattcgccagaagaacccatttattatgggtgcaaattcaaaccctttgttgaacaggcaattaaatgaaattaataataattaataaatttaaaatcgattagggctatatgagcggcggagctggctacgttttgagccgaatggcattgaaaaaatttgttgaagaaggactccccgacgaaaagaagtgccgggtatttttattccgaaaatctaaaacaccaattactaaattcaaataatttgaatattagaaatttttccttatttcttgaaacattaatatgtaaaaaatcagattatctattttaagcatttaacattttttaaacttgaattatatattttttacttgagttaacttttgctttatatttaaatattcataattaaattacatttaaatatttccatcttttaaaaaaaattgatatttggaatgaaaaaattttttatttgattatcgctagggatgatatttttagctttttatctattttttcctgagttaccaataggcttaaaagcatgaaaatatgtttttttcggtcgttgttaagctacttttcgtgtttttagaacatattttctatgttactatttttagaacctaaaactcaaaactatttggaaaaatattttacgtattttggcgtttcccaaacatattaaacaaaatgcaataaaaacgaaaaatatacccctaaaaccgatcgcttcagaaaatacatctctaaaatcgacatattttttttcaaaatacaaccctaagaatggaccaaaaatt

SEQ ID NO: 75786 - DNA, 2322 bp, Heterodera glycines
atgatcagagatggccttgcccacaggtccacgaaggtgccgttctccaacttttccaagcagtactccctgtccttctattggtcctcgctgactctgaccacgtcgggtcagcagccgtaccccacggcggcgatgcacaattttctagaaatattcgacacaattatcggtgtgctcgtcttcgcagtcattgtcggcagtgtgggcaacgcggtcggtcaccagtaaagacaattggccggtcaaaaacaaaacaaaacccaagaccaaaattaaaagaatttgaccaaagactgttgccggcccaagagtttcctaaaatcttgatgggcatccaaaaatccaagtttattttatcaaatttattgttcttgtttcaaacaagcatgtttgtggcgatttaatctctattttttcgggttttattgcatatttgccattttttaggattcttttcagattttagggtttagtgtctaatttgtaattttaggtgtctacgatgaatttgactcgttctgagcttcaacagttgaatgatggcatcaaattttacatgaattaccgtaacgtaaaagacgcaatgcaaaagcgcgtgttggactgtatccattacatccgacggcacgcgcaaatgcatgacgaaagggtggacaaatcattaagacaaatttgaaaattaaacatgaaattaatgaaacccaggccatccttggctccattttgcccgcccgactgcgcggcgaattggccgttcatcttcactttgaaaccattgtaaaatcacccgaaattgcttacaacaatgaatggtttgaatgattcccttccaattaagagccgagtgcaattgtttgcccattgtgagacttcgcttctctacgaattggtcttacgcttaaaaatgcaaatggtaattaaatcctaccggattataaaattgacataaaattaatcctgaatatcagcaaaacaaaattcaaagattcgtgataaggtcggggtttaattgattgtcagaattgttaatggctaagtccttctgcatttttctggtcgagctcggtctgtttttggtctgaacaccttcagagtgcctgggcccgaccaaagtcgggatttcttatgctgctcaccaattaatcgcaattagagaatggcaaacagaaatgcctaattcggccactgattttagagcgtattgttaaaataaaactaacaacaaacgtaacgggaaatttaaattttttcgatcggcaattacttttccatcattaagttcgcaccaaatgattttctctgtcgtcgcggcgatttagccaaagttagcgtttcactttttcgactgtttaaagagttttgaaatttttgtaggaaatgtttgtgttgaagcgtggtgttcttgagattattgacgagaatgaacgcgtagaacatttggaaagcggcgcaacatttggcgaaatgtcaattttgaaaccgatcgggccgttgggcaaattgttggcacgacgcaggttggccaaccctttttctatttggcatttggaattggccattctttgttaagccattcactgcgatcgttgggctattccgaggtgtatttgcttagccaggaggacgcgctcgaagtgttcgctgattatcccgaacagcgccaaatgcttatccaccacggtggggaagcaaagcaaaaaaacacttaatttggaagctaattaaatatagggaaataattattagcattgaatagccaaataaaattaaaaaatggattcaattaatgtaaattggttgcctctctttcttcttttgtcattccgtctttccattaagacaaaaaaattatatttaaatgaatttttagtcttgaaaattgagctcatttcatttaaaaaaatgaatttcataaagacaataaggaaaaaatataaacaatataaaccttgaaatattacttgtttatgaaaaaaattattattagccacacaattgttgatggagcgtggcgaggtgtgcggtgccgaattggtcgagccgggcccattggaccctttggaactgtgtggtactgaaaattcggccgaactgcttcaattgctcggcaacactctttgcggcttggacgccacactggacgcactctatgacaaatttatggttagtcgtttatttttcattttatggtattaagctggcccactttaggtgaatagttcagagcttaagcaacagctaacagtgctcgagggaacctaccaaaggaaccggcagaagctgcgaaagaaatggcacaaaaaattgtgccaaaaatag

SEQ ID NO: 75787 - DNA, 635 bp, Heterodera glycines
atgcgatacggtaggaatcgaacgacaaacgaaatcctatggcattttcattttgtttaccttgcccaacaggccattgaatgtgccaaggccgagaagacaaaggaaaagcaaaagaaaaatgcaaaaacagaaaaagcggagaaattgccaataaaatttgaggaaagtgagtcatcactggatttgcctttgaaattcaaattcagcagctaaaaatcattcataaatgaagtcattagccaaaaggataattaattttgaagaatttagataaatgtgaaaattgtgttaaaataagaagcaccttttcaccttttcaacgagaatgcgaattatcccccaaaaaaatattgaagtaaatttttgaaaatcaatgagaataaaaatttttgaccaaacccacccactgagaagtgattttgtaggaaaattaatgcttaaaatgaaaaagacgaaagtgtgggattattggagaagacaaaggcgacaaagaatattaatggtactcgaaagagggcttttcccataagaatttaaatttgtaaaggacaaaaattttgaaatgggaaaattgaaatgaaagtgacagaaaaaagatgcaaacttttgcagaattaatgccaagaaataaa

SEQ ID NO: 75788 - DNA, 529 bp, Heterodera glycines
atggcaatgaatggcgcgacttttacgggacgacgcgcacttttacccttggggcgaccatgtaatatgatgtttttttcattttttcatccaataaatgttatttagccttttttggccccaattttggtccgggccgagtgccgggatttcgagcgccgggaattggccgttccgtcggaaaattcggcccaaacgcatatagaagtcaccttttttaaaataaagttaattagttaattaattttttagccaattcgatcatttcaccaatgcgttttggacgcggaggttttcggtcttcgggaagtgaatttggtgaattgttatgttattttcataattattttaaatagtttcagctaatccgaacagcccatttggcgctggcagacctttgcccgttgttggaccttatggccaatttccagtcgcgagaaggcaaatgccattccgactttaattgtctcaaatgactcattcattgaatggatggaaataactcataaaaacccataaaataatttta

SEQ ID NO: 75789 - DNA, 412 bp, Heterodera glycines
atgcgtttcattcattgctttgtttcaatgcttatcatttgggctggtgcacagctggtaaaattaaaaaatgaataaattatcaaattttaaaattaaaatttaattaaattaatttcagacttttggcaccgattattccccctattccccctccggcgcctattcggaaaaggcgggcgattacgaatacgcctatggatcgccccatcggctcgtcgacggttaggataattacctccattccccgccactttcatccattaaatttcaattgtttggttaattaattaattggtcattatttggcagattacgtttgcgaccttgacgcttccattttggtgttcgtttttttgaatccattttatttgcctcccattttatgcatttaattttaatttcagagtga

SEQ ID NO: 75790 - DNA, 575 bp, Heterodera glycines
atgcgtcttcttctttttcccaactttggcctttttttgtgccttttggctgcagtgactgtttttggcattgaggtcaaaaggacaacggaagtgagcgaacgaaaaattcaaaagaaaaaagaaaaaaaatttaaattcagcaaacaaattcaacaaatccaaattctgtggataaaatcaaaacagaagaagcaccgccgtcgacggtgacaaattcgaagaacgaaacatcgacaaaagaagcagagaaaacggagcacaaagaagaaacgttgaagaaagaggaggaggaggaaggaaaagagaaagaagagcaaaaagaagaggaggaggaagaggaaggagaagaggaagcgggggaagaggaagagggagaggagtttggagaagaggaaggagaagtgacagaggatgaagaggaggaagagggggaagtgagagaggatgaagagggggaagtgacagaggatgaagagcaggaggagggggagggcaaggaggaggaagatcagaaaagaggagagagtgaagaggcgaaaaaggaagaaaaaggaagggaagaggaactgtaa

SEQ ID NO: 75791 - DNA, 772 bp, Heterodera glycines
atgaaattatttcctctactattattaattattttatttttaattgacaaaattggatcagaaaagaaaaagttacaacaaaagtcatttggcgaaatatttggagaaaaatggcaagaaaaagaagaagaaaaacgaaatgaactcaaaaaaagagaaataattggaaagttttataaaataaaagagaaaattaagcaaaagggaagaaaatattcagcaaaagaatggggaaaaattaactcaaaaatagcgaagaaattggggacaaatcgaaattatattcaaaaatggatcaaagaatttggtcttcaaaaaaagaaaagttacaaatcaaaaactgatgaagaaaaactaataattgtgcaaaaattcgttgaaatttcaaataaatataagcaaaaaagaaaatattcgccaaaagaatggaaacaaaattatgccgaaatttgtaagaaaatcggagttaactatggaacaattgaaaattggaagaaacaatttggaattaactgtaaaagaataacggaggaacaaaaaatagaacatttattgggaaataaaaagaaaaaatccaaaaatgagtgataatgaaattgctaaaattgtgaacacttcaaatgcgaatatttgtaattggaagaaacaatttgtagaagaaatgtttgagaattgaaaacggatgattttttaagaaatttcgttgagtccctctccgatcgacgccttaaaagataggaattttttgtttgaacaaaatatcggaaataaa

SEQ ID NO: 75792 - DNA, 1499 bp, Heterodera glycines
atgcgcggcgtccacgcaaatagccgccttctggtgagtggacaagatggttggctggcaggaagcaccgacgaagcgtggcaagcgcaagaccagccgccgttgatgacacaatgaatggatcaaggccttgtgcatgctgttcaatcagatggcgaaaacggatgaccgactctcgcagaatggcaacgtcgttgcagcagtacatgatcagctgctcacgaagctgaaatctgttgccgttgttgttgttgttgttttcagtgtgccagcgaaccactcccccccccctctaatagagtcactcctcttcgcttctgtttttttttaaatttgaactaatttttatttattttttacttaagcacatttgttccaataattttcaatatttcaggacgaaaagcgtcgcaaagacctgcttctgcagcgaatgttgcccatttcggtggcccaacaggtgttgtaacaaaaaataataacaaatgaaaattgaaattgaaattttacgtgttagtatggacaatcatgtttcaaaaatcataataccgaataaatttttacgaattgtatttttaaaaaataaaatcccatggcctagtttacaaagaaaaattcaggccttcagcgcctttaaaaaaaaaaaagattattccctgatcagtcattaaatcgaataatttttgaacaattatttttcaaaaaagattaattatcccaaggcctatattaaaaaatatgtttaattttcccaagggctgtttttcaaaaaatatttttccagcttctggaggaacgtgaggttgtgcccgaatcgtttggctcggtgaccatttatttctcggacattgtcggcttcacgtccatctgcagtgaaagcacaccgcaccaggtgatcgccatgctcaacaagctgtacacactgtttgacggggtgcgtttgcatatttttgacaatgaaataataataaattaatttattaattatggatttatgcaaaaattgttaaatatacctttttttaattattttttgtttaaattaaataaaattacatattaatttattttatttttttaaatgtagaattctttaaaaaaaattttgctgtaatttttttaaacacagaataagattatgccaactttagtgtaaagtgtttttcatttcaaatgcgcatagaataaaaacttttttacaattaaaatatgttttttgtaaaaaaacaaataagttttacaatgccaactttaatgtaaagtgtttttcatttcaaatatgcatagaataataaacttttttacaattaaaatgtgttttttttatatacagaataagttttacaatgccaactttaatgtaaagtgtttttcatttcaaatgctcatagaataataaacttttttacaattaaaatgtgttttttttatatacagaataagttttacaatgccaactttaatgtaaagtgtttttcatttcaaatgctcatagaata

SEQ ID NO: 75793 - DNA, 169 bp, Heterodera glycines
atgttcgataaggaaacggaagagtacaaatgggaaatgttgaacgcgcggagcagggaggagcggaagaaggccaaggaatgtgtgaggggctcagtgttactcaagatggcccaggatagagcgttctcggatgaaagaacaacggagcaactggcaaagtcaatgg

SEQ ID NO: 75794 - DNA, 1144 bp, Heterodera glycines
  unsure (1)..(1144): unsure at all n locations
atgaagagttcaccgaaagcaattggcggcggcggcatttctttgnatccgtcaacattctctgctgctggcacatcaaccggcggtccctttgatgttgccgaaaacgttcatggcatcgatcatgttacgcataaaccatttaattttttgcgcacgaactctgagcgtgaagcggaggaaaagcggcagcaacaaagacagcaacgtgaagcgattgtgcgccataatgagttcataatgatgggaggaaatggatttgatgatgaagacgaatccgatgtggactcggacatggactcgccaagaaatgtccaacaacaaagttacaacgacggtggtcatcgccgccttggcaaaagcgaaagcaaaaaaaggttggcagaaaagaagcagcagctcgcggaagctaaagctgaattaaaaatgcaactgagtgggctcaaacaaatacgacagtaaaatttttaaggcttttgcatttgggaaaaagaaatacaaattttgcccaaaaaatgggtgcgcgggtcctttcgcaaaatcatccgcgtcacctttggacattttgtaaaatgcgccattttaggctatttgttaatactgtagtttgtccccaccccattttagaaaaaaaatttcaaaaatttttttgtcataaaaacaagtttccaggggttttgggggtcattggtcacgaatatgatatccatttcggccaattccgaaccccggacccgatttcgaacaaaaagtcgaaaattcaaattttctaatttctgatttttagtctaactatttaattgttcttttattgcaaaattggtagcttttagaatgtatccatgtatttaaaccgattttgagccaaaaatgcgaaattcgaaaatttgaatttccgactttttgtttgaattcgggtccggggttcggaattgttaatgttgctaaaagcaatcaaaatttgcattcttgtcatcttttcgatagccacggtttttctttattagcctgcacaatttcgaatcaaattaacaaatttattataagttatgggctttttcaaaattcgaacaaaattttgaaattttgcaggctaattgagaaaaacctgggatatgcacctcagaggcgttggtttaaaaaa

SEQ ID NO: 75795 - DNA, 1998 bp, Heterodera glycines
  unsure (1)..(1998): unsure at all n locations
atgaaagccatcaatttggaaaggtgggcatttggaggaagaggcaacctttattaggaccagggttgccagattaaaattttaaaaagcctcattttgggtcaaaaagcctcatttttacaaaatattcaaaaaacgtataaattgttcaaatgttatatttttgattgtccatgatcgatttgagtaattttttgttagaaataagcattttgtgaaattctgagcacgagaaatcggagttgattttttgctgtgttttttccgaaaaattttttggtgaaccagggggtccggcgagtgccagataggcgccgcccgggagaaaaattttcgtaatttttaatgagatttgttaacagatttgtccacaaaaatggccaaattttaggattttgatcaaatttttaaggaaataaaggacttttaggggctggcggttccgataggcgccgccaggggaaaattgagaattttgacaatatttttagctgattttcattaaaaaattattaatttagtggttttttggaaaaaattggttcttttctggtttttataaaaaattttagcaaaccaaattattaaataattgtaaaacattatgccaatttatcaaaatttaaaatattctgaggattttccccaaaagcctcaaaaatcctcaaaatttctaaaaagccacaaaaatcctcaaatcctcattttccaaaaaaatcctcattgacctatcaaaaagccacaaaatgaggataaatcctcagacctggcaaccctgattaggacgtattattcatcatttaagggaataaatgtaaaaaatcatttctttgcgtaatttttgaattctttattaatttataataattttaacagttttgccgcgattggattcgccacgaaggaagtgccattggacggttcaattggccaaattttgaacagttacggataccgaagcgatggctcatttggctgtaatggcatcaatcggccgtgcaaaatgccatttggccaagtgccaatgtcattatttgacgtttcaatgcaatcggcggacgtggcaatggcatataaatcatcggagttttccactggtgacgtggtcggatgtggccttttcttggacactcaactgatctttttgacaaaaaatggccaacgaatgggtgggccaattaaaattaaaaaacaaattaatgaataatttaatttttaagatgactcatcgtttttcatttcttctcccgccaattctctcaattctctgtttccgtgcgtttctttgtgggcgggcgacaaaaccgaggcgaactttgggcccaatttcaaattcaatttggccactctttgaagaaaacagaaacaatggaagaaggcgataattttgaattaattatttattattatttttgctctttgtttatttttaatttttgttttgtaactgaaatattattttatttgtttttaattttattttattaaaaaatgctcttgaattttttgtgtgttttatatatctgagaattttgtccattaatatagtgaatacaaatatgattcaacaaatttctgttatccaagcctctacatctttcagtccaagtttttggactataactttttttattctcaacgaaatcaaacaaaaattcaaaaatttcaacttttttgcaatttttacgttatacttttttggtaattatttagtcgcgaatcaatagcttagaaacagcttaaaacagtaagcttttgaatgatatcaagattgttggatttggttgagaatgataaaagttatatccaaaaactttggctggcgcctaaatggcccctactccttnctatgtattcttgagggagtgatcctgaatgtgatcccaatgaaattcctgatagattctgatgaatttaaaaaaggacagggatggacttagaggacgggaccccgaaatttaatccctttgatcccgtccggtctttattacaaaaaaa

SEQ ID NO: 75796 - DNA, 1005 bp, Heterodera glycines
gatgtgactgcgatcatcttttgtgtggcaatgtccgaatatgaccaagttcttcacgaggacgaaacgacggtggcattttaggattaaattcaatgccaaaatattaggatcaaaaggaatttagttaaaatttaattttcttcgtgtggaggaaaaaactcaaaaattcttaatggtaattacagaaagactgaattttttcataaagattcaatattttttaagtttttgttgacaatttcatattttatttaatttgttgcgaattattttaaacggttaaccgttaaacgtgggcaatttgagaagaagaaatagagaaatagtgtgtggaaagaaaaaaggagtgaagggcagacgcagaagggaaatttattctctcaaataaaaaaataatgcaagcattcacatctcccatgtggtctagtggttaggatttgtggttttcacccacacggcccgggttcgattcccggcatgggaagagatttttttcaattcttttttgtatttttagcaattattatttatattttatttttttatatatattttaaatttaaatattcgcctttttctcttaagaatcgaatgcacgagtcgctgaagctgttcgactccatttgcaacaacaaatggttcaccgacacttccatcattctcttcctgaacaaaaaggaccttttcgaggagaaaatcaaaaagtctccgctcaccgtttgcttccccgaatataatggtaaatcaccaattaatgattaattgccctaattaattaattgttgcctaattacctgtgttttctctgcctttttaggccgttccgattaccacgaggcgtccgcatacattcaggcccaatttgaggcgaagaatcggtcgaccaaaaaggagatttactgccacatgacctgcgccaccgacaccaccaacatccaatttgtgttcgacgcggtcaccgacgtaattatcgccaataatttgcgcgggtgcggcctttac

SEQ ID NO: 75797 - DNA, 777 bp, Heterodera glycines
atggagcattttccttctaaatttgttctctgcttgctcattgcattcatcggtgaattaatttaaaaaaaaataacaattttagttaataattgaaatgtcaaaaaattagcggataatagaaaaatgaggagttgttggtgcggtaaaagagaatcgggaaattaggaatgaaggcaaaaatttaatattggaagaaaaataaataaaaaaccaaaatttcatattagatcagggctcggatcaaaaattttccaaaatcagaaacatcgggccgaaaaaaacagattttggggtcgaaaaccagaaccttttgcaaattgctttaaatcggcttgtgtaacaattgatcatttaaatataatatcacattttgattttgcacctcacattatcggttttaataattttttagggattagattagcaaattgtatatttcggtgcaatcgggatcaaaaaaaaatcagatttttcattcgctacatgaaatttcccgggctctagggccccaaaaaaaccgaaaattctcgactcaaaactctgtactccgactgctgaatatttttacataattcctttccattcaattaaacactaataatataatcttcaaattcgcagccgttccatgctctgttttggcactttctgctggcagccgcgtgtcgatgctcgcgtgccacaacaattaccgctcacaactggcaaaaggcactgcggacaacaaatcgggcaaaatgccggctggcagcaatttgatccaacaaaaatatg

SEQ ID NO: 75798 - DNA, 799 bp, Heterodera glycines
  unsure (1)..(799): unsure at all n locations
atggaaacccatgaaacagaaaatagccatttacaatatatgaaatatcgaaagatggtaagtgacagaaattataccaggcaatttgcaatttgcatctgaccggacatttggacagggcagcgcggacgtacgagtattttgttttcagtaaaatccgaaaaaattgctatcgtttgagctcacatgcttagaagctaacttttgattttggagccgaattaaaaattgtttctaatcatgtaaagctaccgattgatatgataccaagattgtcggatttgattgataaagaatatccaaatgccacttcttttgaataatcgtatcacttcatttttttgtttgcccgagcaaatcactgtctacctacagaaatgatgttacattagtggtgcccatcaaggttacagtatcccagtggaagttacagtcacagtatcccttttccaggtttggttcctcgtctttcctctgctccaatgatcagtacggcttcgtgttgtacggatcgctgaggtgggtgacgtcactggtgaattccatgcgcaatttgtccataattttatcggcataattagcagcagcatccttttcgccaccatttttgtcataatatcgcacaaattttgtgacacttgactgcccaacaattgtccattcgcccgtcaaaatttcgtgaagataagcagtgaatgcgccatgagtggacagaacaatgtgctcagcttggaaaagcaattaaaaaaaccaacgaaaacaaacaaaaaatgtcagtcaattaaatttaagaccanaa

SEQ ID NO: 75799 - DNA, 1237 bp, Heterodera glycines
atggtgctcgatttggtcagatacgaaaacaaattgagccattataacaatgttcttgtaaacatcgtaatacagctgaagcaaaaattggaatttttaaaaaattcatgcaaagaaaatgtaattttattataatcaaatatttaaatataaagtgggattagctttgttaattagttagtttatttttataaaataactctctaataagtttaaaaatcacaacatttggttttcttagggaattgtcaaaaatagtttttatttttttttagtcaattaacatttacggtgatcatgaatatattttggacttgattgagctcaatttaagcaaagttaaagtcaaatatatggaaagtgatattacaaatgcagctcaactgtggacattaggttaaattatttatgtgtgaaaattgttttaattgataattaaataaagaaaaaattattttaaaatacatatgtacaaataaattgattttaattttttttccagataaacgtcccactgttatccaatcgttgtgggtcatcaggcatggccatcgacaggacaatattgacaaaaaattatgtactgaagacgaattggccagggatgacatcccattgtccccgctgggcattcaacaatcccaggaattgggaaagcggtgaattgcagaaaattttgaaaaatacaattttgaatttaattagctttgaaaatgttacgatcagcaaagttttttcctctccattttcacgttccgtccaaacagccattggacttttgggcggcgctgaagcaaaaagtcatgcaattagcataaatattgagccaggattggccgaggtcgtcaactttaattaaattttcatttattttatttatgttttgcctttttttagcttcttgtgccttgctcatttttgcaattttgggcagcattttggcaaaaatttattcatcaataaattcagaactgtatcggcacttgaatctgtgaagcaagtggaagaagacgattgtaaatgggtcattaaaaaaacaattggccaaatattggcagacaataaaaatggtaatttattttagaatttatgagtaggcccaatttttccatataaaaagttaattagtaaatttttattaaatttagaccaaatatccctaattatgcaaataagccgttttatctaattatctttttgacaaatttacattaagtgcatataaattaaaaataaa

SEQ ID NO: 75800 - DNA, 1239 bp, Heterodera glycines
atgaagaatattctatccaagtggggaattgaacccaggcgaaaaattatgaaaggtagaaagtttaaccactacaccacatgtgcatgtgtgtaatcccatgactaaatgaaataaaatttaattttttctcaaaaatttctccttcttcaccaatttcctactcttttctcgaccagacccccattcttaccagtgcaaatttttaccggcggtaccggtactagacaaaccggtaacggtaatttcatttttgaaaaaaccggtaccggtaccaaaaaaaccggtaattaccggccagtaccggtaccggtaccggtaccgctcaaccctagatataatataattttattggaaattaaatttaaaataaattattcttagtcttagaaggaaatgattaagcattatgaattaataaatcacatgcttactgatttttgtctgaaaattttatcatgatctcttcactattttggcattttcttcactatttagttaatggcatttttcttcactatttagttaattatttgagattttttttcactaaaatttccaatccctagtcgtaaaacaaaaacaaaaaatgcttaattgttagaatattcattaaatttatccgaaatttttgaatttctgaaatagatctttaaaataatggaaaaatgggctttataaaaatcatagatacatatttgctttgccttttattctgataattttttttatattaaatcaatttttcactacatttatgcattaaaaagatttaatttctaattcctacttttaccatccatgggtttttactattcttatttattcatattaaagtaaaatcattgttttaaatcaatgcttaattttataatctatattttacgcatttcaaataaatgatgattgtatctattgtacaaaatgttgtaaattctatacaattgcgtaaattttggctaagaaattttcaaaattatgcaacatatttgaatgacattcaggaatattgaataaactaccggacgggaccgagatttcgcgtgattcttgtggggttccgaccacacggaatccgtctcgaatcttttttaattcatcgggattaagaaggacagggatttgatcgggctacgagtcggaattaaaaaaattatatatattattaaaatttctagatcaggaagaaagctgaatttatatttccaaaaaatttcgtgtccttttatgttaaagcaa

SEQ ID NO: 75801 - DNA, 421 bp, Heterodera glycines
gtccagggcctgaatccagatcccgaagagcctgggtttttcctggacctggatttttttcttaattttttttatttagacatattttaatataaaaaagatttcctaatatttttcacagatttcaattttgctgaacagcatttcgcccatcattctgttctctttcaacatcgatgttcgccgaatcgttcggcaactttttgtgccctttttcctctctttccgttgcccgttttgtgccgccgaccgttcgccgcccgccggcgttgtccaagtacggcatttgccagctgcacgctttgttgcggcacggcatcatcgaaaagtgcagcagtgcccatctcaattttttgttacttaatttcgataaatattcgataatcttttgttggaaaattaacaaatttaatttaataaa

SEQ ID NO: 75802 - DNA, 1310 bp, Heterodera glycines
atgcatgtgagtaagggatttcccctcggggcctatcgcttcgtgaaaaccatgcaaaagttttttgttagaagccgataaaaaaattataatagcaaaatttaaatttcaaaataaatttattaattcaaaatatttttaattctcactagatacaatatttttaaaaaaattttgaatttacaaattttaaaatttgagtcgtctaaaaataaataattatatgttatttaaaaaccttttcatttatattttaaaaattataaccgtatttaatgaaatagaaccctcgggggcttaatttttcaaccccccctcaaaagaaaggttttctggggggagggagtgggttctaattcagtatatattgtatactttttccatatttttctaaacatataatttaattttaaattatttaggcaccgtgccgaccgtgcccaggcggtgcgcctggcgaaccgggcccgtccggtccacccggcgtacctggccagccaggcctgcccggcagatcaagcggtgaagcattgcccggttaccctgggccaccaggcgaacccggcgcaccagggcaagacggaccaccaggaccaccgggaccgcccggcttctcaccgcccgaaatcccggatggcgcttcaggctacgaaccaggaccaccgggtaattttttttttttttgggaaaaaaataaaaatatggtttatctaaattttactgtatatatatatcaatacatttttgattttaggtgatgctggtctacccggtccccccggacagccaggactgcccggtccgcaaggcttggacggtcaggccggtgcacgcggacagcgcggcatggacggtccgcccggtgagccgggcaagatcgggctgccgggcagccagggtgcccaaggccagggccaggcggtgaaatgtccgaaacaatgcgggccgagcggtgccgtgtacgagcaaccaacggcggccatggagtactatcgcagaaggatgcggaaaatgatgaagagtcgaatgatgacgaagaagcgcgtttgaaatgggagcggaagacaaaatgtcttcaggaaaagtgatcggaatggcggatgaaagcgaaaagtgattgatcagatccgttgacggcatagatatttggcggcgtaattttccccaaatttatcaagcaaaatgtttttctttcttttttcttataactgccacagtacctaaaaattagtgtgccctaacccagtgaaatttgttctcaatccaatgtccgccctttgctcgtctcaaatgatgccatcaaaaataaa

SEQ ID NO: 75803 - DNA, 1005 bp, Heterodera glycines
atggggagagcattggaccaaattgcattcagttattttgttgttttcttcatttttgttcagtcagtcagccccaccaccaaaaatgattatggccaacattttattaaatttgtggtggcgtcggtggcgcctaaaatttttgtataaaagcatcaaagggttgcgaataaaataataatcataattaatattcaaaataaaaaatgttataatttatttcattatataaataaatgttcctcaagtttaatgcaattacacaaagtctgaataaaatgttccgggttcaaacacattgcaaagacaatttaaaaattttaaatatatttaaataacataaatataaattatttaattaattaataactttattgaatagtaaaattatccatatttttaacgctatttggtttaaaatttaattatttttaatgcttttcttttttatttgacttcgtacatcgctataaatttatgtaataaatacccaaattaaaaatttaaaaaaattcagaatttcagatttacaatagctttttggccttcaaacaatggattttcaaccgaaaatcaaggcctacaaatttgtctgccacatttcgctgctttttgcacttgtttcactgctgtccctttctgtaacgctgccgatgatgagaaattatattgccaatttgagaatggaaatgtacagagagattggccaatgccaagtcagttctcatttaaacattaattttcttgttattttaatgatattcaatgaaacttaatatttcaaaaatattttatttttaaatttaaattgaaaatttttttgaaattgaaaatgtatttattagtttgactaagtaaattccttttcatttaatttttttttttgatcatattattttaacgagattaattaattttatttaaaattgaagaatgaacatttattttatttttataacaaaaatttattttaattagaaaacattttgattatacaaaaataaa

SEQ ID NO: 75804 - DNA, 418 bp, Heterodera glycines
atgttttcgagtgttgccgaagagtttttgggaatgaaagctgctgaattgctcgccaaggagaaggagccggagagccttgcgaaacatttggacgatttgattgctgtgaagataattgcgaaagtcaacattaaggttgtttttttttgcaatttattacatatttgacaaaccacaacataggcgaacagtcagacgtacactggatttgattggattgtcaatttgttcaagaagtgccctggaaaaaatgacagtgatgtgccaaaagaaaaagatgatgatgatggtgacgttgatgagattgctaccaaaaaaacaaagaaaaattgagagagagagagagaaatgattcatttgttgtgagcttcaaaaaaaaaggatttaatgtgtcctttacttttttaaaaatcca

SEQ ID NO: 75805 - DNA, 2488 bp, Heterodera glycines
atgataattcgttcgccgccattgacacgacaaagagcgttgaatttgcgaacctttgcgcaaaaccaaaacgcagcggttgaagagcagcagcaacaacaacaggttgaaggagttcatgctgaaaatgaaccattggttaacgctccgatctcgccaggacttaaccgaaatttgagtttgtcggcggaggaaaacgaacaccattttagtgaaatggcagcagcagcagcaaatgacgatgaaattcggcggcgccttttgcatgtgtccatccaatcgaatttaccgccgcgagcaaacggtggtggcaacaatggcgccgagcagcagcaaattcgcaatgaaaatgttggtcacgaggactttgttgaaggtttgcgtgaagttttgcgaccaaattttggaagctttttggtgcgtgaagaaggagtaaggatgagattcgttgagagtggcaccgaaaataggcgtttcgagcaaattaacagaaatttggttcgggaaacggcgccaaattcgcgtcatgtttcgcaaagcgaactcattgggcgtacatcgacgccaataaattttaatggcgaattgcacaactttccaattgtaagcaaccaaatccggcaccgagaaatttatgaggattttggcccctaccgggagcacgaaaattttcgctccagccaaattcaaattcgccaacaacctgcgttagcgcggcaacaacaaaacacaaacttcggctttttgccattcgaacggcaacacaacgaattcgttggacgacatctttttgaggatggacgtcaaatgatgcacccaacggagattccgaggcaaatgcatcaacagccaccaagagaagagcgtggatggcagcaacaaaacagtgttttgtaccgtccagtggcgcgacagcagcaaaattttccggtttacgaaaaccaaatgatgccaccccaaagccaaaaattcgacgcttacaccgacagttggccggatgaaaaaagaattaagggactagaaagcaaagcgtatggccgagctgaaagagctcttgaagcggcgaaagcagtcattccgataaagtatgaactgcttcggggtgaaatgatgcgacagttggaggaaacggactcaaaaaacttgaatgcttttgatgagctgatgttagaggtccgacgaaaacccaacgaatcgattgatgatttggcaggtcgaatttcggggttggtgaagagagcctaccatggtctttctttccaattgtcagacgaattctccatcaaatatttgatccgatcaattggtgacccaactttgtcacttaatttggaactcattcgaacgcctcgaatgtctttggaccattttgtttcgctagcagcgcgtgcggaatcgacacagcgcgcaacgcaacgttttgtggctgcggaaaagtcaaagactgatcggaatgaaactcagtttcaagaaccctaattttaatcgggaatatcaacggcagcacgaattccaaccaatttttcgtgatcggcagcccggatttcaaccaaataatggaccgatcagacaaaacaatccaagttttgagcaaaaactgtggaagtgctacaattgtaatgaagtcgggcacatttcgcggaactgtccaaggcccaaacaatttgaggcaaacgcccaaaataaggcccaaacccaacccgtaaacgtttcgaacaaaacttttgaaaattcaaatagaaattttggttcaacgaaaccaaattcttcgaattttcttcgacaaaattgcatcgtcgagcaacaagaaagcgtgacaacggatctttgccttggcaaaatcgaaattgcgccagaagtcgatgattttttggaaatacttgttgttggtcgtgaaaatgaggcagttcctcccatcggaaaagtgatggtcgtgaaaacctcgacgtttggagtggaaacggactcaatgcttgatggtggtgcccaaatatcactgataagtgccaattttctttaccaattggtaaaagagaaaaatttggatttcgactcccttgaaccgtcgcaaacaaacgtgcgcgttctctatgtcaacggcaaaatggtgccatgtttgttcaaagtgaatttgccaattcatagtcgtggtctcaaatcagaagttaaaatcgctgtgcatgtgacaaaagcttcgatcggttttgacatgctgatcggcacaaatggacttggaaaattgggctttaagctttatgacgaggcaaatgattcgatggttgaatttgagaattcagtactgaattccaaaaatcttcttactgtaatttacggtacaaccatcgagccacggtcaacgaagattttggaaatgggagtcaatgaaaactatgaagctagtgagcttctgatttcatcggataattcaaatgatctgcacgtcgagccgacagttgctattgccaatgagggcaaaatgattgtccct

SEQ ID NO: 75806 - DNA, 1116 bp, Heterodera glycines
atggcattttcactctcatttaaggtcatcggtgcaccggcgcagttcctattgggagccggaccaacgagtgcagcaacggtatgccggcagtggcacaacgccaacaacggcaccactggtgaacgcggcaacaaaatcggtggatgacagcggcggaaatggtgaaacaattttttgatttttgatcttttatcagggctaaagccactcataataatatctggcctagtttttgcattgtctctctgatcactcacgaatgcctttgatcagatttaatcattatatctcgacattcgaccaaatttttgccaatcggcaaatcttttaatcatatctgatcactagggagtaaaattatatggaaatccatatttttttcctggactgtgggggcctgaaaggcacgaaaaacatgtttttagcttggtttgaagcttctaggatggatttctatatccatatttttccatatttcgcgatttatgtccatatttccatatttgtccatattatggcatttttatccatattttatgtccatattttggcatttttccaaaaaacctctattaaaactgcccccaacagataaattggctttttgaccccgaaaaaccggaaaatttttcaaaaaccagtttttagcaaaatttttttgaaaaattgaatgaattgaaattttattaaaaattgttaaatttatatcaaaaataagcaaaaaaaatggaaactttcggttttttggttgatgttctcttaaaatgttttttttcttctaaaacgagttcttatacaatattcagcgattttagatgtattttacttgaatttaatgaatttaaagaatttaaaaatttccacactcaaattggaaaaatttatgtccatattttgccattttatgtccatattttcgatttttggtccatattttatggccatatttcgtgattttatgtccatataattttattccctactgatcacaaatgctataccgattgttagtaagggtttgaatttttataggaagatgattgtgaaaaaaatattttattttgaaaaaaataatttgccattattcataaatcccttttttctatatttaaa

SEQ ID NO: 75807 - DNA, 291 bp, Heterodera glycines
atggcaataggtatttctacaccacattatattttttgtacaaaaatttttaaaattttaagggtgggattaaataagatccaaaataaaaatatttaaataaattttaaaaaatgaaaatttttaggatttaaacaaaaagttaacgagcagagaatgtatttcattagaaaactatttattgtttaatctaaataattaataataattttcaatttagcttcttaaaaattaagggaataatggtctaagaaagtaaaaaaaaaagtcaataagtaaagaatattatta

SEQ ID NO: 75808 - DNA, 374 bp, Heterodera glycines
  unsure (1)..(374): unsure at all n locations
atgtcaatttcgaccaattcaacaaatggcgatttcacaccaacagatggaggtaatgagaaaaagagaaagaaaccgtagaaagtaaattgagttttggtaggtgtgaaaataaatattaatttaagtttacgaattaaattttgtatgattttcagaagttaattgtgaatcaattagtttggacaacgatggacaatctgatggaaaagtttttgttgagnagnagngaaaagtgaggaattaggggtatattaatatattaatttaaaaaaattaaaaaggaatttggtgaaaagtgtgngaagatggaaatgaaattnaaaattattaaattggaaattgagaagggtggttttatataaatgaataaa

SEQ ID NO: 75809 - DNA, 386 bp, Heterodera glycines
atggccattgagcagacccaagcttattatgtacgaaatattattaaaattttcgcggatgaatttaaatcttaaaaattgtcggatttaacttttgacattcacttttcctcgtccctaattaaaatttaattttttaaaattaatttctttttaagggctggggtggttacggctacggctatccctacggattttatggcaaacggcaagccggctttggcccatccgcaaatgttggcacttttggtcgcaacgaaggcgaaaatgccaacggaggaggaggaggaccattttcactaaacaatttttgagagaaaaaggaaatacaaaagcaaaattgactatctcttttttgtgaacgaatttttcgtcaatacaataaa

SEQ ID NO: 75810 - DNA, 1036 bp, Heterodera glycines
atgtgggagaagttggaattcgctttggtcaaattccgcgaaaaaattgacgagctaaacgagcaattgacccgcaaacaggaggaggtcagtggtctttagtttttaaattataatcagaaggcacttgtgcacgggcccctattcagaaaataattttgggggatggtgcaccaacggacgaaaagaaaagttcttctgctcttaggcctcaaaaatctttaccaaataatgtgtttaaaaatgttagtgccacggagaaatttttttaagcagatttattgaaaaaatgtccatttacaattagtatttaaacggattaaagtcgtccgacggtgcgggtagccttacaattaaaaaattttttcctcagaatgtaaatttattttttgggaggtgtggcagagcttcccccccccccccgcccctcactccatctgatcatttgaagcccaataacctacatagtcattggttaagctcgacaatcaaatgagtgcggcagaaatgatcgaccggttaaccagcaaaactttggaccttgaagaacagataaaatatgtttcaccgtcttttctgttataataattatttttttctttctttaggctatataaattggacatttccgatttggaggaaatgcatcagttgaacgaagcaatcattgagggaaaagaagatacggaaaaggcgctgaaacagcagctggacgaacagatgatcgccatttccaatgtgattttttaagaaacaattttatttatagggaaattaaaaaatatattccttcatttgaaaaaaatctgtttcccttatttttcagttgaaacatcaaatttccgactgggaagaccgtgcggttgactatgaacgggtaatcgtcaaatttcgacaaaaaactgccgaactcaacgaacgggtgcaaaatttgcacgacgaattggccacgatgcacgcgcgggacgaggaaaagtcgcggaatgcgggcgcggaaatgtcactgctggccaatgttaacagaacattttcggag

SEQ ID NO: 75811 - DNA, 201 bp, Heterodera glycines
atgtcaaatcagcagacggccacagcctcaaaagatgagggcattgggtcaacggacaaaaagcaattggacactgctcattgtcagcaacagctgcaacaagccttggaacaaatcacacaattgggagtaaggaaatggagggattgtgaagaacgattcaaaaagaaagtcagcaaagttcttttggaattgcgttaa

SEQ ID NO: 75812 - DNA, 861 bp, Heterodera glycines
atgacgtcattcactggttgttctccgcgaagcccataaggtcgagcagtgccgctttcagatttccttcgtgctgtatcagcttcttctcggcgattattctggacacttccaagtcgtcaacctaaaaaaatgcttaatgaagagagtctaaaaatgatcttaaaaatttacaagacacaaaataaggcgctatattaaaagtgaccagttttgaaaattttttcaaaaggggggaccctttgttttgcaaaatttttttgtgataaaaaaccatgataatttgttatccggggttttaaaggtcgctaatcacgaatctgacatgtattttgactaatttctaatccctaacccgaactcgaataaaaatcgaaattttgaatttttcaaattatgattttttgttcaaatttagattaggaaatcggaattgatcaaaataattgaaagaatcgtgatcggggaccccaaaaacctaagatgaataaatttttatgactatcacaaaaaattttgcaaaacaaaagggtcccccctttgaaaaaattttcaaaatcggtaacttttacagtagcgccaattaaacctttcatcgccaagaaaattgacaaaaatttttgggatggtaaagccggccaagtgaagagcatcggacggaagaatgaggaggagggaaaagaagacggagaggagaagaaagaagagaaagtcactggggaatatgcccaattccatcggaaaatgaattgatatattaggtaccttttatttgcatgatcaaactaactacctaattacatctcaattagcattaatcagtaagtgaaaagcatcgagcaattggcatttagcaatcga

SEQ ID NO: 75813 - DNA, 115 bp, Heterodera glycines
tctttcttctcctctccgtcttcttttccctcctcctcattcttccgtccgatgctcttcacttggccggctttaccatcccaaaaatttttgtcaattttcttggcgatgaaag

SEQ ID NO: 75814 - DNA, 1006 bp, Heterodera glycines
  unsure (1)..(1006): unsure at all n locations
atgagaccaggcgaatatttgagcgcattctttggctttcttgaattgatgttacaacatgtgttggaacaagaaaaattgacaaatcggcgatcatgggccgtctgtatattcgacatgcaaaatgtgtcaattttacagtgggttaacccgttggggccaatgactcgatgttttgaggtcagaaatataatttttaatttatttattcattagcaaccattaatacttgcctgacccagacctggcttttttagacctgatttttaaggattttttgcctagatacaggttttggaaacccttgttttcttgatatatttgagaatgggtatttcaggtaacaaaatgtttttttcatgttacttcgacctaggccagcctagtttatattctagcctaattttcaaggtttttttgcttaaaatccaagtccatgttttaacaaatttttattttttagtaaaagtttgagaatttgttattttggtgacaaatattttatttcaaattatcgtaagaagattaactagattaaatattattatcattctaaaatgatttggtgaaggtttttgtgagcataaaaggcagactattaaagaatattttgagtatcaaaataataacaaagttatttgatttagttgctaactaaatataatattattatttaattgttaaatattattgcttgtttcaattaaaataactgttatttaattaatgaaattaaaggcacgcgttgcgcttgccatggcctattatgctgaaatgctctctaaagttgttattgtaaatccacctcatcttcttaatgtgttgtttaaggtaaatttgaaacaaaaaataaataataaaattttttcaattaattaagattatgtcatttctgttgccaaaaagtatttcaaaccgattccatgtggcgacaaattttgcggaaattcaaaatggatttccccagacgctgtcccggttggatatggtggacanaaataattaa

SEQ ID NO: 75815 - DNA, 1551 bp, Heterodera glycines
atggagagaaataatttaatcagaaactttttcacatttttctccataattcttggatgcgtatcatcatttgtcaatgaaccaaggagggggtaattagcaaagattatttttaattaaattttaaaaaatgccaataattgtattatattattatatttctttggagcaataaattaaatgttaaaatttaaattttagcagcggatgggaacgtttagaaacttttaaaaaagaattggcaaaaagcgatttctcaattgatcacccattcaaatttgatggccagagttacttttgggatggtttttcaaaggtgggacaataatttattatttttcattaaacatttagtgctatatgaatttcaacaaaatttatgcttacaattttgcaaatgatcaacaaaatgaagaaattgttcgtttattatatttcaacaatgattttcattgttttatttaataagaaattcaattttactaaattaaataataatataaagtgttgaaatattgcatttaaaagttattttttttagccaaatttcattggaaaacgcccagaaaaggtacattaaattaaattgtaaaaataaaatattcaataaaacaactttttacaatacaatctcataaaaaagacaaaataatactggtcaacaacctcttttaattaatttttttgactaatttcttttctaaatattaatttcttgtcagattacttgggaatgtgcaaccaatgaaaaatgttgtggcattgattgttgtccaaaaaattcatcagcagataatattggcatcattattatgattattatgtaagttttatatcttgcatgtattttttatttttattttcattttcattaattttatatggcttatagcaattattctcataaaagtcattaaattcataattcaacattattttgtctttcttcaacaaaaattgttgttaaattttattcaagtctatactaattaattataattaactttttttttagattatttatgtacatttcatttttgtgtgccattctgtgcacttgcacaaaatctgatgttcaacaaaccaaatggagttattgttgtgatgtcggcatggtttgttttgatgcaaattgttttgactgcggtcagttggattgtggaggatcatgttgttgactaaagaaggcaacatgcaaaatttgatcatcctatgcatttttaaacaattctcaccatgttgattcagcctgcccttcgacttattaatttaaatttggatttttttttgccctgatcatacaaaagatctgaaaaaaagtttggtacgattgaaagatgagccaagaaattaaacatcaaacaaaataatttaatggtcaatttttaaattagtttaaattaatttctaattacagagcgaaaaagattagtgaaaaaatggaaaacatagcaatattttcaagtgaagaaacaaactgagctcagcgatcgcaaaatttgtgaacaaatgacggttccatttttttcatttcgcaaatacaaaaataaa

SEQ ID NO: 75816 - DNA, 2023 bp, Heterodera glycines
ttttgaattttaactctaaaaatgaatagggaaacccattacttcgggcaatttgtctcatgtcctggatcgttcaggcttgttaaatttgaggcccaataacactaatagaaccatgagctttctttctagtaataggtcataaaacgacatttaaatggttgggaaagtggaaagtttctcttccaaaccaaagatgtctttgtcccattttaaactctgccttcttttcgtcaggtcattacacaacagcagtgccttttctcttcattttgtctgggtcggcgttaaaagagattttcgaggacattgtcagtgctcaatgtatcacttttgtgcaattttttgtttccagaaacggcgacgcatggacagtgaggtgaacaactacgaggtggaactgctggactctttcggttcggtttgcgccggtggccaaatacgaatagccaaatggaaggaggtcagagcaatttgtcggtgttaattatgtactggtatctttcttaattagtgaccctctaatcttttccctttaccatgctaattttatattaagcttaatcaaacctttctcgagtttctcattcattacgaaatgttcagttgcgtgtcggtcaaatcattcgcgtaagcgaaggacagtttttccctgccgacattgtgctcctttcgtccagcgaagcgttgggaatgggtgaaaataaaatgatttaattttctaccttaccaaaattgccccaaaaaattagcgaaattttccacaaaattatttattttttggtgaaagtctttttaaaaagtcgatttgaaaatatactaaatttccagccgttccaaaaaatccttaattctttttttttaaatttgttcaaaatcgtaaatttcgtctttttttacaaaatctttcagcaaattatactcaatttttcctaacggtcccgaacaaaactcaattttttactatatcaatcattgtattttaccgtcattttttctttcaaaattaaccattgtgccatttttagcttacattgagacggcacagctggacggggagacaaatttgaagatccgacaggttctctctttctaaacaaccagttttctcgttagttcatctccgttcctttaggccgtccctctcaccgcccaactcactgacattgcccaactgtccgcgttgcgtgcgcacatcgaatgcgaaccgcccaaccgacgggtgcacgaattcagcggcaccatgtgtgccggagacgacgaaaaagtgccactttgtgagtgcgatttcccattccccgtacattaattggttgtacaacgaaactcagtttcccaattaatatattttcccgcagcgattgaccaatttttgctgcgcggtgccaaactgaagaattgccgctgggtgtttggcgtcgtcgtctacacagggcacgactcgcgacttctgatgaactcgaccagcgccccgctgaaaacgtcgcgcattgacgtgatgaccaaccaacgcagtgtcatcctttttctcatgctggtgctggtcaccatcgtcaggtgagcggacatttaaaatgagagtgccgaatgggactatccgattgtgccaacaaatgtctacggaaaaaacgcaccttctgattggaagtaattaaaacgcagaatttcggcttatgtctggcattaaaacctagtttcgaataagcatttaaaacagaaattatggcccattgtttggatcatacgtggacaagggggggggggagtcaatttcgtaaatcgtacgagggtccgaggcaatttcgtaaaattttcggccaaaatcgaaaaagcactggtaaagatggaaaaattttacgaaattgaaaaaaatcaaacttttttgccaataacccaaaatttttacgattttgaattgcatttcgttaaaattttcacgaaattctatttcatcttttcctatatcgtaaatttttacgaaattgaatttcgttttcccatttcgtatatttttaacgaaatt

SEQ ID NO: 75817 - DNA, 3941 bp, Heterodera glycines
  unsure (1)..(3941): unsure at all n locations
atgattactcttcctaatgatcagattggtcactcccaatcaatgcgtatgaatatcctttaatcggattcatcctcctttttttgctaatttcttggtgtaccatgccccattttccgatttccgtttgctaattggtgccttccgttcagttgtgctcctccgcgtcatcctccgcttgtccccggtccgtcgtccgtcgctcgcgcccattgtcctcccgtggacattcagttgtgcgtcgagccgtgcattgtcttcttgaataggttcgactttcggcttaattagtatttttccatccattttttaatttttttaaattgtttttaacctttccctccgataattaattaaatattccagaattaattaatcgctcctaattatatccccctctcgcaactttgtcagcaaaagctgccaggagtgcgtttgtccgcttcttccaccccctcagccgtcctccggcgaaggcgcgcagccgcccgcggcgccggctctccccgaaggggatgagtccgtttcggtgccgaatcggcacgctccgcggccccgttgacccctccgtttcctcaccgccttcgcctccgtcgccgccggcaccaaaattaatcggcgagtttggcacaatttattagcatttcggctttttttttaataatcactgtcaatgtacagaagtcatccaacatggcgtgccttctcttttgggctcttccctcgccccgccgactgccgccactcccgcggcatcggatgagtcaccggtgccttcttcggactcggcttctccaccgacaccggaattggccttgccaagcagcacagcgtccgcaccggtgccaattgtgccaattgatggccatcaacggcaccaaagccaacacgaaaagcagcaacagcagcaagtggtcgcattcggaaacaacgaaatttgctcgcaaattttggtaagtcattcatcattgacaatttttggggacggattatgcggcacttttttgaatttacggagtgaccctttccaaagtgagaaatatggcaccagccgtaactcattcgccaaatttggcaaattccactttattttttgtccgttcatttctcttttttctcgttgtactgctccaactttaggaccccggtgctcccacctgcacgcgttttgtgcagcggtggtttttcaacgtcgaacgtgcgcagtgcgaatcgttcacttacacaggtaacttaaagcacacagcagcgataaataattcagtaatggggcacatttttggcactaatttgccgttttaggttgtgccggcaaccgaaatcacttcttttcacagaaggaatgccaaatttattgcggtcgttttttgcgtaagtttttttttgacatttttccgttcattccaccattataattaattaataatgcactcacagcttaaacacaaaaaagaaaaaagaaaagcttataaaaaattgttttctgaatgaaaacagcgaatggaatttgaaagcattgcacaaattggcacaaaaatgatcgaacggtcactgctctgatcatcactgatcacctggaatgatcaattgatcacactttctggccattctttggctcccctcccgcctttgattgcttcacatttggcacaatgttcaggcaccggcacaacgcactcagacggcgccaatccctccctccccacggtggccgtccctcaacaaccgcccccggcactttccccgtccctcacggcactctccgtccccgaaatcgcaccgtcgtccccccgggcggtgccaccttcaccaaatgatgttgagggtgagaagcaggcatttgatcaacagcagcaaagaactgacgaagaaaaacagcagatgaaaagagtgtcattgaaattggcggaagagaaaaggaacaaatggaatcagagcaaacagaaggagagcaacgggacagacagagagcgacaggaagagcacggattggacgtaggaaaagaaaaaaagacggaagatacattgggacgaagaggggagagtaacagagaagtggagattggacatagagtggagggaggagaagactccatggaaagcattaatacagtgagagagggaaaagaagacaatgagcagagagtggaggatggaaaagaaacagagaggggagagagagtggacaaatcacgagaatgactaacagaagtgcgtgattctgaaaaagaagtgccaaacattgtcattcaatcggttcctatgcaatcgccggtataaggcttttcatttgtatcatcagcaacagaagaagcagtgacaccaaaagaggaggaattggtggaagagagagggaaagttgaagagagagtgggggaaacggaagggaaaggaggaaaagaggagggacacagaaaaagagcaaaggaagaggaagaagaaaacacgaaacgaactctgaaggagggggaagaaaggaagagagaggaggaagagcgaagaagggccaaagaagaggaagagagacggaaaggggaagagagagaagggagaggaggagggaaagagaaagaacaggaaaaaagagaggaggacgaagacaaagaggagagagaaaaaggagcagagagtggagagaggaacgaagtggtggagacggaacagaaccacccgatgcaacaccaacaagtggaagggcaggaagaagtggtggcgctgtcggaacaaaggccggacgaaatggagcggacgacgaacggtgagtcactgatcagtgtgatggatcagtaccgatagccaatcgcaaactctgatcagctgatcggcggggagggaagagcaaagtgccagcaatttttttttcgagtgatttgtccattttattcttggcaaattttggcacagttcgttttctcttaattatattccgttttttcttttttgtgggcgtaggccaaccaaacaaaacacaaaataagcacatcattaattggttaatggcacccactttttgcacttttattagcacccgccgcttctgtcacaccgccacaaatgccaccggcggaacccctggggaaaaaacagcagaaagagcaagagaaagaaaggaccagcccccggggaaagcaaagtcaagaagaagtggaagagaatggagcaaaaagtggggaagagatgcaaaacagagaaacagagggaccagaagagcaagcagtacaacaagggcagggggaagaaggacaacatgccatgccgaatcagcaaggacatgaagcagtacaacaaggacaccagcatctagcaggacaacaagaacaacaacatcaagcagtacatctaggacataaacagcaccaagcaggacagcaagaacaagcagttttacaacaagggcatcaacaacatcaagctgttcaacaaagacagcaacaaatacgacatggacaacaaggcttgcaagggcaactacaactagggttgaaaaacgagaaacaagggcaacaccaagctgtactagtgcagcaacaagttgtacaagaaatgcagaatcaggctgtacaaagacagcaaagggttggacagaatcaccaacaccaaactgttccagtacaacaagttgaacaaggacagctgcccctgacaaatttcttacaaggacagcaacaaccacagcagagcatgcaggaacagcaacataaaatagtacaaggacgacaagatgtacaggggcagcaaattgttcaaacacaagaacagcaaccccaagccataaatggacgacaatttgcacaaccaactcaagtacancaagttcagtcttcccacgtacatcaaaaccaanctgtacaaggacaccaacaaggctcnccactaaancacanccaaaccaanccgccatgtaaaacaacatgttggacaaaatcagaaacaccaaatag

SEQ ID NO: 75818 - DNA, 1465 bp, Heterodera glycines
atggaagcgtcgagaagggaatttggcgacgattgcgatgacctcgtcagaagcagtttgccccctgtaagtcgaaattccaacatttaaatatatttatacacatagtaaatttggcgctacttaaaaagtcacttttgaaaaaattttcaaacttttttttggtaaatttttttttaaagtcatgaaaccaagtacccggggattttagaggtcgctgatcatgaatatgacaattagttggcctattaagaaatttggcgctagttataaagtgacagatttttaattttatcaaaaaccaaaggggggacccttttgttttacaaaattttttaagataaaaaatcgtgaatatactttttattcaccataattgtgatggtaatgctttatatacatcattatatgtaaataaacaaaaaaaaaatttaccaaaaaaagtgaaaaatttttcaaaagtggtcactttttaactagcgccgtaaatttttatttatgccatgtgaatttaccaggaatatgcgccgccacaattgccctcaaaagacgacgacgacggagaagaaggggagggagaagcaccgcccatcccggaaaggccgaagaaaacactttcgatcgtaaggaaaacaccgaacagaaaagggtggaggggggggggggggaagacaaaagtgccaatcggaaaacgctaaaacgaaatgccattggacgaagcagtcgatcgctttggcatttgccatcgatcaactgatgaattttaaaaagattggctttttcagtacacaaaacccatcgaacacgaagaaaccagcaaaattgtgcctgattatttgcttaaaaatggcaattttggtggacgcgcaaatggacgtcgaagaaggctaaccgattcagaagtattggcacgactgaggacggtaattgcaatatgaacaaatcaaggtttattgtaagtaattttaaagattgttagcattggaaaccccgatcggaagtacagaaaagtggagaagatcggctcggggtgagcacttttcactgggataaaactaaagactgaagcggacgcgccattctttcttaaagggcttccgggtctgtgttcacggcaatcgaagtaaacaccggtgccgaaggtaaaaacaaaaaacattggcgatttgtctgtgccgccgttttagtggcgattaagcaaatgaatctcagccaacagcccaaaaaggagctgatcatcaacgaaatcctcgtcatgcgagagaacaagtgcccactgtcctttcccttttcttttattccaatttcccttagacatcgaaacattgtcaattatttggactcctatttggtcggagaggacttatgggtggtgatggaatatttggccggtggttctctgacggacgttgtgacagagtgccaaatggaagaggcatttgctatttatgcactttttcgctaa

SEQ ID NO: 75819 - DNA, 662 bp, Heterodera glycines
atgaccccgagaagcgagacccaaaaacccaaaaaatttcatgagtcgaaaatcgagaaccgagaatctcgcacatccctactgcctaatgaaaaggaaaaggaatttaaggtaaaattgcggaatgtgaagagaaattaaaaggatgggaatttttaagtaagaacctaagaattaggaaatgcctatgagttacccaaccaaaattttactgtttttttattttacgacttccccagttttgagacaacgaaattttttgaaattttacaggaaaatagaagacacttagggctatcaaatgatacaagaatgatgcttctaggaaaaagttatggagcattaaatttgtcaaattattatatggtcgtatcttttttatggcatataaacttaaatagagccaaataatttattattattattattattattaaattattattattattcattattacttaaataattaattattttctggataacttttccgtgctgaaatgacccgcctcttccgatcaccccgcacccatgcttttttcgcttcgtcagttcatttttttaatacgtttgattatttgagtaacattcacgctcattaagctccttttatggaacattttcatttatttcaatttgttcagataaggacaaataaa

SEQ ID NO: 75820 - DNA, 1956 bp, Heterodera glycines
atggtatgctgggacacagagactcgattggaacagctgcaacaggcgggacaacagcgacacaaggtcaactacctgtcagcacgaattacctgtacggagtgctgtgattctgaaaatggcctgcgactcaattgtaaaatttgtttgacaacatacggagcgatggaacgaacgaaggattggagcgaatcggaaggacatgagccaatttcggcatttgtcgagtggattttgaaggcttgggacaacaaatatcaaacatttatttgggtgagtttgtgatcttttttaacatcattgttatgcaaaaacaattttaggcacacaatgcctcgaggtttgatggccattttgtgctaaaatacctcggccagacaaagcgacgacctgaggtcatcatgaatgggctcaaaatttttgagtttcgtcttcaacattctcggcgccactcaaaactcacatggcgagactcgtgcctactgatgccaattcgtctggaagaaatgccgaaaacattcaatctcaactgtgccgataaaccattctttccctacgctttcaaccgaaggttagtatgtccaaatgagggtaatttaaatgattatatttctaagagaaaattacaacgtgcatcttcaacatttgccggacaaggaggattactgccctggatcaatgaagcaggacaaatatgagaaattcataaaatggtattcatacgatttggtatttttaatgttatgttttttaggtatgacgtgaacaaaaacacaccgttttatttaccggacgagctaaagacgtattgtcggaacgatacggagattcttctcgctgctgttgtccaatttcgccaaattctgatgcgtgatatcactgaaggctttgatgtgcttccgctgagtgctactattgccaggtcgttataccaatcggtcttctaatttaatttctattcagcgtttgcatgaccatctttaaagggaaattccttaacgaaaaagagcttgccatcgtgcctgaaggcggttacgagcggaacgacagggctagcgtcttcgccatcaaatatttggactggcgctccaagcgagacggtgttcgcatacagcacgctggaaatggtctcgaaaagagatggcggcagttcaaacttgatgggtggattgcggagcagaacaagtgcatagaagttctcggctgctactggcacggatgtgagagttgcttcaaacctgacgacgaactggttgacggaaaaacatgccgagaactcaacgatgctaccaaactgcgtttgctaaaactgcaggagcctgttccggctgaggatgcttacggtggagaagatgaacaaggccttgacgtggaagagatttgggagtgtcagatccgagaacagctcaaaagagatgatgaaatgcgagcttttttcgacgacttggggaccgaccgggggcccatcgacccacgtcaaacattctacggaggcagaactgggccgcttcagctgattgcagagccaaaggaggatgagaagatttctgtcttcgatatcgtcagcctctacccgtgggtcaactatgccaccgactacccgatcggaatacccgctgtcatccaccccaccgttgaggagatgatcgtcgactggactcgacctgagcatttacaataccaaggaatttatcgtgtgcgggttattcctccaaaagggctccgaattccggttcttccactaaaaatcgacgaacgcctactgttctgctgctgccatcgttgtgctgccaaatttcggaagttaaacacacgacgagtgcacaagtgcccacacacggatgagcagcgggcttttacaggaaacttcacacatattgagctggcaagagccttggaaactggctaccgagtggacagattctggagagcttggcactacgatgaatggtatga

SEQ ID NO: 75821 - DNA, 1231 bp, Heterodera glycines
atgaaacgaacgggagacgaaccatcaacctcatcatcagctacccttgaggactacaccacagcggcggcagcggcggcggcggcggcggtggcggcggcctctttctcgcctacaatctccaattctgatggagttgcgaaacgacaacgccgccaaagttgggattttaaaaccatggcccattttgaggagcatcatctacggcaacagcagcagaagcaagagtcccacgcaattccgatggatggagaaggccgccttcatcaaagggggattgatggagcgcaaactgttgtagcagcagcagacaatgccgaagaccacaatgagcagacggagaaacctttgtttgagcaactgcagtactacgtgcacagggtggagcgttttgcactacatcgacacgtgacagaatttgtgctcaatggacaacatgatgagccggaagaggcacttcttaacgcatttgagcacatcatcggacaagcgatacggaacgcagaggagaacacagatcaggatggaggtggaacagctggccatcggcgacgcgtccttaaactaggtgttttgctcaatggaaaaggtacctaacaagggaattttaattaattgggcacctccctacgcaggactgaccgacccaatcgtcttgccggttcgtccacctgagcaaaacaccgctgaagttctgatggccgagctcgacaaattgggtcaatcggacggcgatgaggatgtgcatggtggcgggatcagcaaacgctcgctgttgctcagtgagccgatcgaaattatcgtgacttgcattgcgcctcctgttggagcagcgccacgcttccacccataccaacactggggctatgatgagcggcatatgatccgtatttttaatacgggcaacaatttctgcttattctacgcattgattgccacacgtgcctacactgacgctgagtttttgaagtctaccgtccatctgcaaacagcagagggaggacaaagttcaaacagcaatcacgtgtcttctgaagttatacaacgtgtgaagagacgagctgatttttgctccgaccacaaggcactgaaccgttttgtgtccaatcgggaccggctgagaattgcggtccaagagctgatgcgtgcagcagagattgcaccggatcaagatgcttatggaatggaacatcttattctaattcaacaactatgggtacaaataatttaa

SEQ ID NO: 75822 - DNA, 774 bp, Heterodera glycines
atgagcggactgaaacgcttccaactcacatcttcatccaacaaacgacccgcagacgaatttccatcccatccaaaacagctgagcgaagtggcgaagttcaatgcgccgggaatattttttgtacgtgcaaaggtggcagacctgcagttttcgttgtataaggttattaattttgaaaatttttaataattttctttatttgcaggcctgtccgcttaaatcctccggcagtgtgccatgtaagaaaaagctcgacgatgagatgttctgccgcggatgtgaccatcgtgccaacagcccactccaatgtctcttcttgagactcgaccttcaagactgcgaagaccttgaaatcagccaaaaagtgaccgtcttctccaacgttgcagaggactacctggccatgagggtcaatcagtttgccgacatggtcgaaaagtgctccgaaaaattggaagctttgcttcagtcaaagttgggacagactttgaccttcaaactcaatctgaaggttaggaaatttttttttttttttttttttttgttgactctgagccagttaaaatcattaattcaaggcaaagggcggcggcgagttcaccacaatggattggattgctgcggcgatacttgtggacaaaaagaatgaagcggacaacgaagatggagaaatcatcgaacttgacattgggaagaagcgtgccaaaaagaactgatttcggccgttattgggctgaagccaatgttgattaactgttgcataggaataaa

SEQ ID NO: 75823 - DNA, 769 bp, Heterodera glycines
  unsure (1)..(769): unsure at all n locations
atgagcggactgaagcgcttccaactctcatcaacgtctaacaaacgacccgccgaagaatttccggcccatccaaaaaagttgagtgaagttgttaagttcaactcatctggaaccttttttgtgcgtgcaaaagtggcagatctgcagttctcattgtacaaggtttttttaaaattaaatttttaataattttctttatttgcaggcctgtccgcttaaatcctccggcagtgtgccatgtaagaaaaagctcgacgatgagatgttctgccgcggatgtgaccatcgtgccaacagcccactccaatgtctcttcttgagactcgaccttcaagactgcgaagaccttgaaatcagccaaaaagtgaccgtcttctccaacgttgcagaggactacctggccatgagggtcaatcagtttgccgacatggtcgaaaagtgctccgaaaaattggaagctttgcttcagtcaaagttgggacagactttgaccttcaaactcaatctgaaggttagaaaatttttttttttttttttgttgactctgagccagttaaaatcattaattcaaggcaaagggcggcggcgagttcaccacaatggattggattgctgcggcgatacttgtggacaaaaagaatgaagcggacaacgaagatggagaaatcatcgaacttgacattgggaagaagcgtgccaaaaagaactgattttcgcncgtattgggctgaagccaatggtgattnaactgtgcataggaaataaa

SEQ ID NO: 75824 - DNA, 83 bp, Heterodera glycines; identical to SEQ ID NO: 69364

SEQ ID NO: 75825 - DNA, 2147 bp, Heterodera glycines
ctcatacggtattcctattgtaaaataaagttttctgtaatcatttaggcgtcgaggcgtgtgacacggccgtaaaattggcccgtcgttgggcgtatgagtgagcgcaatttaaaaattcgaagagttgactaattaaaaatttcaccgtcaccacagtgtcaaaatggtgccaaaaaatgaagccaaagttgtttttgccgaaaacaatttccatggccgatctctggctgcctgttctgcatccactgaccccgactgttacggcggctttggcccatttgtgccgaattttgtcaaagtgccattcgacgatctcacagcgcttgaggcattcgcatttattactttttaccgaagcgaagcacaaatgtttttccctaagaaataagaaaaacttcaaaacttaagacttttttttttgaaaaaaagaccgaaattttttctaatataaaaaaaaattgaaaaactaataaattctttgcaatgctaaaaaataattatttatttttggatttgttttttgcttacaaagggaggtggccaagtgtccgtgggatttcggaatgagattttttgggtagatagagcacccatgggttcttaagaaaaatgttttcaatttctgccaaatggacccctgtgccaagataaaaaaggccaaagtttttaatgattaaataaaagaaatacctatttgcacaagagcacggtgtccagtggtgtagcggtagtgcgctagtcagcatcttttagcccagggttcggatcccctatgtataaattagtttttttatttttgtcttttacgccaagtcaattataaaaatttattttatgaaaaaatttttatttttaattttttttaaattttttaatgcgcaaaatattcaataaaaatattcgccaaaaaaatattttttaatttgacagaatatgtattacatttatgtttaatgcaatttttgatttttaatggaataaaattaaaataaatattttgataaagaaataaaatttgataattgaattgctcacaaaaagcaaaacaaaatgaatttacacataggggattcgaacttttgacccaaaaaaaattttgactaacgaattacctatacactaacaatttctttgaagaaaggaaatagttgttccttttctttaattataaaaaactaaaaactttggcacgtcataactcggcactcgtgctcatttggcagaaaataaaaccatttttcttaagaacccattggtgctctatccacctaaccaagtttcattttgaaatcccacggacacttggccacctccctttgttagagttgcttttgcacttctcttttatatgcaaccacgcgaaaacgtcctggcccgccaaaaacttacagaaaaatattttttcgtaaatatttctggcttttttatcaaaatatttgtcccagccctagtgattagtagggcttccaaaaatatggatataaaatctcggaatatggcaataaaacctaggaaaaatcgcaaaatatggacataaaatagcaaaaatatggacataaattttccgaattgaggggtaaattttcaaaaatattcttcaaattcattaaattcaattaaaatacatctaaaatggctaacaaaatatggacataatcgcgaaatatggatatagaagaaatccatcctagaagcttcaaaccaagctaaaaacatgtttttcttgcgtgtccaggaaaaaaatatggatttccatataattggaagccctagtgatcagtgatcccggaaatccctgcctgtatgcacaataaaaacaaaaatttttttttgaaaatatgttcgaatttgggttaggggtttagaatttgtcaaaaataatgccggattcgtgctcagcaccataaaatagccctagaaaaatttttccaggcttttcaaattaaaaaaaaacgggaccagtaaaatatacctttgccccatttgcacacgaacagaaaaaagaatttggtaactgacggaagaaatggcattggcacggagaaattgctaaacaatttggaaaacaaaaatcagtgacttgtcgagattatggccacacctccttgaaattgttgatccaatcagtgttccattggaaacaa

SEQ ID NO: 75826 - DNA, 303 bp, Heterodera glycines
atgaaccgacggtaaaagaattttaatagtcacacaaattcgtcatttatttagctaaactgttttccataatttcagttggatttccgaccgtccgttgcccagcaaaattcgctttgattccattcagattaggtaagtaaaatcagagatttatagcaataaaagcattcattccctttttgcagttacatcgaggccaaattcaacaacttcggctggccaagcgttgtccaaatggttgcactctccgagaaaagatggccaacccaagcgattgcgttgtttccaatggaacactga

SEQ ID NO: 75827 - DNA, 451 bp, Heterodera glycines
atggtgccatttgaattggtgaacgaatggacgaaggaaaagctgacattggccaaggcaaacgaaaatgaattggacaattggataatgaaacgatgcaaaattattggggagaaagaggaaaattgggacaacaattgcaacaatgtgttcttttggcttgttggtggcattgattgcattgggtgagcaatttaaaaaaggcatttaattttgtttaaataattcaaattgcgcttaattaaggccattgtctccgccaccggcagaagaaacgggacaaggcatcacaaaagtggcgtcttctgctgacgatgaatgagtgacggacaaaagaacgaaacaatggtgattagtggaagaagaaatgaattatttaagaatggccaaccgatcataattcatcagtgatcaaatgcaatttatgatgaaaacctctcaatttcggtaa

SEQ ID NO: 75828 - DNA, 179 bp, Heterodera glycines
atgggacgcgtaaaatgtcatgggacgcgtaaagtgttgttgggacgcgtaaaatgtcatgggacgcgtaaaatgtcatgggacgcgtaaaatgttgttgggacgcgtaaaatgtcatgggacgcgtaaaatgttatgggacgcgtaaaatgtcatgggacgcgtaaaatgtcatggga

SEQ ID NO: 75829 - DNA, 554 bp, Heterodera glycines
atgacattttacgcgtcccaacaacactttacgcgtcccatgacattttacgcgtcccatgacattttgtgtccatggcagggatggcattccgaggccccaaaaattttcggaaatcgaaattccgtgccatccctggtctcatggtattatagttgtcttaataactaagagaaaaacttttttttgttaggtattcaataaagtttttaactataaatttcgttgttaaacctaaggttatcatgacaactcatacacaggcaactcgaacaatggcttattgttagactaggcctaagtttaggcttttgtaaattttcttttcttatattagttgaatttctgttgacatcaataagtgtgcttagagttgcttttgcacttctcttttatatgcaaccacgcgaaaacgtcctggcccgccaaaaacttacagaaaaatattttttcgtaaatatttctggcttttttatcaaaatatttgtcccagccctagtgattagtaggacttccaaaaatatggatataaaatctcggaatatggcaataaa

SEQ ID NO: 75830 - DNA, 632 bp, Heterodera glycines
atgaatttgttggacaaaatttgccttgttgccgaaccaagtgtcactgaaccggttgttttattataataataaattacaaaaaataaaattaaattatgtaaatttccaaaatacaatcactaatcactagcttaatccttttgaaaattttttacgatattttatgagaatttacccccccccccccacgacgaggatattgctccccgacatttttaaatttctcaagccatttcctacaaattttttccgagaatttcctctccgatccccgtcttttctcttcccaaagatcagagaccaacttcaaaataaataaaacaaaaaaacgtttatttatttttttaaagggcgacagtggcagtccgttgctaagcaaaattggtgacaagaattgggtccaagttggtgttttatttggtggcagcggatgttctgaaaagcatcccttttccacaactcggcgtcgctgtaagaaaagccaattaataataaattaaatttaaaataccaattttatttatttaatagcattatatacaccgatcgattgcgattggatttcgcgggtgacaaatgatgaagtgaaatgtaaaggatggtgaattgaaatgaaaaaattgatgaaa

SEQ ID NO: 75831 - DNA, 82 bp, Heterodera glycines
aaattaggaggaaaatacatagcacagaaaatcattttgttgacatgtccaacacttatttaaagtaatacatatttgataa

SEQ ID NO: 75832 - DNA, 1038 bp, Heterodera glycines
atgggactgccactgtcaccctttaaaaaaaataaaatttttattttattttatttattttaaagttggtctctgaccctcggcgagagaaaaagttggggaaaaaatttttttttttttttaatttagctttgctcaaaagtaccaattttttaattcttcatatcattcgatagctctaagaattctctattagcttacgaaaatttcaaaaaaagcttcgttatgtctcataaaattatgaccaaaaatgtcgaaaaaacattggtttttttagcttctcatataagatttgattcattttgttcgatgttatgaataattttctgtcaaaaattttcattttgatggttttttaagtaacgacccggcaccaatgggaccaattggtcccggagataaagatgggccttaatttgagttaagacatattggaaaatcttaagcgttgtaccattaaatttatcgaagagtgcgtgtaatttttttcagaaacattttaccaaccacctacaaattttttctaaatttccaccgattttcactgaacattggtggggcatcgaatgcatccattttgtacttcacaatgtattcgaataattatttaaattaattaaatttttatttttttagtacggaatatcggcaggcattccaaacggtgtttccatttgtgttcaaacgtttttcaaatgctaatcaagtaattccactacaaaatgggcatccattaggtaaaggatcatgcgttttttagtctattatttgtccttaaatctcataaatttcgctaatttttttgatttttagagacgaatcttttgtaaaattcgaatttaaaaaaatggcatttaaattgctgtgttcatttgttcattcttcttgtattgtaattcgtaaaacgcagaaaaacaatcatttaattattaaacgaaaatgagtaatttcgttattagtattgaattgacaggtgatttgtcggcattcttcaaaatgttttcattgtcattatttgcattaaatttaattaataaa

SEQ ID NO: 75833 - DNA, 1535 bp, Heterodera glycines
atgattttttggaaaattttcaagtttttgggtcaaaaaggtcaatttttctgtttaggaccgttctaatagagttctttggaaaaatgccaaaatatggatataaatcgcgaaatatggaaaatatggatatagaaatccatcctagaagcttaaatccaagctaaaaacatgtttttcgtgcgtttcaggccttccccacagtccaagaaagaaaaaatgaatttccataattccgagccctcgttattagtgcttctattttttaaatttacatgaatttcttcttttaattattacaacaaccgcttcagtggcacttggttcggcagcaaggcaaattttgtccaacacatttatttcatttaattcgtttgcaatggaaacaattggatcaaccacaggtgatgagcctgaattggcgttaaaacattttgaagaaagtttggacctggattcctttgttggaccttggaccgggaatctcacagacaaaaaaaatccagaaaaaccaagaaaaaaattggaacattgactcattcaaggaaaaaaaaatgcatctgaacatatttttgacagacctggtaattaccaatgtaaattttaaataagtgagaaaatttttatgaattttagtttgaactacctgggtcatttcaaatccgctaaattttacactgaagattttagatcaaaagtaagcaaattttgtaaaacataaaaaccaaaaaatgttaatggaaaaaccctcaaaattgtcattgtttgttcaaaatatgttagaaaaatatcatccacggctgtgctaggttttttataaattgattctcaaatcttcaaaattttggataaattttcttattaaaattcacgctagttttatgcaaagaattttcccaacggagcctatcggcaccacaattgccctaataagcacattttctatttccatggtcccctttgtctctttaaaataagtacaaacgcgatccctacagtaacccattcttgcacttaaatattattatgccataccataagtaattggacattcgttcttggaaaccatgcgcattgtaccgtacatcagctggtcacttgtactgtgctgttcacgtgaacactttggttttgttatgccccatccggcaataacaaatggccgtgaattattgatgtgttgggcagaaattttttcggaaaatgaatttttaaaatttgaggaaccttaagttttacaggaaatgcgtaggttagcgtaaatataaaaaaattaatcgcaaattaattttaaccatttttgcatataattccgaaaattcctttacaagattttaaaaaaattgaatttttcactgtttttaatttataaaacttttttaaattttttaagattattaataacatttaaagataaatgtaaattcacaaaaaattataaatacttacctatgccaaacaaacaaattggtctaacacgagatgaaaattgtattggctccacgctcttaaaaaacatttaattaaaaaataaa

SEQ ID NO: 75834 - DNA, 427 bp, Heterodera glycines
atggatggaccacctcttcccgattcgcagtcgggacagagactgattgtggggagaagtggggaaggggaaaagagttggattaaagggaccgcccccaaggcaacaattggtatgtcatatgtgattaggggggggggggtggcgattgggacaatgggttacaaaatgattatgatgtcactttaaaaaattattaatttttcatattcaaatttatgttactgctgatgaaaaaataataaatttaccactgataattatttcttagataaaataaagatgataaaaatttatttgataataaatttaaattatatcaaaataggaaaacataaaaattattatggaaatcgcataatttttcaactaatatctaatttaaaaatagttgaaccattatatttttaaagaattttgaatcaaa

SEQ ID NO: 75835 - DNA, 789 bp, Heterodera glycines
atgtcgccccaacccgaaaatccgccagctaaacgacgaatgtcattttttgaacgtctgaaacacattacaggcgcaaacacaagtgaacagggtgatttttggtctctaaaaattaaatttataatgaaattaaggcttccaaacgtcgcaagatgatgacattgaaaaagaaattaaggaatttctcgcgctggaaattgcgaacccagaagcggacccgttggacgaatggaagaaaattgctccccgattttcaatccttgccaaatttgcggaaaaatatctttcagcacctgccaccagtgtcccaagtgaacaaacattcaaagtcgcccgagatgtctttgattatcgccgttccaaattatcacccgaaactgcagaacagcttatttttctgaacaaatctcttccccagatgaattacaattattgaatcaatttttctgtttattttattaaaattgttaaatttctacatataattgatgaaattttgtgggttttttcccaaattaacatgcgaaaatttaaatttttaccaacccggaaaccggtgccaggcccggcaatttgaaaatccggtttgatcggttttccggtttgaccggtttttgagagaccgggcccggaaaccggttgcttctgaaaaagtcagcccggcccggcccggcagatttggaaaatccggtctctagtgttttatttggtagcagcggatgtgatgaaaaacatcccttttccacaagacggcgtcgatgtacgacgataagccaattattaata

SEQ ID NO: 75836 - DNA, 1322 bp, Heterodera glycines
atgaagggattcaaagaatggaattatgaatgtggcttttgtttttatggtgccgatggagaaatgaagcgcgttcacaagaataagaagaatttgccgttattgttgatgtacgccttgtcaaaagacaaaaaattggacgtttatctttgtgattagccatttgctaacttttattagggttttatcaaatattagcgttaataaattgttgaaaattaaaaaaaaaattttttttgcggcgcaaatgtcgatttggctgggcggcgcaagtgtctgcggcgcaagtgtcgcggcgcaagtgtctgcggcgcaaatgtccgcggcgcaaatgtcggcgttccctttgaaatacctaatctaatttatgaaaataaatgctatcataacagtgctgagaaatgtgaattatttgccaccttatttgccaattcatttaataatagtgaaaccgacccaagcaatccatgcttgggtaatattatagaaattgatcaatgctttatatcggatataaattttaacatcatcgagacccaaaatcttctgaaaaaacttccgaataaaaatggcacttctcccgataatattagttataaaattttaaaaatttgccattcttctctgtcaactgttattactgacttgcttaggatctcattagacactggctcacatccagacatctgcaaggaatcaattgtttttccgctttttaagaagggtgacaaaaataatctcgaaaactataggccaatttcattaacctgctcactctgcagggtaatggaaagaattttaagcaaaaatatttacaaatttctattaaaaaacaaaaaaatttcggaatttcaatttggttttgttagaaataggtctacaacgagtcaactaataacagttgtggaagattggtacgaggcaataataaatggaaaaaatgttgactgtatttatattgattttcagaaagcttttgactcagtgccccatgaattacttttatacaaattggaaaaaataggtataaggagcaaactttaatatggataaaggattttttgagtaataggacttttcgcgttaaaataggggatgatttatcctccagtaaaaaagttggctctggcgtcccccagggctctgtccttggacctttattatttttgatttatattaacgatcttcctgatgcttggccatcaggagtaagaattaaattatatgctgatgatgttaaattgtatatttgttataaagcaaggaccgaaacagaaattttgcataaagcattgcataatttatcagaatgggcaaataaa

SEQ ID NO: 75837 - DNA, 558 bp, Heterodera glycines
atgcccgtaaatgtgaacagcaaagagtggagtggacagcagaagatggcacgagaacacagagatttgtgttcggtttgaatatgacgcaacgttgcacgaatgaaatgaacaagacaaccaaatacctttttttctccaaatactttattaaatgcattaatttcggcccgctcataacaatatgaattctctcgattacttcaactgtttcagttccccattgtcgatgaagctcatttaaaacagttttcgaaaaaagataaagtgcaatcaatagaattgataaaaggagattgtgggttcatttatttcataataattgtttggagaataaaaaattattttaatgtgctcaaatctcaattaaaattacaaaataaaatttattaaaatctttcccgtactgaaattactcgcctcttctgatcacccctcacccatacttttgacacttcggctccccacggacccaaattaaaaatcactattttggcattttgtcactattttttcactatttcgacattttttggaaaattccttaacaaaaatgca

SEQ ID NO: 75838 - DNA, 435 bp, Heterodera glycines
atgaagacatttgtggaagagaaggttgccgaagcaaaagaattggcagaatttgccatcgctgatgcggagcgcaaaatgaaacaaagtttgaacaacgcaatacacgctgaacgtgaaagaggccaacaacagttacgctctgtagtggaggagcaacatatgcgctgccgacacctcgcactgcaaatctaccgctccgcaacaatgacaaaaccaacatcagttcgcacctccgatgtgtctcccaaatgggagccacattgcatgttttgtttgatcgacgaaccgatgtttggaagtgaatggtgcgcacatgtgaatgtgtgcgctgaatgctcgatcgtatggtcaggggatgatcagttcaaatgtttgacttgtcaaactacatgtaataagtttgtctattttgggcctaatccatccccctaa

SEQ ID NO: 75839 - DNA, 1155 bp, Heterodera glycines
atgatgaatttaagaattggagtgttgaagcgattcccattattggggagacggcggcggttcagcagaagaagaaagcgaaaagttgggccatttacacagagtctttcagtattggtgatgccattgggtgagcagaaaggaggccttatttttgttataaagcacggacggacaggacagtatccactgtacagtacttgctcagaatcttggcaggcccaggggttcctattaaaacaggaattaagtgcttgtcttgtccatgccgttctggtccatctcggaaaccctggtcctctagttcgaatttttttttttaaactccgggctttacttttacaaaagtgttttcatccgacgattcaaattttgcttaatttaggccgctgtctgaaaaagtgttctcttttcccgggcccagtgatcagcggaagaaaaagtgatcatttgagaaatgtccgaccaaaaaagagctaatgaattgtgttaattgatactgtcaaatttaacgctgggtattaaaaataggaatttaagttgggctaataattcaaaaattaattaaattcagcgctttttttacttcaagtaatttgcaaataaggattagaaaatttatttgtgttcagcaaccctacctcggaaaatgaacaatgtcctaaatagttattggaacataataattttgtcttatggcaaaaatggcggattttgggtagtttatttttgtgggttacttttacggtttataatttttctgataaacaaagaaagctctaaacattcttctagagttggtattttgaaaaagcctggattcaaagttgggaggaagaaaagtcgcgggggtcgaagaaaaacaaatttttttatgagagcgttgttaatcttggtataaaatttattttaatccagcatttcgattttccgggatcccgtgcgagattgtgagctttttaaaaatcgcatattttcattgtccccgattcggagacaatgtcaggaagtgtggttggtgaccatgtatggatgggacgggacttaaacccttatagaaagttgttatttataaatttatatgatattttattaaattcaatttaataccgaatttcgaactcaacgttataaaaattcattaaatccgataaa

SEQ ID NO: 75840 - DNA, 865 bp, Heterodera glycines
cgatcaaatcagtccgatcatcgaccagtgacggagattacgttcttaacaatggtgatcagcagcattgttcaattaacgaagaactgcgcaatttgacgctgtcgcacaatttgctgcggcagcaacaatcatcagccgtactgatttcgccgcgctgtcagccccgacgactttcgtccgtgccgcttcagcgccagcgctcgtcggcacagacgcgctgtgccaaaatgtcgacttcgttgggtaaatttcgaagttttttaaaattattttgaaaaatagatgtttgcgaactgttgcacattgtaacgcatgaatacatcggtgctgactgcgcactgcgcccgggcgaacgtttggtggtggtggacaacggggacaagaattggaagcacgggtttaaggtggaaaacgaaaaatttttagagttttttaataaattctgggggaaaaggactattatgagaaatttgaagaaaaattgtctcaattatttttagaattgataagaaattataaattaaaaaaaacatgctataacggattttattgtatttttttcaaaattttaagattaatttcagaatattttatttctttgttcttaaatttgtgtttttgttgttctctgaaatttaaaaaaaaaacaaaaaattattttagttatttttcattaattaattagtaattttgaataaaaaattttattaataaacaattattttagctgtcggattatatggaacggatggtcaccttcccaagttcatgcgtagcagcttatcggcctgaagaacgtccaatgcgtttggtgcgcaattgtaatttgttggaccagaaaatccgattgtaccgcgaccag

SEQ ID NO: 75841 - DNA, 836 bp, Heterodera glycines
atgcgattgatccaaacatgcaatttaatggagcaaaaaatgcgtctttatcgtgaccaggtaaaaaaatttttttttaaattagaaatttcaaattttaaggttgtctttgtgcagcccaattcgctgggtgaggacggacgggtgacagtgcggaatgaacacgacaaatttgtgaagtgccctctgcaatttttgacattggcatagcaacgaaacgccaacaggcaaatcgttttaaaaattgcacaatatttatgagaaatttgtaactaactatatggattgatttttaaattaatttttttttgaaagtattaataattttctttaaaaattcctccaaaatttttttaaattttcctggcggcatttgtcttggctaaggaccattctccctttgaatcttttaaaatttgagcaaaaatccttaaaattgttttctttccaaatctgttactaaattatgggctaaaaacaaattttcagtgatttaacttgagtgaatggacatgcatgcgctcataaattagcatagtaaacattgaaattaaataaattgaaattttgacaaattttctaaaacctcaatttaagactatgacaatattttcaatatgtttagcactcacctagaaaaatattatatatttttaaatatttagaaattccaaaaagcatgggagatgatgcattcggactgcttatgtacaccttgactcaaacatatgatgccaattagtttatgggtattgattaagttgatacggcattttttgtctttttctactgtatttctttttgttcgatatataccaaatgattttttaaataaa

SEQ ID NO: 75842 - DNA, 222 bp, Heterodera glycines
atgagcaacagcaacgacatgagtggttatgaaaaattggggaaaattggtgaaggcacatatggaacggtaaaaaaagtgacacataaaatttcaaagttatattataaagaatttgttaatttaaggttttcaaggcaagaaacaaggacaccgagcaaattgttgctcttaagatagtgcgactggatgatgaagatgaagtgaattattaacaataaa

SEQ ID NO: 75843 - DNA, 1885 bp, Heterodera glycines
atgactttctgtatatgtccaaagaattggcacggcctggtgaattgttacaaaattccaaatttccattcaattttaccaatgtcagcaagccggtgagttctgctaattgagccggtggtaacatattttaaactgcattttagtacgaaagttatatgggttccaatgttaaattgcgctattttcttcgcgtcactgtttttcgtcgtcttaccgacattgtgcaagaattggaggtataacaaaaaccggaaaatgcgttaatagtttggtttgtcttccccctcccccatattacgcaaaaattttttatggcattgaaaaaatgttcccaagtttttggttgttgattacaatacatttgatacccttttcggcgaattccagaccataactcgaacaacaagtagaagtagagtttttaagtgcactttgaatgttcatcctttgcattattggtgctttttattttaatgtatttaaaaattttggcccctaaagaattttttaaaaatttccgacctttttgaattccgaaattgacagaatgaatatttttcgttgttatcgactaagaaacgaacctaaatatattttatgacagataataagtaatttgcataaaagaaaaaaggggtgagggggcgggggacaagccaaagtattatagtaccaaaaatacacgctgtgttcacggtttttgttttaacagttcgctgtccatacattagctgtctatcctgagaatgattgcaacatcaaaatggaagtgggcattgaggattgtttgcacatcgagttcgagtacaacaagtcgaggcgagcaagcacaaaaaatatttaaaaaaaaaattttttttttttaggtatcacctaaaggatgtgattgttgggaaaatttatttccttttagtccgcatcaaaattaaggtctgtagagctgttgtttgacacttggtaaaatgaatcaaaaaatggagtttgctttgagtctgtgttttagcaaataagtttttgctaaaaaaatattcggtaaattaaaaaatgaaaaaaaatccgagaagagggggaagagagttgcgcacccccctatctcctcaccaaaatttttaaagcgaaaaaggatttttttggtaaattctaaattcgacatttatattgttttaaaataaagcggcaaaactttggtggccgtgaagagcaaaaaagggtcgtcatctttatctccaagtcggaacttcctggaccttccctgcaaattatttgcacatttttttttctattacagcacatggaaattgcaattctgaagcgtgaatccgtgggcaatgggccaaatttgttcaacgaaaatgaaacaattgccaaatacgaaatcatggacggagcgccagtgaagggtaggattgttttttattatttaaattgtgaaaaaaaaaaatttcctttggtactttttgtccatacgcccaaaaattttaaaaaaaaaaattaacaaaggatgcaccgtgttttttttttgatggcataaaaggaataatttgccccaagacaattctgaggttttttttcctttttggggtaacttattcctttttatgccatcaaaaaactcagtgcattctaacatatttttaacatttgggggtgtatgtacaaaaccgaaaagtatctttcttctttttttattaaaggagaatccattccaattcgtttgtttttggccggttacgatttgacgccaacaatgcgcgacgttggaaaacgtttctcagtaaaagtacgttgttgaattcatcatgcatgggtcgggagatcactttttgcgccgattcatttactagctggttttttgtgacttttaaaaaaatgttatatcata

SEQ ID NO: 75844 - DNA, 919 bp, Heterodera glycines
tggtgttcgcgcagcggggaacgctaatgcaggagtgattgaagtgccggcactgacaaatgcccggacggcttcacatgtgttgcaaataaaaactgttgtccaggttcgaaaggttccaaacaaataattttggaaatggcgcatcatgcaaaattgttttcaaaattcatgaaactatattttgaccatttcttaatatcagatccaaattcgaagaaagtcgaaaattcaaattcatatcgaaattcgcttttttggctcaagtccggattaaatacaaagaaacaaactaaaaagccaacaaaaagatcatttaaataattctaaactaaaaagaaatttcgactttttgttcggtcccggtccagggttcagaatttgcacaagtgaatgcttgattcatgatcaaatgaccaagaaaacactcggaaaacataattgcaactgaattttttaattattattttttcttttgaaaatggggagagaccaaacgatgcgcgctttaagcaaaaattaattgtatcttacaaaattaacaccctaaaagaaattgtctgcggtattgaatatgatacgggacgatacgccttccaggggtcgcatacgccggtaaattttggacagaaattgaaaacactgcactgaaaatttacagcgttacttctacaagaaagacattgacaattgccttctgttcacttattacggtgcactcggaaatggcaacaatttcgagtaataataaataattattattttaaatttgattctccaaaacacaaatatttaggacatacaatgaatgcatcaaatactgcaagaagacttaataatttatgtagttataaatatttcatgacgtgaagtcaattggcgttgagaaaaaaattatgtcatttcataaaaatgatcc

SEQ ID NO: 75845 - DNA, 89 bp, Heterodera glycines
ggcaaattttatatgaataaattggactgatttcggggaaatgaagcgatttaattcaattaaaaatgccaaaacaaaaatgggggagg

SEQ ID NO: 75846 - DNA, 1276 bp, Heterodera glycines
atggcatttttttgtatgtgactacaatttgagtctcctcattttgctgaattgtattgttggataggcaaattttatatgaataaattggactgatttcggggaaatgaagcgatttaattcaattaaaaatgccaaaacaaaaatgggggagggcatcatggccttaaatggaatttttccatttttttgtcgcttggtttgtgcccaccatttttctttgaaatttcagcgcggattaacggagtcgcaaagcgtgccgccatttcaaatgcggcggacacaccgtcggcgccgaggcgttcaatggtggccagacatcaccggatcagtctgaagccgtcgccagccgaaggtattttttggcttggccatgtcacaatttgttttatttttggagtggaaaataaaaaaatattttattcttgatttcgaattagccaatgcatacctaaaacatttgatgggtcaatattgaattttttaaaatttacaataatttcctcaaattttagcggaaaaaatggggatttttttatatagtaaatctaccctcccaaaacgtcataaaacggggattttttgtcaaatttttttataaataattcatcaaatgttcaaattggtccgttaaaatcaggcccacattatatgtcaaccaatttttcagttttttgtcactttttaatgaaatattttgaatttgttgctctttttaaggcactgttgacattcaattcgatgacaatcagcagcaaatgccaacagcaacaattggtggtgctgctggtggtgatcagaataagcaaagctgtgccaacggttcttccaacacttctcctccggcacggcatggacatcaaactcagagccaacaacaaaaaatgacgacgacgagtcgaagcagtacaacgccaacgccaccttccacggcgccgtcgttgtgcccattgaatggcgtcggttgtgacggagaagcggcgcaacaaaaacaggacacaattcagccagcaaattgtgttgctggtgcatcttcatcatcatcatcctcgtctttttcagttccgaatgaggtaaaacaaagaaaaaatggggccctaaattatggacgattttacttggttttgtgagcaattttttgcgtcttaatccggctcaaattgtttttttttattaccctaatggttcagacttcttaatgaaaaaaaagcattaaaattttagcatttcgcttaaaaagcctcaaaattttgccaatctttgtccaaatttgtta

SEQ ID NO: 75847 - DNA, 1087 bp, Heterodera glycines
atgcaatttgaggtggaattccaggagactgtgtatcaggtggggaaaaaattgcatttttttcccggaaaatgcaaattttttggatggtttttttgcaggtgttcgttagagtccgtccccatcttcacgagttcctcgaacgcttgtccaaccattttgaaatcattttgtttaccgccagcaaaagagtgtacgcggacaaattgctggtataataccgtatatttttttgtgctttttaatgtctgacggtgtgattttttaggattttctcgaaattttttaaaatttttggtttgcttttattttgggatgccgttgaaattcattgttaattactaatagtatcctttttcaaaataacatccaatatgttttcggggttaataaattcattaaaatcatttgttttccattttttgctcgaatttgccctgatttttttggaaaataaatgagaaaacaaacttttagtggcaaaaacacgaaaaaacaatccattggattaccctaaatatggagaaaatggacaaattaatttgttgtactgtttgtttgttgttataattggacagtttcacttttgaaaatcattcataccctccctaattataaaaatgctcaaattaaatgtttttttttgaatttttcagaatttgttggaccccggcaaacggttcattcgccatcgcctgttccgtgaacattgcgtgttcgtctacggcaattacatcaaagacttgaacattctcggccgggacttgtcccgcacagtgatcattgacaactgtctccaatcatttgcatatcaggcaaatacaaatatttaaacttttgtcaacaaatgttttggatttgaaacatttttcaaaaaaaaagggccacaatttttctcactttttttgtcgaaaatctgtcaaattttgtgtcttgataataccgccgccttttttgtgcagcttgacaacggcattctcatcgagagttggttctcggaacagagtgacaccgaattgctgaaactgatcccgttcttggaagcgcttagtcgtgaggtcagtttcaaatgatttaattgttaata

SEQ ID NO: 75848 - DNA, 1481 bp, Heterodera glycines
atggctttttcaattattttcgtgaccgtttttagagcattttttcaacaaagtgccattttccgcccatataaaataccgtattcctactggccccagaaaatttgatattttttttttactgaatgacctattgatattatttttgtgactattttgggttttttacacttaaaatgccttttttttttgccagttccttctggtctgctcaccgagtgtgaggtgtccagcattttgcaatggcaccgttctcgtcccaagcccacgtgccgtactcttccggccgcgctgtgccgtcccctccaatttgtggcccaatttcccaccaccaaacgcaattacgaatgccgggcaacgcttcggcagaaaatcgacaattttgccgaattggcgagacaaattgctggcgacagtaaacggagctttgacagcgttgaaatcaggggcgtaatcggaggctaaaaaggatttacaaaaacagggaaatcccagacccttaaaatatttttttgacctgaaattttgaaaaattctaaaatttaatttcaaaccgtttttaagcatatttctttgtcctaaagtttatttttttaaatttttttagtggacttaaatggcaactgaattcatgtgtgttaattgatcatatggtgaaagatggtgaaaaactaatcagttttcgtttcgatattgattgtgacacggacagcaaaatttgtgagtaaaaaaaagacaaaaatttaaaatttcatggtttagttcaaggggtacgtaatttcgtaaattttggatggaaatcggaattttgatcgaaaccgaaaattggaaaaccaaaattccgacccctctccctcccaaaaagttatgtcgaaaaccgtaagtccgcgttatttagcaaatgccaaaattttctaaatttttggcaagtgaataatgaaaaaataattattttcatccatttgcctaatttttcaaataaaatttagtttccgaccgagaaatgttctttgaaacaacatttcgaatttgttcgcaacaagatgaaaagaattatcgcgtggaaaagtgttccagcatattctacaataataattttttaagttggaatatttaattaattaaaatgaaatatttcatattccactggggaattgaacccaagcgaaaataataaaaagcagaagggctatccactgaaccacacatgctcacggataaatgttttaaaaagatagacgggatccgggctctcgtaaaaataaaaataaattaaattaaaatttcagtttagttataggggtacataatttcgtaaaattttaggtgaaaataggaactcttcgatacctgaaaaaaatttctgaaatcgaaaatcggaatttcgacctctcatctctcacaaaaatatgtcggaaatcggaaatacgtcacttaacaaatggccaaaatttttaaatttttggcgaattaataataaa

SEQ ID NO: 75849 - DNA, 1278 bp, Heterodera glycines
atgcttcgctttatttattcggctgatctgagccaattgaatggtcaaaatgccattgctgtgctttatgcgggtaaaaaagcattataaaataaatttaaaattatttaaaatttgtcattttaaataaatttagccaaaaaatataatgtgatcggactgatcagagcatgtttggactttcccattggtcagctgcaaaatgtgttcttcgcatttgcggagacgcactttcttggtgaaaatgtgtgtaggaaaaagttgggatcacaaaacttgggaaggaatcggacgaggacagaagaattttagggataaaataggagttttcgggattcggatcacaagtttagggttagggtttcgatcaggattagaaattcttgaatggggaaacaggacaatatctctgggattaagcagcagaattcaaatttacccttattttttcacattttaccgattaatttccaaaaaaacaattaaagccaaatccaaatttaaaaaatttgaaatatttaagaaactgttaaataattatcttatcattggccagtgatactctacattttcccaatattttttaattcaaattcttttaaatttatatttgacatttcccattttggcatttcgccgaccaatgtttggcttacattgatcaaaacgcggacgcattgtttcaatcggacgcatttttgcaaattgatcagagcttattgtgcgacattctttcgcgtgatcaactgctgattgctggagaatttgtcatttgggaggctgtaattgtttaatttagttttttattatttccttttaaattaattaaaaaggctctccgttgggccgacgaaaaatgccgtcaaaatgatactgaatgttcggcacagaatcgtcgtgcaatgcttggcccggcactgtacaaaatccgcttcccgtgcatctttgaaacggatttttcgactcaaattggtcaatactgtagccagcattttaaaattatactcaaataccgtacacctagctagtgttgatactcattttttcaattagatgcaattacggtatgctttttcaaaatcacttatacgatctacatttttacaataacacaaaaatactgtctcctccaaaaacaccgtattcttacccttcccactaaaaatactatttttggagtttttatcaacgaaagtgccgtatccgcccacataaataccgtatttttacggacctaaagaattttattttactaaattggactgtttatcaattaaa

SEQ ID NO: 75850 - DNA, 113 bp, Heterodera glycines
atgcttcagacggtgtccggtgttctgctgcgctcaaaaatgttctacgtaccatttctgatctgcaagcagccggagccaattgtggacgaaaagtcgcaacaaatcggaag

SEQ ID NO: 75851 - DNA, 572 bp, Heterodera glycines
atggcaaacagtgccatggaacaacagttgggcatgctttgtccaattaccgcactgacattgccacaaaaaaggctgattctggcacggtggcgacaattgtccgccgcggacattttacggtaggaaaatgttactgtacataaaaataaaataaaatttgttttagcattttcactctctttttcagactcagtgaaaacattttcgaacggacctttcgccgcaatgaatcattcgctcggacagtcctccgacaaaacgacagaaattggaaaaatttaccccaatttcgagttcttacaatggtaaattgaaaactgttttccgatcgaaatttggctgaatttcccattcattttcagcgcttttcctacgctttgtccgccctttgcgcctctttggcggatgacgcggcgcccggcgccgaattgctggccgaatttggggcacagcacgcgattgggctggacaatggccaagtggtaccgcccagctattgggacgtgcttttgttggccatttgcgaggcggccggggccggcgaaggccaacagcaaattgaggtataa

SEQ ID NO: 75852 - DNA, 766 bp, Heterodera glycines
atggagaagctaatcaacggaccatctgccgtttatgtgttggagtcggaaggattttgcgcgacgtccgtcgaaggaacgccccgcggggcgttggcggcgaatgccatcgcccaaacggccgccagtgggtgcgacggcacaactgctgaaggcactaccgcttgtcaaatttgcctcgtcaagcgaagcgttgtcgctcatggcatcggccaaaactatcgctaccgcgtcgggacggtccgcggcacagccaaaagcgacggatggacgcccatccgaccgagcggaactgaacgaggccaaacgaatggatgagaggaatgtcaaactgatcaactgatgaccaacaactgatcagatcagatgccacaccggtcgcttttggttgagccgccatttcgttgggcgccgctccgaccgctgccgccgcgccgctttgactttgccgtgccggccaccgcggcggaaagcaccgcccccgcggttgccaaactggccccgttcatgtcatgccaccggacctccaaaagcggaaattgtttcatttcttgctttcaaatcataaaggcgtacggacgctgcgactggggcgacaggacggagaggagtcagtctggtcaactgatcgctgtccaccgccgcggagcggatcttcacaagcaacaagggatcagcctggtcaactgatcacctcacagattttacgattaaccaaaatcaaccgcccgcctttctcagcacagacaacccggaatgaggcata

SEQ ID NO: 75853 - DNA, 184 bp, Heterodera glycines
cgactcacgtcacgagaaataaaatggaaatgataaattttataagcatgatgcaatttcattaaaaatgggaaaaaccttaatttaattagaaatgttccccctcttcgtcgttctattcaaaaaatatttgtttgtttacagtcaattcttattcatttctcacacaaaaatgtattaatca

SEQ ID NO: 75854 - DNA, 748 bp, Heterodera glycines
  unsure (1)..(748): unsure at all n locations
atgggaaatgccgagtcaaatgccgcgggacggcacgtgggcagtggaaaattgcgacagtcgaaaaaggcgaaaaaggaaaagcgaagttgcagcgaacacttggaacagctgcaaataaagcagaggaacacgagcatggaacaggagaagcaaaagatgaagcagaagcaggaaaagggggacaaaaaggaaaaggaagaggtgaaagagaaagagaggaaagaagaaagaagaaaaatatggggaaaaagagagaggaaaaagaagaggtgaagagaaagagaaaggaggagagagaaagagagagggaaagagaggaagagaaaagggaggggaaaggagagaaggggggggaaagagagaggaaaaggaacaggtgaaagagaaagagagaagggaagaggtgaaagagaaagagagaggggaagagagaaaaggagaaaaagagagagggaaagaaaggaagagaaatgggagggggaaagagaaaattcgagggaaagagaaaaggggaagagatggaagggagataagaaatgattaagaccaatgacatccgtataaattttcctcattttcagtcaatttccgccaaattcattcgaatgccgcgtcgactaacacaaaaatcgtccgaaggcaccgccgcttccgcttgctgctgcacacgcttggccgcccagcggatgccccgcatggccgaggaaacggtggcgatgagccgcaccaccgtacttccgcatcn

SEQ ID NO: 75855 - DNA, 486 bp, Heterodera glycines
atggcaaaatatgcaaaaaatcggaaaatatttgaagaaaaatgtcaaaatatgcaaaaaatcggaaaatatgcacaaaaaatggtaaaatatgcatgagaatgtaaaacaagcaaaaatatgcaaataaaagtcccgatttttatacgcaaacacaaaaaagaaagtgtttttcgtactatttagagcatggagaagccaggaaaaaaatatgcatttgcatacttttggcagccctgatgattaattatgaaaacggttttcccttcaattcaagggccacaaatgtgctgcggtccgcggtgtatttgctgcagtgaataaaatgggaggttcgccctccataacacgtaaccattttttactatattaaactttcttaagcctttctcacaaattgccatattttcaggtttttgggattattaagctcaattggtaggatttgcatttaaaaaatgataaaaatgtgtcaattaaaataaa

SEQ ID NO: 75856 - DNA, 3419 bp, Heterodera glycines; identical to SEQ ID NO: 12269

SEQ ID NO: 75857 - DNA, 2726 bp, Heterodera glycines
atggcaaataaatttgtgcttgtaccacaagaaatttaccggggtctcacctctgcgacggacacgggtgacatcaatttggatgctgtacgacacgatttgacgcgtgccagggctgaacgaacaaacccttcagctaaaaatgtcagctacaatcaacagcttaggcgatacttgcaaatgagacgggaggtcgcggacaaaccagcacgggttgagctagtcaagggattgagtgttctgatgaggcgaggcggtgctgatgatgaagcagaagttgtagatacaccaccccgccctcctcctcctccaccaccgcctcctggtcagcatcctcctcgtcgtccaccaagccctccaggcccaggtccgtccccgccggggagtcctccgccgcgtccacagcgtcctccgagaccacctagagctgctgcgccgccctctcggagagatgggcgtgtggaggaatggcgaaaaaagagaaacgacatacaacaacggcagccggttgtgcgggaccttcttgctgaagcagctgctgctccgctacccgaaagtgacgaagaggatgactacatgttggagagcggattcgctctgccagcaccatcacaatattatggcgaattgcctgtactgccagacaacgcggacgcaattgaggagatggacactgcacagcacaggattgcagccagaagaaagttaaagaaagcagatgacgatgatggcaatgacgatttgcatcgcaaaaaataccgggtctattaccctcctcccccttctcgccacccccgtctcgtccacagccaaaaattgaaacacctcgacctccaccgcgtcctagcctcaagaaacaaccacaaccactgctcgatcctcagccatccacatcacaacaagttgagcgcaaacctaaaagggagccaaagttcgatctggatccgcgaccatccacatcacggcaagccgggtacaacccccctgcggaaccaaaacatgaacagaaaccgtcaaaaaagccacctcctcgtgccacaccctatcatattccgaaaagagagccaaaaattgaagaaacactgccgcggcagcaacctcctcctgctgccccacaagtgccgcctgttcccccacctaggagagggaccaaacgtcgccaccccccggaaaatggtgatgagagtggtgagctgcgcatacgtaaacgagtgaggcaagcgcgaagagtacgagtgtattactcaccagagccgggtccatcaacatcagcacaaagcgatgaacaacaacaacaacaacaacgtgaactgtttgccattccgtcaaatcagctgaccatggcacagagaattgagctaatatacatcaaatgcaaccgttatgccgatcgtatgggtgtccggggaaacgcaattatcaacactcaaaatgctcaaccattggtgcgaagcaatttgcgaacagccatcaggtatataattgacagaagagcgggtcgacctaccattagaccaccgggagcggaccaattggaggagcggcttaggcaggacccaattttgtattcattgacggctccaccaaagagaccatcgcagagcacaagcagcaggacgtcaataaagaaggaatttcagccgaaaaaatggaaatgatcaacaccactcttgacaagctgtacaacgatccatcctctcctactgcgtttgccggtgttagtgcactgtggaaggaggcgcggaaaaagcttaaaacaattacggaaaaaggatgtacaacactatttggagggacaccgcacgtacaccctgatgcgccccaggcgggtacgatttccgagagcaaaaactgtagctgctggcttcatgaccgacgtccaagtggatttggctgactttcaagcgctttctcgtcacaatcgcggtcaccgatacctgctggttgcggttgatgttctctcaaaacgcctgtttgtcgttccactcaaaaataagaaggccgaggagatgctggatgcattcaaagagcttgtcaagcaaatgccaatggtcccacaccgcattttctccgacaaaggcaccgaattcaaaaacaaattgctgaaggaattctttgaggagcaggagattgagaaacatgagcccgtgcattcgtcagtgaaagcgtcagttgctgagcgggcaatccgaaatgtgaaacagcgactgtacagatactttgccgaaagggagacgctgaattgggttgatgttgtacaacaaatagtggatggaattaacagcactccgtcacgggttcacggaatgcgaccaattgatgtcaattttgaaaatgctcagaaggtgtggaagcgaatttatgaatcaccgcaaaaacgcaagaagccacgtttccgtaaagatgaatttgtacgcatgagcagagagaagggacagttcgagaaggggtatttgccaaactatggagacgaaatcttggaaattgacgaggtgctgaaggcggtgcgccccatcagatacaagctccgggatgatcgtggtgaaaaattccggggcaccttttatgagcaggagttggcccgcgtgagaaaagatgccggcaccagttacagaattgaaaaagtgtacagaaagcgaagaaaaccggatggaaccacagagatgctcgtaaagttcattgggtatcccgaacgagaatggattgacgagtctcagattgtataa

SEQ ID NO: 75858 - DNA, 565 bp, Heterodera glycines
atgtgcgtcatttgtgaatatttaaggggtaccgatggcttagcaggattcatttcaagccaacaatcccttcccacgctcaatacccttaaggtaaaggggatgatgcttttcattttattttgtcttatttgtttttaattttaaagaaaatgccaccacgtgaaggacagagcaacaacgcggggaatgacgcccccggacacagacaaccaccgtttgctgaacaactggtcaatgatgctcaactgcgagacatcatgaacgtactccaacaacatggcgtcctggtaatttgctcattataatttacaagacatttccataacaatttcttcacaggttggcttgaacggcacgccgcaacaaattgtggaagcattgcgtcaattggcgcaaggacagctggatgatcgccgtcgtcaaacctgatgcttctgcggatgatgatgatgattattgtaaaacggaaaagactgctgattgggaagatgaaagaaaaatgaatttatttaaatttatttttttactaaattttccgattgattgaatttaaaaaaataaa

SEQ ID NO: 75859 - DNA, 1501 bp, Heterodera glycines
atgaaatttttccttacttttttgcttctcgccatttcatttttggctataaaaacggctgccgatggctctgacgacagaaacggagacaaaagtttgccaaatccattagcagttgagggaaaggcgagcaaaaggtcagagagacggagtaaaaactgaccgggccaaagccttaaaagccgaaaattctcggctagtcccaaattacccgaaatcccgactttaaatttggattatttttcgttttttcctaatttaaatgtacttcttgtacttttctctttagtaatcgccataagcgccattatggctacggttacggcggttacggtggcggaagttggggcggttatgagtcgtcgagatggggcggttggaacaacggcggatttggaggaggaggcatgggcggtggcatgggcggcggcatgggcatgggcatgggaatgggcatgggcggaggaatgggaggaggaggatggtgatgagagggcatttttattcattcgaaattaattgttattttatgacaaaaaaatattatttattttaaaaaccaatttacaaaatacgttcaatctcttggcatttgtcacttctttactcaaaaagcaatgactcataaattaatattttattcatttattttatctttttttataagtgaacagcagaaaaactggtcgtcccctgctggtgtggttccttttctcgtatcactttgtgtttattgcgggaattttatgactgttttgtgtgtaattaattagtgtgttaattggtcacgcaccgccgatcaatttcccaaattatccaatttatttcaatggtaaaaagtggaaaagaattggcccaaaattcgttgcattatttggactttgccggggctgctttaccatcgcctcaatttttacaacggatcgccaatttgttgtacgacccgcgggaatgccttttggcaaacccacacagtgaccatatgatgggacggaggacgcgggacaaagtgcaaaacgcacgggcaaagtgagggagggcaattaacggaagtattcaattaattaattgggtacatatcacaaaagaatcctcgcccattttggtggcaataatttggaagaattcgctgtgattttcacttcaaatgcaacaaacgcattgaaactgctcgccgaaaactttggagacgaaactcgcaaaagtcgcacgacgaaaaaacacttttcaagtgatgtgaattgtctgtcggatggtaattagttctttccgtttaattaattggctttttcagtcagtttcgctttggcactttctttttctggttttcccatttctctcaaattgcccccccccccctttcagttgctcctttgagcacccttctgatgctgcgcgattcccacacgtccgtcgtcggaatgcgaagtgctgaaagcttcgaacgattgttgtggtcacttacgaagagttaagacaatttttgccgaaaccgagggca

SEQ ID NO: 75860 - DNA, 2606 bp, Heterodera glycines
atgctttggcaggtggttgtccattacgcaccgttgtccattgtcggcagattggctgttgttttaaaggttggtgtttgcttttagagtttgataatattttcttttttttgaaatattttcatttcctccacaaaatataggcccgtttcactgacaccggtggtcacttcctgctgacgctgttcgtgccgaacagtggcgacaaattttccgagtttggccaacggcacaaagcgtacgacgcgttgagcgaagaggtgaagggggggggggggggtgaagaatggcttaaggattaacgggaaagggatttacttaaacaaaaatttgtaaaaaattctcatggaatttttaccctttttccaagaataaaaaaattcagaaaaccgaaaactccgccataaaaatgacttaaatttgattttctaaaagaaaaattggatggggtccagaaatttgggcatttcggggtcgctgaccataaatccctacatccattcaaccgatttccgaatgtctaaccctccaaattcgaacaaaatggtcataaaaaaacaaatttttggatttttaagaatgcgagaagccacaaaatttctttttatgtgtgtttaggacaaaaaatggcaccgcaatggcctcctgttgagccatgccgcgctgcatggccccgagggcgttgtgccggcccacgcatttgcacgcgaggcacctttcaccatactggaggacgtcggcctggacaggtacatactgaaaacggaaaaaacaaaaatttttggaaattttccgattttttaaaaattttctacggctgtaagaatgtccaaatactccctgaaaattcattttttgcagtctcaccgccgtgtgccgtcgcagcattgccaagctgagcgtggacacggtgctggaggagcacaggcgcatcagcggaccgtaccgtgcccagtcgccggaccgcgcggtgcggcgactgctcgtcgagttggagacgctcagcgaccgcttcgagcagcagcagcaacagctcaaaaggcgaggtaggcagtcttggcggcgacggacgacacagaaattgttggaaaactgtcaaaaaaaaattttgaaacattttttgaattcctaattgtacaaatcgtcccttggaatagtcttgggttctctctcgggattgggagtcccaagtctcggggcttcaagactctgtatcgaaaaaacaaaattttcatcagacatgtccgagctggtctacgtgcttggccaggacaccgaccggcgtgacgtggacctggtggaccggctgcgcgaagtgagttatcgtaaaataaataactgtgccgaaatgggggggggagtaatttcaattttcaatcgcattgcgagagactgcccctccgttttagcgctcactctctctcgcctcgagccgaacaaattaacattttttaattttggaattgttcgtccccaaatttttttaattttggaattgttcgcccccccccccctccaccgaaattatttttttaattgaaaattttttcagttttaattttttctacaataataaaacatctaatttctttacatgtaattgtgttgcacaggtgcgcgaactccgtgcccaattggtggtggagcccgaggcgctgttcccctgcctaaagtgtccactaattggccaacatgtgagaaatcacataatttagacggtccaatcatttccttttcgaggaataaatactatctatataaattacgttttcaaatgcaattttgttaggggggaaaaattaaattaaaatcaaataaattttgaaaaacttcaattcttacgaggcggataaattttatttcatttttttcaaaatttgtgcttcagctccgtctgatggcccatcggtgcaaattggaggagcaaaagcggcggttagccttcgagacgtcctccaacaacctgcagttctccaaggagtacgtggaccggctgaaggtgctccaagcgttgcattacattgaccggcacaacatggtcggcctcaagggcaaagtggcgtgcgaaatcagcaaccaagtgaggagggggggggggggaaattgttggcactaaatttttaaattttaaatgttttttaaacaaattacattttcttagatggaaatttttaaattttaaacatttttccccttatgattctgtagaattttccaaatttgtagttattattttaatcaaaattgttggactaacaataagatgaagaaaataaattgttaaaaattaaattcctggcataaaatttttaaatgtttttttgtgagaaataaattattgtgggccccaaaatggagtgaaatttaaagttattttttaaaaattgaattcatttcacaggtgtttttaaataaattttaaaaattcaaatgtttatcaaattttctttgtccactttttgattttgaattaattcattttttttaaagtatcttcccttttccaggaacttctgatcaccgaactgatcctggacaacaaatttgagcagcgcacggctgcccaaattgcggcaattctttcctcaattacgtgccaatttgag

SEQ ID NO: 75861 - DNA, 1599 bp, Heterodera glycines
tgataagaaaatttccacaatgtgcggccccccacctcgctgcgaaccctctcacgccacctctttcaccccgcccccccttcgctgctaacccccccctaaaaaatgtatgtttgtgaaatttcaattttttatatgattttggtgtggtgggaccactaagagcggagaggggggggggggaggctgaggcgtggaaaataaaaatcccaaaaatccgttacaaattcgcggattctgatgccggattccccccttcctcccccctaaggttgtgttcgttttttcgcgccaacgctgtgacgacaccgcgcaactgctccaatcggtggacttgaccacggagaaggagaagtcggccatccaccgcttcttcaccaaatgcattgaccggctgaagggcaccgacaaaatgttgccgcaggttattatcacccgtcgttttttatgggcaaaaatttgttttgcaaatatcgttaaaatcctaaaaaataaattgtccgctcatcggtacccaccggcggagggaggtatgtatcagggatgggccaaattgaaaaataaaaagcgaaatgcgaaacgctaaaaaatgcgaataatgcgaaatgcgaaacctcgccccatccctggtatgtatcaggtgtccttgattttttgaaaaatatgcccaagggcgtaaccagccaaacccttggcttcgcgggaggggggggggtggaaggctgaaagcgaaaattcgatagggctgtattttttttttttttttgctgaaatcctaaaaaagcttcataaggaaacattctaaaaattgtgatttttccaacaaaaaaaaatgctggctcaattttttatgatggaggaaatgcgctcgcggcattttatccacgcttttaccggccaatttcaaaattttccatgcttttgatgccggttttgggccagttaccttttcactctaatcttggcattaaactttggtttttttcgggtttcctacccaccaattattgaaaagcgccattattaatcgtttttgtgtgcctttaggtgttgctgatgcaggagctgtgcaagcgtggctttgccgtccaccactccggcattttgcccattgtcaaggaggtcgttgagctgctcttccagcggggctacgtcaaaattttgttcgccaccgaaacatttgcaatgggcgtggtcagtcaaacaaaaaaccattattaataaatgggtaatgaaaatgggacacacagataaatttccagaaaaccgaaaaaatttaccgataaaaatggcacagtttttacaattttttttggcaaagccaaaagaagagcatattttttaaaattttccggcaatattttctggaaacgaaaaaattttccaatatttttacatttttttttgaaatatttaaattttgctacttttgtaaattgaaaatttaaccaaaatttttttttgcgcagaatatgccggccagaactgtcgcgtttgaaaccatcgaaaaatttgacggcaaccagaagcggtttctgaacccgacggagtatgtgcaggtagaaaaacaccaccaaatgcttgaaaatttcaaaaaaa

SEQ ID NO: 75862 - DNA, 1504 bp, Heterodera glycines
atgaccggtctgccgccaaacgccaaatcaaagtgcaaaaaccgaatgagcaacagcagcgccagcacaacatggatgccgaccgccagtggtggtggtggtggcacgcaatttggtggaccaatcgcaatgccaacgacgacgacgatgacagtcggtgacggcgcacctccaccaacaaaaattcggcgtaaagaaaatgatgggggagcgacggctgcagcaacagaaacagaaaacatattgtaattagacaattagtgggttctattagcacgaatattttgtggtgatcccggatttggtggctctttattgggttttaaattgttgtaattttttgattttcggttctacgaatttcgttcatattctctgatatttacaaaaatgtaaatcgggatcataaaattcccgttcacctatgcgaaaaatggggtacaattctttaaaatgccacttttttctctgaaaaattcttgtctttgtgtaatgaatggatgctaaatttttaagtttcgtttccagcggaactcagcagcatgctcaaccgtctgctgcaaagaatgtgatcatcactctgaatgatgatgacatctttccgatcaaccgttcacatttcaccaaacaacatttttcaaatgctcaaaaaacgctggcatctccacgacaaaaggcgccgcaaaaacacactcataccccacagacgacgacaaatactgctgctggtacaggctgtcaaccaagcagcgatacttctccaatgcctccacgaccaccaccaccttcattcactggcacttcatcatcatcattgtctgcttctgttgctgctgcagttcaccatgatccgtgtgccggcttgccacggtccgctctctccacaatgatcgctgcattatcctcacaattaagccatcattatcctcatcaacctcaacaaccgtctctcgctgtcattaattcgcatcagttacataaacaacagcagcaacaccagcaatcgtcgtcaatgacgagaatgacgacggcggtgacacagccaacctgttcttccccctccattgcttcttccactctcttccgacaacaagcacaacaacaacaacaacagcatcatcagcagcagcaacatggaattcctccgcttcaaggccaacaacaacatgttgttaacccgcaaatattgtcgtcacaacggaataatgctgaacagcaacaacaacagcagcagccggatttgttgcttagtcatctggtgaatatgcaaacagttgaacagcttcgactgcttggtgaacgttttgggcttaactggagcaatggcggaaaacagcgcaaatgagaaaggaagctggacaaaagccataattgtaagcactgaatgaattcaaatgactttttatatttgtattgtttatttatttattttttttcatataaaaatattcaggtcgaacaaactctttttttctttgtatttgacacagcgtccggaaactga

SEQ ID NO: 75863 - DNA, 338 bp, Heterodera glycines
gcacattctttatctatgcgggtgttactgctgttgcatttgctatattttattttgtggttcccgaaacaaaaggattaaatctcgatgaagtgaatttctatttaatttttctttaaaaacttttttttaagatcattttataatttcttatatgtagggctaggaatttaagtcaaatgacttttttttgctgatttataaatggccttagaatgacttaaaaagggttttctacgctttgtttgaaacttctaacgtgcatttttatttgacttttttttactttagggtttttatgaaaaatttgaatttttgcaaaaaaaaaatgccgaaaa

SEQ ID NO: 75864 - DNA, 644 bp, Heterodera glycines
atgatcagcaattttggctgctttttcctccagtttttgccaaactttggcctgttctcctccggttggatcgttttctttgttggcgttgatcgactgatttctgtccttctcccattaaggtaatgtacgagaaaaaccctgccgatatttagagattattttagtggaattttacgaatttaatcatagaatatttcactaaaataattgttttaaaaatataaatctataaataaatctttggacttcagaaagctgcaaaatggccactttttgtataccccgactggtaaataaagctcatttttgaaaatttaaaatttcattcgttttttaaatatttaattttaggccagttttatgcacaaattctgacatgttcagttttggcatgaccacaatgctcctgagaaatggtctggtcattaatgggatgtcaatcatttgttatttgtttgttggactgtcactgttttggtcatggcaaaaaagttagttggactaaaatttaattatttttaatttcttccactatttctttctgtgccctgcctcggcctttcaaaggggctaaatattttacatgggaatacaattaaaaaacataaagctaaaattttcattaaaatatgacaaataaa

SEQ ID NO: 75865 - DNA, 255 bp, Heterodera glycines
atggcttttcaaaactactccatggttaatttggtgaggacaattgtttcataattttcattttaaaataatttttattttttcaatttaatattatatatttttggtatttaaggcattcaatcgtttcggtgttgacaccttttcaatggaattggttttgtcaaattcctgccgttggctcattacgcttcccggcttagtgttcaattctgcacttttgtacacaatcataagcgaaaagtaataaataaa

SEQ ID NO: 75866 - DNA, 772 bp, Heterodera glycines
atggttacgagttgtaaagccaggtcaaaattgttttataaccaacttcaagtaattattcttataaaggtggcttcgtctatatggacatcccacacaaagagcgggtaattaattttaatttttagttttttttttttgagaacggctattattcttgtgcttgggaattggcctttagttttggaaaggctattttctgcatctccaagtccactgataagtagggccctggcgggaacagaattcccgcgggaaaacccacgaatcccgttcccgtttcccgacaaaaaatttgggcaaatgacaaatttaattaaaaaaattaaattaatttaacttttcatattttccttttaattattaaaatttaattactagcaaaatttttcagcttcaaaattagttttaatccagcattctgttttaaccgttttccagacttttgatcagggccgaaatcgaaccgctttgtccgaactgctcgaacggcacagtcggccaacgaatggcaatgcaaatgcggcccatgcccatgtgtctttttggattacggaagatttgctggaactttgccgacattttaattggacagtggccgaatggcgggacattgacgacaaagtcggcaacggattcacaattgtgctcaaaaagacgacaagaggaagctgatccgataattggactatgcacatttttttgcccttcgccaatgaaagtatctgattcatttattgtaataaaaattctaaaaattgtttagaataaa

SEQ ID NO: 75867 - DNA, 291 bp, Heterodera glycines
atgtgttccaacagatgcgcgctgatcacaaaatcgacagaatcatttgcaaatggtaatttgtcacccggggctattatgtgaacttttgcaggatttccttaaaataattgtcatacataaatgttttttactaattaaaatttctatggggttgaattgatgaacaaatattgtccggtcataactgttttgtttttcttaactattttatttgccataaatataatattttctttaaaataaataaaattaaaaatatcaggcggaaaagatacttttgaaaaataa

SEQ ID NO: 75868 - DNA, 2992 bp, Heterodera glycines
aaataaaagtccgaaaattttatttttatttgttttcgtgctgcgcattttattgtcaataacaacattttactacaacatacaatacaatgtttgaatgatgtgaatgaatgcaaaaatcatttaatggagacttatcaaactcatgaattttcgtagaaaattcctcaaaatttggccaccattttttttatcaaatttttactttccccacctcgtgagctttagggaacagcagattgaagtgataaaaatttaattttggtcaaattggactttacatgctcatcaaattttttatttgtcacttaattaatggcttaattttattttttaattcttttctctttagttttacataatttgatgtaaataaatgtttatttattctttttaaataattaaataaaaaagaatgtttttttttgttcaaaaaatggccaaaaatttttgtccttcaaaaatcgtaccattttgttttgttttttattctttacgcagcattttcctggtgataacaacaattaggaatgttaattccaggaaatttcacaataattatattttatcacataaaattaatttcattggccttcatttagaaattcattgaaaaaaaaattttgtataaaaaatatttgtaaaaaattaggcaccaaacattttgccaatcaaaatttaatgcctttttaggcatcggaatgcctttttcatatttatataaataaggcgattaattggcgggtttattcacattgcaatgaatgaaaatgataagaaatcaaaaatcataatagctttaacaaatacattttattgctttattccatataaataacttgtgcatttttcgcatttttcatcaaattaaaatgaatttttaatcatttaaatttaaatttctaattaaataactttgagctcaacgccaaattaaatgattccaaaatgtccatccacaccttcttcaatttcaacgtcacagaatgggcacgcatttcaaaataaagtaattattaaattaaattaatttaccgtattccttaaaatagtgcgagccctcgggggatttatttcagggagagagggaggctctaatttaaggagtgaggggggcttattttttttcaatccccctcaacaacaagggaggggggggggctttattttaagggggggggggctctaattattagggagggggctctattttgcaacccccttcaaaaggggggctttatttcagaagggctttaatttagggggggggctgtattttaggaaatacggaaatttataattttatttttgcaggatggccgactcaccggcattttggcattttctgtttttatggcggctttcggcagttcattccaaatgggctatcacattggctgcatcaatattccaggctcggattttattgcattttatgatgcattgacaaattaagaccattttgaaatttttgtttttgtttttttttaacattgtccggaaatatttaatcaaaattttatttttttttaaattttagtgaaaaaccgggaatttttcacccatttctacaatattttttaaattttccagccgacttaatcaaagaatggttcactgaatcgtacaagcacatgaaaggggttccgatatcagtggaagagatggaatcgacatggtgaaatttttattatttatttaatattttccagaaaattatttggcgctaaaatttctgtttgggggttttccacttgaaattttttgattatttaaatattttttatttccaactctattatatatatttttttgaattttaaattttttttaaccaattttttttcgaatttctgaatagggtatatcaattgcccagggcatttgccgtcggcatttttgccgttggcggaatgtttgtggcataaattttttaatgaactgtactaattctttgaaaaattatcattattattcaataaattcatttcattaatttattaattaattgcccagggcatttgcggtcggcatttttgccattggcggaatgtttggtggcattatggttggcactgttgcggacagattagggcgccgtaaatcacttctgtacaacaatatattggcgataattgctgcggcactgatgacactggcaaaatatatgaatgtttattatttgatcatcattggacgattcattattggactgaatgttggtaagtcaagcgaatattaattaattttttaataatttaaaaactgaaatttaaaacaatattaaatgaatttttatgaaatttttgtccaattttttgtccgcttttggtcatacataatacgcttaaacataatttaaaaaacaatcttaatataaataattgatagctcttgatttgctatactagcatgaaaaatttcaggaaatttcattcatttttcagaaagtcgaaaccaaaaatgttgataaaattgacataactttttgaaaaattgaataaaattttatgaaattttcaggttagtagagcaaacgaaaagctatcatatgataccaaaattatttaagaaaagttatgagaactttttcgcaaaatctgtaaaaattggcacttttacaaaatgccacgtgtgcctaaatttttaaaattaactctccaaaaaataaataaaagactgaacaaatgcatgcttttacttcgattctgtatttgtattaatttgtttcaatcggatctaacttttttaaatttagattttaattataattaaatcattaaatttcgttttaaaatttgaagggctcaacagcggactgtccccaatgtatttgattgaaatttcaccaaacaatttgcgtggctccatcggctcgcttcatcaactgtttattacaatttcaattctggcttcacaaattattgggcttccccaaatttttggcaccacaaatcggtggccactgatttttgcatttactctggtaaat

SEQ ID NO: 75869 - DNA, 941 bp, Heterodera glycines
atgagaaatgaaaaaaatgcaaaaatgggcccatcaccggggaaaatatcacagaattgggaaaagcacagcatagagggacagaaccaggagaaaatggaccagaaatatcacataaaatgggcacgcaatttaccgggaccggggcaattttcacaaaagaaatggaaaatgaagggccgatcacagatcactgatcacatttgggggaagggatcggggcaagagagctcccagaaattggggaaatacatttgatcggatgggaacaggggcggagtaataacggtggacgaaacaaagaacccgagcctcggtatcgctatacttccttttcttttggggagcggtttcgtccatgaaacaaggcgccagccagcatcaatcaccttctgatcacatattgtcaatgaagcaccaaatagtgggatgagtacaattcattgccgcagttgtcgattcgatcggcattgtccaagatgcgctgatgaacattctattcgttagggtcgatgtgaggcaacgtcagtgcattattgaaactattgagccacggtctttctcatatatttttttttataagcatttttaaagaactatttatttacaatagacacataaaattactcacttattgtctcggagtggaagcatgtgaatggggtcaaatcaaaagaattacaaaaccctaacaaaaactatgtttcaacactaaaacgaaaactcgactttttgcatgactaaatagcgcgtattcgattgaatcttgcaatgacgtctgtcgggtggcaaatgtgtttgaagatgtttcaatttccttgaacatatttttttttacaaaagcatccaatatttttctattgttatatgtaggctcatcatattttgacgaataatttgattaaattcattgaatttatattattttgtactatggaaaa

SEQ ID NO: 75870 - DNA, 776 bp, Heterodera glycines
atgaagagagaaaactactgggaatttaagccggaaagtgagaacttttatgcactggggcgacaaatcccgagggctgccgacacaattgaaggggctttagaactttcgaatctggggaagcaatccttcaaccgaaccaggccagcaagcacaagttgtgcatacgcgtcatttacgacgcgagtgctcacaccagagggacaaacagtctcttgcctggttgtatagaggcccgataataatttgtcgataacactctactttagtgtgaatccgcagaagaggctttacataaatatgccgagtctaaagtcatcctttaagaacggcgttttaattcgagggaatttgttaaaatccccggaggtaatgatggcgatccttgaggaggatcgcttaaaaaaagcgaaagatagtacgccaaagtgagataaatttaaaaaaacaaatattgtagattttctaggcttttctttaaatcgtgaaggttgaccctactgtaacaaggttaattattttggaacaatgctaatgaatcggtttggtgccgaattcctcgtctagcatcttaaattggcatgcttgctatctgttgatattaagaaggtatgaacaattttcgcacttaaacgactttacatttttgtataaacataaaaattactatcttcatactttatcaaagttttcttaacattttgtttttcaaatttactttattatcaataatttcttcatttttggcatttatttctccgataatgataaataaa

SEQ ID NO: 75871 - DNA, 335 bp, Heterodera glycines
atggcttgccatttttctggaaaatgtctaggcatcaccattgatgcaatggaatgcgtaagagcttactcattgctcttacgctttaggaaaatgcaatatatcccttagggttgcgttttatccaagcgctacggccccgcttttttttttgttgtattatccaattaaatttccgtatcgtcatctaaaatttcggcaatcggagttttgactgccaaaaaaaattcggcaataagaaataagaacacaaaaatgtctgtaattggcataccgatacatccctatttaattcattgacaatatatttaattttttagaattctaaaaattaa

SEQ ID NO: 75872 - DNA, 1257 bp, Heterodera glycines
  unsure (1)..(1257): unsure at all n locations
atgctaaaaattaattttataataattttcttcttatttctattcgtaataattgatggaactgatgaagatttaattgatgatttatggaaaaacctaaaatcaccgaccccaaaaaacttcaaaaatcaaaaattcggagaaaataataccataaagcaagaaattgttgaaaaaaacgatgaacaagaaaatgccaataaaatcgaaatggaagacataaagccaataaaaataaaagaacccaaaattgaattaggacaattgaacgaagaatcatttggaaatcaatttgatcagcaggctgatcagaatgtttcgtttgcggatctgagcaattctgcaaatgataaggattacaataatatggtaatataacagataaaacagcattattcctgaaaaaaatattttacaaatacactaaattcttagattttttttcttaaaagtgaattatttctttagaatacagaagaaataaatgaaatggaaattttaaataaatttaatttgatgaaaaaggaattgcgaaaagaaaatgcttataaaaatttgacaaatgttcaatttgagtgcgaaattgcgaaaaagttgggcacaaatcgaaacaaaatttatgaaatgaaaaaaaaattaggacaaaaaagagagaagagaacagaggaaaatgaagaaacaaaaaggaaactgatcagaaaatttgatcaattgagaaaagaaaaaatttgtgggtataaatatgacaggttgaaaagaaataaaattgagcacgaaattgccaatgaattgggagttacattcaataaattttaccaatggaagagggaattaggtaagaaaatattaacaaaataaaatttataattattgtatcaatttaaggtataataaagaaatttttatttacaaacgaagaaaaaatagaaaaacttgagcaatttgaaagaataaaagaagaattttcaaaaaaattcaatttcaaacccaatagaaaaattgaatcaaaaatagctgaaaaaattgggattgtgtggaacacaatttataaatggaagagaaaattcggtttaatcactcgtaatattttaattattaaataaaaaataaattaatttgcttttcttttaaggagaaagaaaaatttattccgttaatgaaaaattggaatatgtgaaaaaaagtgaggaaatggctgaaagaaatttaacgatatgtgagaaanaaaattgccgaaactttgggcattccaaatga

SEQ ID NO: 75873 - DNA, 1044 bp, Heterodera glycines
atggccaactgtgcattggactgtaccgtctgcatgaccaggcttcgttggaatccaataaacgctatgtgagttaagcgagcacaaaattttcagcgatttttggaaaaaattttttttatactatttcctttttgatataatgtcccaacacaaactgatccggggtgggggaaacgagttgctcacacacagcaggaatatcataactgtcaattaaaatcattttaaaaccacttttatcatgtagagcatggtcgatttaatattgccaactttgggctttttttgctccggcgccaaaaatgatcagaaaaaatcgatcaaaatttcgaaaaaagggttattttttaaattcataaaaaatttccagactcatgctggagccctaagctttttttaaaagttcagcgaaatttctttacaaaataatatgataaaatcaaataaaataactaagtcaagtagactcacgagtaggatcattacaaattttgttttctttctagttgagtaaatttttgcaggtgatcaccaatccgccagcggagcttcgcctactaagcagtgacaatgtcggcaattattcaatttatcgcaaaaaaaaaatcataccaaccaaatcagaccgacatttccatatatatatggtattatatattcaggtgtatgtgctggagcagttcgactttggctactcaaaattcgacacatttggcagtgaagcggggggcgctgggggtggcacaagcattggctccgatcgtttgttcgcgtaattgtcgaacaaagtggtagaatgcatttgggatatatgtgcttttcccagtcagttccctgactctatggaatttcccgctcttttcgtatcgcgcgttctcggtttcccgtacatctctcgaattcatccgggctgttagtgatctgaaaattttcaacactcgagaaccgggatcgagaattgactcacaaggagtcgagactgaaagcagaaaaccctgggaatttttgactcaagaaccgagactctcggacatcccatag

SEQ ID NO: 75874 - DNA, 558 bp, Heterodera glycines
atgagttttaaaatcaggtaagaacaaattttgttgcttaaaatgtgtgaaatttaaaaaagaaatttttttgcataactgaatattaatttaaaacataaattcgcggtttggttgagcccaacatcaatcaattgatcaatcaatcaaaaaaaatgaaacaggcacgccaaaagtaaacagtaacaaaacaatcgaaatgtggtgaaatgctatgggatgtccgagagtctcggttcttgagtcaaaaattcccagggttttctgctttcagtctcgactccttgtgagtcaattctcgatcccggttctcgagtgttgaaaattttcagatcactaacagcccggatgaattcgagagatgtacgggaaaccgagaacgcgcgatacgaaaagagcgggaaattccatagagtcagggaactgactgggaaaagcacatatatcccaaatgcattctaccactttgttcgacaattacgcgaacaaacgatcggagccaatgcttgtgccacccccagcgccccccgcttcactgccaaatgtgtcgaattttga

SEQ ID NO: 75875 - DNA, 891 bp, Heterodera glycines
atgtgcatttccgctatttgcattaaaattgtaaaacacaatctaaaagtgggtatttttcagtatttgtattacaattgtaagaaactaaaaatgtgtatttttcggtatttgtattacaattgtaaaacacaaactaaaaatatgcattttcaggtatttgcattaaaattgtaaaacacaaactaaaattgtgcatttttcagtatttgtattacaattgtaagaaactaaaaatgtgcatttttcagtatttgtattacaattgtaagaaactaaaaatatgcattttcaggtatttgcattaaaattgtaaaacacaaactaaaattgtgtatttttcagtatttgtattacaattgtaagaaactaaaaatgtgtattttccggtatttgcattaaaattgtaaaacacaaactaaaagtgggtatttttcagtatttgtattacaattgtaagaaactaaaaatgtgtatttttcggtatttgtattacaattgtaagaaactaaaaatgtgtatttttcggtatttgtattataattgtaaaacacaaactaaaaatgtgcattttccgctatttgcattaaaattgtaaaacacaaactaaaagtgggtatttttcagtatttgtattacaattgtaagaaactaaaaatgtgtatttttcggtatttgtattacaattgtaaaacacaaactaaaaatatgcattttcaggtatttgcattaaaattgtaaaacacaaactaaaattgtgcatttttcagtatttgtattacaattgtaagaaactaaaaatgtgcatttttcagtatttgtattacaattgtaagaaactaaaaatatgcattttcaggtatttgcattaaaattgtaaaacaagactaa

SEQ ID NO: 75876 - DNA, 1263 bp, Heterodera glycines
atgcttaacccgcatcctgatgagctcaaacagctgattgtggggaataagcaatcccgtgaagggaaagaatttgtgcgacacatgtcgcgttataacaacctgttccaatttgcgagcgtttctgctggcaacaaaccaagccctgctggcggtccgatggccgttattcttaacggagaattccatcgccgcataagcagcatgcaggctggtacaactcagattcctggctttggccagttgtacattctggacccagtcgaggctatggaacagcgtcgaaacaaccccaggtttactggggaaaaaatcacaaacgaagatgagtttgtgcagggtcaccagctaaatgagcagactcttgagatcttagaacaaatgatccaagtgcatcatcctgctgcgcaggcatataagcaggcgcgtgagcagctcactgagcttctccaacaacaaaatcaggaagagcttcgtttcttccgcatgactttgttggatagccgcagggctccagctggtcttaaagacccaaaattgcacccacaccaaataatcaccccatctacgggtgaagggatgttcgctattcatgcggaccccactggtgctcctccgcccaaaggaatttgggtagagaacaaacaagggcaattaaatgaaattgctcctttcagtccgtggactgatagtcttacgtatccattaatcaagccaatgggcgatgatggatacacaactggcattaaatatgctaagccaccatcgcgtaagcgaaaaggtgctcagaatgcatctggcctatttgactcggaagccgagtcagataatgagtcgtgcgagactcagtcaattgcatcatctgatgcggggtcagtcgcagattcagatgctgaatctgtagcatctgtttcatcgcagcaccggcggattgacaaatccaaacaatttatctccctgcgagattattgcaagtattatctcgcaataagggatgaaaatgtggagttgcaataccaccacattctttcatgtggtggaggacttggtcagcgctggatccttgaccaggctgcaaaaattgattggcaaatagcaacatttttgcgtagacctgacatggatctgcggatcagcactccaaaaaatctgctgcagtatttggtcaaccaatacaacaggcagcaagcacggcaaaaccccaatgcccaacagaaaactgttgatgacattggcagtgttgttcggctttccgaacacaac

SEQ ID NO: 75877 - DNA, 82 bp, Heterodera glycines
taaaaaattattaggggtttttagtccacatcgaggctcaagacgggcgcttcgcgcccgcttttcaaattttgttggcctt

SEQ ID NO: 75878 - DNA, 2278 bp, Heterodera glycines
atgatagggcgatcagtcgctgaatttggtgcagacgcacacagcggacagctgagaagggtcggaggtcggttgccgatcagtagcgacagctccgcagccaacacccaagtgatcgtcactccatcaagcaggtcagccaaaggtatccccctaaagttgctcgagagtctcgagcatagtgaagtgagtaaaattcatttattttttatgtttttgccttaactgattgaaaattaataaaaataaaagttcattaaggccttcttcacgacaggaaaacaaattgaaaatgaatcataagaatcagaaccgaagtgagggggacgacttggaattctgtggccacagaaagggcgagcggcagggcagcatgaccaattcaatcgcttctctgtcaatgtcgcccacagcaaagcgcaaattctcctccaaagccttcggccttaaagtgattaacaattcggattaataaaccaattagggaaatattccgtcgtcccctttttattctcctgccttttttggtccatcatttaccaaatttcgtccataaattccctccccctttcactcatttcgtcccattaattttcatcttggactctctctccgttaaagagtccgctgaaggcactccgttccgccgttctgtccaaaaagtcaaccgcctcggcgggcagcggcatttccacggaggagcctttgtcggcactgccaaaccatattcagcagttccaccagtcgtctcccactttgccatcctcggcaccagcccaataccggcgaaagatcagttttctagacaccgccgaagagggaggcgcactggcggaggaagaggagaacagacggtcccctgttgatcagaatgccaaagtgccgcccgacaaatgaccgaccgaccgatcagttggaatgccattgatgcttttcatttcactgtcaaagcataatgatttatttgctgtttaaattgttgttttgctctatctgtttgctttatcatccttttgataacattttattcgctgtacttttccagaattttaccgggaaattggtcctttgattttgcaaattatcttttcggctttattatttatttactttcaacggttcagagtccgtgcaaaacgattcgggtcaaaaacaaattgactttacccgcccctcccccattttttgttaattttgctaaatgagtgtagcaccttttaacggccatccctttttgtcgcttacaattaattaccttttgacacctgcacaacaaaacaagtttcgtttcactaattgaacaatcgatgcttttcgtggattcagctaaaatggattcttctatttaattatgggtcgtttcttcaaatctcccaaaataaatttgcaatggtgtgggcttttcgcgcactttttttcgtaagttttattattattaaaaaaaataatatccttttgtgttatttttagcttttcatttttctcttagccgtgccatcgttcgcatttgcaaaggcactttttccgcttgggcttgatgtctgcggcaaaagtcgcgcgtgttggtccacgccgccggggtgcgactcggctgccaattgccaagcggtaaatgccgcgatttaagggccgaattatttgtccattaatagctcatcgtttccagttcagattgtgagatggcgttatgagaaaagcaaattgcgagttgaaatgcaggtcaatctctccccaaaactaattattattaattattaattaatcggcagtttctcctttcgcttaaaataattttttttcattttgcattcttattttttattattatatttttattttaataaattcttttttgtttctattcgctttttactaaaggccaaaggcattggttctttgggtgcggcagcgcctgtcgccgcccaatggatggcacttggattcagtgacgacgcgcacatggcaaatattaattaaattattaattaattcattacacttttaagggaaatgatactgttttttcgtgtctttttggcaccgaaggtggcaatcgcgccgaaatttcgtacaatcaatggactgataatattccgttggtcgaagtgagtgaatttggaaaattaatatttataaatttaaataaattggcaatttattttaggcatcaaaacaaatgattagcgaacagacattttcaacgggaaaagaaacgaacggatgcgcaattagcataaattatgcttataaactcacatcaaaagatgagcagaaaatg

SEQ ID NO: 75879 - DNA, 415 bp, Heterodera glycines
atgtccgctaattgttatatgggcagccgtgtgctgatcagtgtttccatcggcgggacggcactgatcacttttgttacactgatcacactggtcacactgtgccgggacatcaactcgctgtacgacgagatcatttctgatcttgacgagttcaaggacattgccaaccatgcatggaaaacgatgatggacgaacgattagtgaagggcggcgtcgctgaacagtttgggagcggtgacgcggagttcgttcggcgtcagccgcgtcagtcgtacgcggacggagacgctgccgcaactgccactggcggcagtgcggcacgagtgagcagtgcgagtgccggtatttgcaaatgtgccagacagccgaacaactgccctaaaggaccgcaggggcccaagggacagccgg

SEQ ID NO: 75880 - DNA, 1472 bp, Heterodera glycines
ctcctcacccggccctccggggtcccaagacccgccgggccctccgggtctgttggccaacccggccacagagggcagcccgggaaggctggccaagcgggacccccctgggccggatgccgcctactgtccgtgcccaccgcgcaccggcgaagtggcgggcaagcagcaacaatccgccggtgccggtggataccgtcgcttcttccgcgcattccattcacgtcattgagaaatgggcgcttgtgccacaatttgatcaaataaatgtccgtccattaattttgcatttgtttcactaaaaattgtgataaaatggaaacaaatttttagtgattagtagggcatcaaaaaaaaaattaattaaataaaaattaaaaaattggatttatttttatcactaatcaataaaacatattatgtaattccattttccaccatatattttttgcatcatttgtatgaataaaacatattctcattcatattcgccaaatcaatgtaataaaatgaatatttctcaaatccaatgaaattaataataataatttttattattatataattgaaattccattattttagattatcgaaggtattttatttacaatatattcttgtatcataaaaaatgcaattgctaaatatgaaattatgtgctttttacataattattttctttttaaaaaatgaaaaagtccgcacaaaaactactgaagaaaaagttttcggtataaataataaaataatttaaaatatttttaaacattatttaattaacaaaaatttttacattttttgtatagtaataacaaatttaaatgtttgaaggaatccgtccaagcaatcttgaacaccattatgagcaacttctgttcaatgccgaactgagttcttcggaccgggaattgttggcccgtcggatcattgccgttcatttccatttgtcaattatggccaaattagcgctgcccaacgagtccagcagcagcagcagttcaaaaatgaaaaacaaaaaaagtcgaaaacccgaaaaatcggacggtggccctgttgattatgcacatgcatatcaaactatcagacaaacaattgagctcgtaagtgccaaagattttgtgccaatggaacacctatgccatttgtggcagttggaacgtttgtttaatcgccgatcggacaccgaagacaaggccagagacgaactgataaagtacattaattatcaccaagaagcactcgcttcgaaaaggctcaggcactgaatgccccggggggtcgggcatattgagcgtgctttcgtcttcccgtcaaacccgaaaatgagtgttttttaataaaacaaaaaataaacataatttttagagcctgtaattttgtaaaagtcgtgctcctgattggggaatcaggccaggataggattacggggattaaaacaccggttttaacgggatttataccacgacatcggg

SEQ ID NO: 75881 - DNA, 138 bp, Heterodera glycines
gtaattttacgcgctatttcaaaaattacacaggtaaatggcttttttgtatggtttatttcgagcctccataactcgcctgcatttccaactaatccgaacattttgttatctaaaaaaagattttgaaaaggagaa

SEQ ID NO: 75882 - DNA, 453 bp, Heterodera glycines
atgcaaaacagtcaagagcagcaacaacggcatcagcagcagcagcagcagcaacactcccaaaaagagcaaccaaaacagcagcagcaaaaacaacagcggaaacgcaagtgcgaggacggggaggagcactcggcacgggcggactccgttgccaccaccaacaaaatcgttgccgttgagcaaccgacgaaacccgtcgctgccgctgctgctgttgccgtcccttcgacaagaacaactcggtccagcaaccgaattgccaagcagtacacgcagaacaccagtaaaaccagtcaatctcctcaccaacagtccgcgaactcgaccgattgtcaatacgacaatttccaccatcagcagagggggggaggaggaacacaaaggagaagcggtggaaagagtcagcagcaggtgaaaggggaaaggaagagttgggacggcaaaaagtga

SEQ ID NO: 75883 - DNA, 260 bp, Heterodera glycines
caattataaatatggacacaaccatggaacaaccggctgaagatgttgaggacgtacagttggatttggggaagaaaaagaagaagaaaaaggcgaagaccacagaactcaaattgtcagaagatgagcatgaggaggaaaaggtggcgaaaagccgttaaatattgaaagtgatagtgaaatccaaattttaggaagtcactgcactcgccgaaggcgttggccgtacaaatttgctcgacgcaaaaaacccccgacgc

SEQ ID NO: 75884 - DNA, 243 bp, Heterodera glycines
atggtcttctcccacgacgaatggtttgtccaatgtgtgcccgccctgtgcgaacagcttgacaaacttttgctcctgtcccaacaccagcgggaagaggaaggaaactcatgcctccaacaacgacggaatacggacgacgacggggagtgtcatgtgcgacgggtgctgcgccatttgctcgcgttgaccacccgaattccgatgcggacacggcccaggactgaaatgggacttttcatt

SEQ ID NO: 75885 - DNA, 865 bp, Heterodera glycines
atggccaatcgaaatgcgtcggcagtttcaaaaatgctctgctgcaaaagctgggcaaattcgctcagctctccgctcattgtcaaggcaactttcgaatcgtcgattaattgtaacgcattaaccgcacattctgtggccgcgtcgtgcaaatgctgcgaagtgttgggttggctgagcacggaaagaaccgaacggaagaaaggggaacgagtgagctgaaaagagaaggaaatgccattcggagggggggagaggcgaaccacggcaacaggacaacgggggttcagcagccaagaagccaagcagtcgacggcctttattgaaaatgctaaaggagaaaaaaaaagaaaccttcgttcgaaatccattttcttcagacaaagaagtatccaaagagcacaaatgaaactaaataaattgtaaaaaacaactgacaaatttaaaaaaatgtaatcgctcctgggtggattcgaaccaccaacctttcggttaacagccgaacgcgctaaccgattgcgccacaagagcaacgatgaaacgtttttgtaaagtcgtaaaatgattaccaatttagagagcagtgtttccatatgcctcgccaattcttcttcgatttcagttcgtctgttttcgccaattttaagtttatgactgtataattcttcggggagtgctttaaacagtgcgacaagaacagtggagtttgaagatgaagtgggggaatcgaattggacgagtatttgagcgacgaggcctttccagtggaccacatggatgtacaagtcacagagggcggcactgagctgagtgataattgctgttgagtttcggcctaagccagcctcgatggagctaaaataaa

SEQ ID NO: 75886 - DNA, 1388 bp, Heterodera glycines
ctccatcgaggctggcttaggccgaaactcaacagcaattatcactcagctcagtgccgccctctgtgacttgtacatccatgtggtccactggaaaggcctcgtcgctcaaatactcgtccaattcgattcccccacttcatcttcaaactccactgttcttgtcgcactgtttaaagcactccccgaagaattatacagtcataaacttaaaattggcgaaaacagacgaactgaaatcgaagaagaattggcgaggcatatggaaacactgctctctaaattggtaatcattttacgactttacaaaaacgtttcatcgttgctcttgtggcgcaatcggttagcgcgttcggctgttaaccgaaaggttggtggttcgaatccacccaggagcgattacatttttttaaatttgtcagttgttttttacaatttatttagtttcatttgtgctctttggatacttctttgtctgaagaaaatggatttcgaacgaaggtttctttttttttctcctttagcattttcaataaaggccgtcgactgcttggcttcttggctgctgaacccccgttgtcctgttgccgtggttcgcctctccccccctccgaatggcatttccttctcttttcagctcactcgttcccctttcttccgttcggttctttccgtgctcagccaacccaacacttcgcagcatttgcacgacgcggccacagaatgtgcggttaatgcgttacaattaatcgacgattcgaaagttgccttgacaatgagcggagagctgagcgaatttgcccagcttttgcagcagagcatttttgaaactgccgacgcatttcgattggccatgcgggaagaagactcagaaaagtgtgtcaattatgcgatttaattatttgtttttctgattcaggctacaaaatttcactcgcctttacgctgaacagtccaacgcatttctttctgcgatggccaataatccccgcaagggatttggcgatttgcgaatgttggatatgcttttgatggccaacgattaccatgattacacggtgattagagggcaatgggatggcgtgataaacagcgcattgcttttttcagctgtgtgaaatgagtttcaatgtgtggtaccaattgtccgaacatttgtatcagtgcaacgaagccgagttcgatgaactccaaggcattttcacgccatatgtggaaaagtacccctattttcttcatttatcccacggctgcctttctttcctttcagacatattctttcgctctgcaaacattgtcgggtggagcccgattcccaagatttgcttgacaaaaattcggaacatgccgattttcggtcaaaggcacaagaaagtgttaaggacgtg

SEQ ID NO: 75887 - DNA, 744 bp, Heterodera glycines
atgtcccccctccgtttcttcgtcgccctttttctgatcactttggcaattttggccgggacccacggcactgttgagaactcagtggatggtgggccaaacatggcatcgccgattatccgtgaacgccgtaagttttattttattttattttaattgttgaatttaattaaaggttggggccatggcggcggaggccattggggctgaagaaaatggtggaagagataatggaaaatggagaacggaagaagcgataaacgatgaaaaacaagaaaaaataatttgtggtagaagaaaaaatgctgaactcttgttcgaataaagtttaaaagaatttcttattttttactcaaaatcgtcaaaaaatttgggctttgacgcaatttaaaatttaaatagtatttaagtcgctgatttctaataaatatgtaaaaaattcgataatgtaaaatatttttatcaccgatcatcaatcattaattatgatcatggttttagccaaatcgttgttgttggtgctgatcatgctgtaaaatcatggccacaagctccgcttcgtcaattccgctgatggcaatgcgcgcagcggccggtccgttgacgaaccgtcgcggcaattgcactcgcgcaccagcagcagccgaattgcgccggtgccgacgcccattggcaacaaatttgaagacgcgacgctttccctgaaaactgaaaaaattttaattttggttttgaatttttaga

SEQ ID NO: 75888 - DNA, 1709 bp, Heterodera glycines
atgttcgcctccgtgttcatgattttgttggccacttctgaacgtctgctacaaacattttcgggccgtaaaattgtcaaaacacgaaggtcagtcagtggctggcagaatctcgcgaatttgataaaattatttaattaatattaaaaaataattaaaaaggaaaaaatatgaattatctattttgaaaattaaactaaaattacaaatttctctgttattcatcagcagtagggacggacgcaaattttgtggttattttaaaataccaaaatgttattttaaaccttattaggattttttttatgtctttttgtccaatatttcacgtttttccaagaatttttagtccaaaaaaacatatttatttaaaaaaatcttatttacatattttggatatatatatataatattggagttttatattacatactttgtaacatttccggattttttaccgtattttaagtatatattttttgcgatttttcaataaaatttgcgtctctattcatcagtcgagcaaatcactaacaaaaaccagttgaaataaaaattataactaagaaaatctatggccataaattttcagaattttgcaaaggcatcggccacaagtgacccttctggtgatgtgcgtgtcatttgcctacaaaatgagcatttatttcgagattgaggtgatcgagattgccaactgtacagattttgaacggtgaatttattcggggaaaacaaattaataataaataaccaatgttatttttactatttctgaactaagtttacccattttagttggttttattttaaattttgggatttgaaattttttttagttttccaatgattcaaactttagaatacctataataaaatccacaggttcgaagtccgttcagcagtggaaggagaagaatggaaattctataggttttggtggatgttcgtcttcaggaatgtggtaggttaaatatgtatttttttaaatacaaattatatttaaattaaatatttatttataaaattcttaaatttttcaatttattattttatttatttattttttcatatttctttttaaattttcaatttatcatttttcaattttattttctcctctttgcttcacagattgatcacattgtgcccttctttttgctgatcatcctcaactttttcatcatccgtgcgctcaaccgcgagcacatccgtgccacccattcatttgccaccgctgccgcatccgcgtccgccctcacattgcgcggcagcagcgcatccagtgatgacggacgcgcgagtgccgccgcagcggcggcgacacggcgcgaaagtttgtgccaaaaaggcagtggtcgccgactgcaacggcacgcgctaaccttggcggaggacaacgcgcagaagaaaaatttgcgggtgaggaaatttaaaaaaaatcaattaaaaatttttttttattagaaaagtttccagaaaatttgaaaaattttcagcgattttttggaaaatttgaaaaaacttaataattgatcataaaattgtcaaaaagtttgatagaaaaatttgaaaaaaattttccttaaaatttagaaaaaaattttctgaggtttttctaaaattccgaattttgtacccagtgttcgggacgcattgaaaatttatatatatatatatatatatatttttaaactttttttattaaa

SEQ ID NO: 75889 - DNA, 858 bp, Heterodera glycines
atgttcacattcatttgcttctttatgcttttgatttcgccaattatttcagcacaaaactccaaatgccaagtgagcaaaaaaactaacaaattatttggttaattaatataattaagatatttttatttttaatgaaaaattttagttggatttttagtggcaaaaaattaaattaggtaaaaaattgccaaaattgcgacacaatggaaaaacttttctgtacataaagtaaagcaacagaaaaataaatgattttattacttcaacaaatcgctttttaattaattaaagatgagtttattttttaatttatcttttgtttcagtgtcctaaaaatgagcagcccggccaactgaagtgcaccggatgtgagccgagttgtgacaatcggaaccccgacggcgcgattttgcaattgctcatgtgactgtgtgaaaggatatttgcgcaacaaacagggaaaatgcgtgccgaaagaacaatgcccgcacaaaaagaattgaaagtggggaaatgatggagaactgatggaacttcaattttccaagtaaaaaaaattcaacatttaagtttttggggggttcatttgtcgagatacatttctttgtttttcattttataatagctttttttgatattcattttgataaaaaagtttttgggtgttcgttttgcatttaagaatatataaaaagttcaaatttaattacaaatatgaattttgtttaattgatttgaatttgaaaaaaaatattgataaaagatttttttgtccagtaacatcaaaaatcagcaaaatccgttctttccagcaaaatagaaacccttaggaaaatccattttaaagctttcata

SEQ ID NO: 75890 - DNA, 1762 bp, Heterodera glycines
gaaggacatccagccccagtgccgtgacactttcgtgcagtccatcgccgacccgtgcccacagcggcgggcactgtgctgtgtgctgtccaacccggaccaaaagggcaaaatgcgccgaattgactgtttgcggcaggcggacaaagtgtggcgcttggacctggtcatggtcatcctgttcaaggcaaacaaaatccttcgggaaaattgagaatggaaatgccaaggagaaaaaagccagaaatggggaaaaattggcaaaaaaaaacgaaaaaatcgggggcgaggggttaaattgggcaaagaaaatgggggaaaatccaaaaatgacggaatatttggcaactccccccccccccaaaaaaagaggattagatgagttaaatcaaaaataaaagggccggaaaatgagttaaaccccaaaaaaaggaagaaataatttggcataaacccccaaaaattgaggaaaatttttctccgagcgatttatacaaaattaaaaaaaaaaaattttttttgaatttttagggcattccattggagagcactgacggcgaacggctagaaaaatgcggcacatgcaatgtgagtgagaagagaggagggcattaaaattagaaaaatttgcaaaaaaaaaaatttttaatttaatttaattttttacaaaaatttttccgcagtttcccaccctttgcgtcaacccctaccacatcagcatcgccatccgcgagctggacctgtggttggccaactacattttcaccacggacccggacaagccggagacgcggcgcaggcccaggggtacgtcgcgtcggtcgcaaacacacacctccgaccgaattggaactcacaaattttttttggcatttttcaaaaaaaaaaattcattttgtttccagatggcttccaagtcggagcagcaaaattttttttgtatataataagataaaaatttcccaaaacaaaaacaaattttttttttgtacttttttgaaactttctgaaattttgccgaataaaaattgtaaacccaaacacatacaactaactatcggtcgaactttcccaataatgtttaaattttgttgacaaatataaaaaattttttgtttcaaaaatcgtcaaaaattttttggggcccctttcccaaaaatttaaaaaaaactaaattaaatttaaaaaaatatttttttttacactaaaaaaatcatataaaattttcctaagttttttttgttgaaaaatttacatttttcttttttctaaacatttcctgctgatgcggagggggacttgcattattcccctcataaacaaaattaacttttcataaaacaccgagagtctcgagacccgggatcgatctgatccgatggcgatatccgtccatttttcagacaaagacgacgacaatgatgacatcgatgatggcaccgtctccgacgacagcagcgagggcatctggggcaccggcgtgttcagcgcgtatgagctgaagaagttgcacaagccgtccatcatgtgcagcagcagcgggcgcggtgccaagaccgccgtgccgttgttgccgaacgccgtcgccaccacgacgacggcatcgtcgtcgtcgatgacggcaccctctgtcggcgccaccgtctttgttggtggcggcagaaaagcgtcattgacagccgccggtggcacaactgttgctaccaccatcgtgccgctcggtagcatttgggggaaaacccagccccaaaaatgggtgtga

SEQ ID NO: 75891 - DNA, 662 bp, Heterodera glycines
atgggcaaagccgtcgcagaagtagcggagccgatcgacgcactttcgggcggaaaacaaagcgaagaaaaagcggacaaacgccaaccgatgcttctccctttggacgctctgtttggcgttttaagcgcattggacccccaaatgatcggacggcactgtgccattttggaccgattggagtcagtgatcggtcgccaaacactcacttcagtcgcaaatttgcagaaacgaattggtacctctgatcatttggcagttacgtggcagtgcgaaacgctcggaaatgaatgaaaactactcaaaaagaattggcatgcaactgatcggcactctgaaaagggcgggcactccctctgcgaccgattgtcgtccatcgggcattgttcctgtgtcaatggcactggaggggccagaaagtgcccactccttctatcagtttgtgccgttcttcaccccttcccaattaatcccatctcacaaatcagagtcattgaccaattgctgcgtcttttgtctccattggcactttcattgcctcaactttcgtcagactctgctgttgaacttcttccactgcttgaagaattgtggcgttgtgctttgctttcgccaaccctctcaaagcgttcggaagcgcttcgattagccaaacgaataaa

SEQ ID NO: 75892 - DNA, 1049 bp, Heterodera glycines
atgccaaaccatcgcaccgtcgaagatggcactggagttttcgcctcttccctcgcattgttggcattggcacttagacggaaggtaaagcaaatggcgtcccgaacctccaacagaacggaacggtcatttgccatgaacacaaaacacttgcgcactctttcacccttttctgacactttggcaacgaaacagaaaaaggaggccatttcttaattcgaaaatattacggggcaagcgaaggggggggggaattagaaattggggaatggggaaggagggaaatgaacaaatcgcctcaaaaaggaaaggacaaaaaagggaaaaaagaaggacaaaaaaggaaggacctgcctcggagccaagggacagcacagaaacatccgggatgagaaaacggtgcaaaacgcgggaggaggaggcgtcgatgagaagaatattgcgagtggacacattaagcataacatcggcattttgtacgcgcacggggccacgcaaatactaaaggaaacgagcggagaaagggaaggcacgggaagggccaactgagcaaatgccgtcaccagccaatttggcacggcttggccccgcctcgtcaacgaccagtcgaataaagtctctgaaaattgcatttgttgtgccattgttgcaattacgtgccttgtcacttcggtttgtcgttcgattggcagcgaattcagtgatttttcgaccacaacaaatccgacaaactgtcaaaaatcggagggattgaaaacgaaattgtttctgctgatcacccgaatgtaaaaagtgatgccacttttctgcagctctttctccgtctctcttaaacacttcgaatcgatcggaagagaatccatcggcggaagaacgcttttttgagctttgaaattagattttgcagtggcaaactcagcctttcatcacattaaatgtgcaaaaagagagaagggacgcaaagaaggaaaaggcaaattgattattaaataagtaataataataatatttagatagaaaagaagaagcttccccgagaggaagattaa

SEQ ID NO: 75893 - DNA, 742 bp, Heterodera glycines
atgcgtccgaaaatgcggaggtaatttgacacacaaattgccacctttttaataaaattgacaaaattaaatttcaaatacgtttaattattatatcatttaatagcatttccattcgaccaccgccgatttttgggtcaaattttggccctattttatcactgccattgccttttatggccttctctccgtggcgtggattttatggaatatttacgcttatcgaaggcttggaattttaatttataaaatatatttaattacatatttttgcgattttagggacctctcaagcgcacggaaagggcaatttgtcggccgattgcacgaaaaatggtggaaaacaattttaattaattttaattttagttagttgaatttaaaataaaaaaaaaatatttattttacaaaattcaggcgtcttctgagcgtttacgaccaaatcccacacaattcgaaaagtgtcgcctccgatgccccgctaattagcgtcgaatgaccaaaaaaaaacaaacaaaataatggtaaaattaaaattaaaaaatggtttaaatgattaatttttcagttttggtgcaccacaatttcgtttcgtacggacatgtgaaaattattttgtggagaaaattgtgcaaattttgtttttgtttttcttgtcaacaaccgatgaaaatgatgagcttcatttgtaataattaataatgattcattcaaattatttaatgttgaaataacaaataaa

SEQ ID NO: 75894 - DNA, 237 bp, Heterodera glycines
gttttacacagtccccacaaaatttagtttaattttggggggttaaaaataaatttccaaaaataaaaatgaaattgaaaatgctcttcaaattttttatttttgaatgagtcgccgaaagggaaaacatttgatcaatcagaagcaattatttatttatttatttatatttgttaatgggttggccattgccatcggacaatcggagaagcatttgaacagcagcagaagaaaagg

SEQ ID NO: 75895 - DNA, 698 bp, Heterodera glycines
atggctcgaggccaacagcgcgggtgcattcgcttgcgcggcgcggcgcttggcattgacgaggaaaacaatgcccaattcacaattgcagtggacggcaaagtgtttcatttgcaggttttcttatttatataaaaaaattactaaatctctcctttttgatcgttcgtttgaggtttaaaaagttctctttttccaatgaaaatccccattttaatggagttttttggcaccgtaaaatttgaatttgcattcatttaccctgtttcatccatactcattttctgaaatgtgtctaacattcagtttgacagtctcataaatattggccttttcgcaaaccgttgaaattaatatacaagcgtggaatcattttaaagtttgaaattttgcccatcacttcctgttttgctaacccaattgcaaattgagtttttattacctatctaatctggaaaccacgatgttttcagaattcctgaattttggcgaaatgcagtatcactggttagaaaccacggcataatgttttttttcagggcaaaaaccgggccgagcgtgacacatgggtgcgcgtgttggagcgcgtcattcacgagaagtgcggctactacaaaccgccccaagaggacccgttggaggaattgcgcaagcgagtgattatcgcggaaaaccagtcgcaaacgctgatggaacag

SEQ ID NO: 75896 - DNA, 1991 bp, Heterodera glycines
acgcgcaatttggagcaaatcaccgcccgcgagacggacaaaacggaccaaaagcgtaagaaaatgctgacggaaatcattgcgaccgccaagcgactgcagagcagcgtcgaccattcgtccgttctgttgcggcaagtgcaacgcgacattggcacatcgctgacaatgagcactgatcagcagcagaagagacggactgctgccgataaagcaattcgatcaccgacgacaatggcgacgacgacgggcacagcaaaagcggcaatgacggaggaggacaatttgaatgggaatgaggacggagagggcggcaaaatggggggcggtgctggtggaggaggaccaccacaattgcaacaacatcaacgggaacggcaggagtcggaggatgaagaaatgtgcccaattggcggcgggagcaacggcaaggaggtcggttagcggagcggatatgtacattgtttgggtcataatttcaataaaagtatagggaaatgggtgggacacctacagccccatttgatcgacatctcttgggtttccattgggattcgtttccacgctcttgagtcttggtcttgactcggtttggtattccgagtctcggaaatctttcattctcgagcagatcaatacctcttcatttcctttttctagcttttgattaaaaaattttcctttttcgtgtacagttctaggcataattacagtcatgttaaaaaactgctttaaaatccttcaaaattccatgtgctttgtctgcacgattttccgcatttccaaccaaaaatgtcctttttttttgtctggctaactctctgaagtctttattgtcgtgtcgttgtacaggacgtgttaaacctggacgaggtggtcagctactccagctcggatgacgaattctacgacgccgccgaggaggacgagcagcaacagttgcgccaccattgtcgttctattggctcggctgctgcccttggcctgagtggacaaaaggggggaggtgaacagcagcgcaaaacgtcgaccgactcgcccaccgtcagcggtcagagcaatgccgcacttcggcgcagcagcaaagacttatttaggtgaacggactgaacatggtttttgcagagagggggggcacaggcccgtagccagggggaagggctggggaatttcactttgtttggggggagaaactatataaaaatggatgcaaattcaaattttgggccttcggaccgccaaaaagtgatattttttccttgatttcatatttttccgggttctcacgggtcgatttttcagaacagcggcgcgctcccacggtggccctgcacaccttcggccctcctcgcttgttttacagcatcaacagcagtcggaactgtccgattggggccaattcgatgccaagggcaccgactacgacgcaatttacaacaacacgcatgacgaacaggacattggggacatcaacaagcaacatggcagtgtgctcatgcatttgttgtcccaggtgagagaattttttgtgaatttttgggccgaattttcaaaaaagtcccggaaattttcaatatatatccatccatttttaaaaaaattttacatttcgcatgtatgggaaattttctcctcctcattggttacaatatgaaatttatctttagtattgggaatcccgaatttactaggtttttggtctattgtaggttgtacaacaagactacaaaaaccttatttatttgacattgtcttcatttcccttcgctttttaggtcagtgtcggcatggacttgacaaaagtgacgctgccaactttcattttggagcggcgctctctgctcgaaatgtacgccgactttttcggtaagtatttgaattttctgttggcttttcatttctaagcctttttatcgaaaaataaaaatttagcgcatccggacgattttatcagcgcggtggacgaggattctcccgaaattaggcgataa

SEQ ID NO: 75897 - DNA, 490 bp, Heterodera glycines
atggataaatttgtgatttttcggcgcaatgccgctattaattcctgctttttggttccggcgctgaaggtttcaaaaataacacaggtgccacaaaatttttttggcccggagcaaaaaaaaacttcgggtgccctcacgaaatttttttctgtatacgggcctgaactcactcgaccacccagaaaagtgtgttcattgtcagatggatgttgcgttgcttttggcacgttccggggccagcatcgaaaagaagaatcgccagaacaaaacgccgattgatttggtcgacggcaaagaacagaaactgaaactgatcaaagcgagtgaatcggtgaagccaactgccggaacatagccgaattcctttgttaaatcaattctattgtttttcaatgtaattgtaatgaatcttttgatttcacttgaccaattaaaaattctgaattattgttgagttgcatttttcgctgacattaaataacgccaa

SEQ ID NO: 75898 - DNA, 1153 bp, Heterodera glycines
agtgccaccgatatcttcagtcttctggatgccattgacaaattaaaacatttaaagcggactggtttgtttgatttgtattgcattcatctcttaaacgttttgcctagccttggattttgtgacatgcccctaaagtaaaaaagtgccaatttttagaaaacgctcacattaatcatttcaaacaaaaatggcaatttaaattttcatcatttaaaagttttaagaaaactgcctttgtaccaaatcatttctcatttgttaaaggttgggttctcgtcggcatttcggagcccgagacagtcgcttcccatatgtatcggatggcaactttgggtttgaaaaattatcgtcgatcaaccaaacggaaaagatacgttaagcaatgactttgtcggcgcaccgaactgatttggacgtcaacaaatgcattcgaatggcattggtccacgacataggcgaagcgattattgggggttattcagtccattttcattttttgaccttcgccccccccccacagatattaccccccactgcggcgtatcgaatgaagaaaaattcaaaattgaaaaagaggtatgtgcagcaattgtaacaacaacattatttaacagatccctaatttgaggctgttgagactatttcgaattggttgcccgaaacggtgggcgacgaatggaaaaacctatggagagaatacgacgagggaaaaagtgcggaagcaaaggcagtgaaacaattggacaaattggtaaatggtgcgcgaatgcgacgaattcaatctgaaaataaaatatattttgaaaacaaatccaccaaaataaaatcattttcccgggtgatggcaattaacaccgttgcgtcctgacaaattagcctaaaattgaaaatgtagcgaaaaagctgcgacgggttgccggataaattttgagcattttcatctgcgaacccatttcggagagaataatcatttcaagtatttctgaattttgattttgaggatatgttggcccaagccttttcctacgaaaaaaggctctccatcgatttgactgagttttttgatgcgacttcgaatgccttctccgaagagccctttgcgagttgggcagctcaaattaggctgggacgcgaacaaaaaacgatgaca

SEQ ID NO: 75899 - DNA, 1485 bp, Heterodera glycines
cccccccccccccccctttctcccttactgtgacccttcccccctccacctctccctgtattcctttcatcgtttctcatttctcagccctttgcccggcaccggcaccatccgttgggccttttttgagccctcccgcgtgtggtcgcaggccgacgagcgaagtgtttataatgtgcgaaaggttccggttgatgtggtattgtccctgctgatgctctcgcgcgtttaccttgtctgccgttggcaagtgctgcacagcaaacagtttcaggtgccgttgtgtcccaaattaggctctttggcattccatccctttgcttttggcattttatccttttgctttgacatttcgtccatctttttcaggatgcctccacacggactttggctgccctgaaccgtatccaagtcaacttcgcgttcgtcctcaaaaccggtccgtctccgttcgtccgttgccttttcccctggtcattccccaaatttcgtagtgctcgaccagcgtccgatgtttttcctgtccatttttctgttcgtcttttggctgatcactgcttggtccttcgcccaatgcgaacgctttggccgtgacgtggacgaccctttcattctgtacaccaacgccctgtggttcatcgccatcactttcaacggcaacggatatggcgacattgtgccaaagtcattggccggtcgactcatcgccattctcgtcggcattagtgtaagtggcacatttttcctctctgttgtcagggatactttattaatgttagacactctcatactgtatcggatttaaagtggcagcataatttcccttcctttcggtcgaaatacttatttgctaattaaataccttaccgtatcagttctaatgagagcaacaaacattcctttccttccgggatggatactgtatgtgtttgttccggctaccgtttcttacagtgccatcattttcctcgtcctctttagggtgccgtcatttcgtccattctgatcgcagtgatttcgcgcaaaatccttctttcccaaggccaaaagaatgtcaacaatttcatgaacgattctcgactgacattggcacataaacacgcggcggcacgcgttttgcagaagacgtggcacatttaccgctgtttgaggagcagtgacgcggccgaccatcagctgagacggcaccagcggaagtttctcaacgccatccatcagttcagacgcatcaaaaacaaaatacgctctttcggggagaacggttcggcaacggtgcagcaactcagtcgggtgggcaatggcacaaaacggggcttggcaaaacgtacacaaaaaaaggaatttgatttaaaaagtatgtccctttgcttcctctcgtccttcccgagaattgcgatgctttttcttcagctaatgaccgaaatgcattcgcacactcagcgccttgcgctggcccaagaggaaatgcgtgtccaaattgagctg

SEQ ID NO: 75900 - DNA, 1353 bp, Heterodera glycines
  unsure (1)..(1353): unsure at all n locations
aaaaggactctctgttggatgcccgttccgcgatgccaaccggcaaaagacccctcttttatttccatgtccgtgccgaattcttctcattcgccggcactctttccaccgcgcacactctgtcaatgcctttcacaatcgctacacggcggaatcaggcaattaattaattcattattatactaattaattattaattgactaattaatttattctaccgtaattcctaaaatagaaactccggggcttctatttttcaatcccctcctccctcgaaaggagacttcttttcaggggggggcttttattttaggaaatacggtacactattttttctaacgatttttcaaaaacttttttctttgcaagattttttcctttaaaaattttctttaaaaaagtttaaagatttttttttggaattcccatttcctgggattttgttgtttttcataagaaataggccgccaaatggttcatatcgcacacataatttgttcttacctcttgaaaacatgtggatttcgccgtgcccttgcctattccgtgtacttaaatttcgcaaaactcatgccgagactcttgacacttcaattagtcacggtttgggttccctgattttccaggattgccaagtgcagcggatgatgtcctcctacacggccacctgtttctggctttacggcaccaatgtgttggatggtttgctcatccaatggtttgatggaggtcaattgattagttattaattaattgatcaattatcgtaattattaatggaccaattatcgtaattaattgttaattggtcaattaattatccctaatgaattaattattttcaaaaaattgattggagatttattggttaatatttgtttaatcaattaattttcacgattagtttaattaattattgatttcattatttaaataataataattttttcagttcattaattatcctcaattaattaattgttttcagaaattgattggaaacatttcaagctgctctattcactttactttncnatnaatnccnaantcaaacnnacattcactnacnannacttcaccattttncancacaaaatccactnccccnaatncantcaanctncccttaaaaatacccaattatttttnaatttttccattttttttttaaataaaaaataattttccctaatttggagacaataactattttaaaaaatnatctnaatnaancccaccaancaattcnccancananatnctccctttaaagaggactaatttaccctcaaaattattcctaatccttgttagaaaaaaaaattttttttgaaatttcaaattttttcgat

SEQ ID NO: 75901 - DNA, 65 bp, Heterodera glycines
atgaattctagtcttatcggtggatcactcggctcgtggatcgatgaagaacgcagccaactgcg

SEQ ID NO: 75902 - DNA, 2533 bp, Heterodera glycines
tttcagtatccctgcaaattttgctgcgcttctgatcagtttctgaaaaaaaagttaagcttaacatcggttcagggggactgccccgaaaacccaaaaaaaaattgttttgaataaaaattatttaaatgaactgactagataatatttaaaataggttatttctcttcctttcaatatctttgcaaagtttgctgcgcttctgatcagtttctgaaaaaaaagttaagcctaaactttttggcctgtttaaaaaggaattaaaaatttttaaaaattttattcatctcccttttcaatagaaaaagcatcagagtgcctaaactaacatgtaaataaaatttggtgcgtttcagagcattttctggaaaaaatatttatgaattaattatgcaaaaaataaacaaataatgaactctcttccttaataattttcctgcaccgaaggtactcactcggccgcttcgcggcctcgtggtgggccttccccccccccccctcccacgcccttcagagcacgacaaatatttcaacaaaaatttttaaaaattgactagagcaatcgaacgctaacggacgacctaatggaaaaaaatccccgaaggagagaatttaattaaatccattccttcgggggaccgtgccgggtgccgcggggtaagcagtgctggttcgtttcatcacggcaccgaaccttttggctagtcagcaatcgttgcttaacttgccagatcggacgggtgcgcatgattccactgttccaagcaccccaccaaaagcaaaacgatataaccaaaatataaggaaaaattttttaaaaaattttttctccatcttcctttttgatattaaagcatcagagtgctaaaattaagttgtaaataaaatttggtgcgctttagagcactttctgaaaaaaatatttatgaaacaaaaaaatcgattttttcaagtgtccatttggggtactcaaacatttatggggagcaaaaatccaacgcagaaattaaagttcaggctatagggaagctactcctgaaggtttccgtctccccataaatctgggcgcatcagctcggggggcatgcccagaaaatattaaactcaatttcttcaagtgtccgtttgcgatactcgtacatttatgatgaataaggctccattgcaaaaccatataagtttagatgcggaagataatctagttgtaatcgatttaaaaacttattaaaaagtcgcagcattaatattgcacaaaagttagaatgtttgcatattttaatttataacatttttacatgtcggtatatctttgcgatttttgggaagctgatagagcttgttaagagctttcgaatgatatcaactttgttggatttggtcagtaaagaaaaaagttaggatgctctaaacttggctcagactataacgaccagactatagtgtcccagtccgaacctcacaacaattgaataactagagctgtcccagcagaacaaatgcccaaccggtcgggactgatctcgaattttaccagcggctttttcagacccggaggacctatacctcttgtcctggttttctccttttttcctaaaaatttctcaaaatgcaatgcaaaagctaattttttaaatttgcaaatttaaattatctttttagttttccaatgaaaattgtgtcgttgtgccgtttttgctttttccgcgacttttccttgcaaattgtcagtgaggaggtggcgcaacaaattcagcaggaaatgcgccatcgcaaaacatttgatccgccgtcgccagttcgaaagtgggcaaattattctcagaaaaaatgttttaattccaattaattaaattatttttttagcaattaataattattattttgtaaattattttagaaccccttcggccgcacttttggcaatgaagccggccactggggttaagcgcaacaatgccaaagcatcggagggtaattaaaagtctgaacttatacgagactcggacggaaccgatacccttgcaaagaattccgagatttttctcgagtcatgagtcgcgcgactcgagagtttctcgaaaccggtttcctgagagcgagacagactccggacaagactcctaacaaattccggtgctcgagcctcaagtagagccatttctcgactcgagaccaacattgagactctagtcacgggtcgtgatacgagagtctcgagaccgtttaaacctgagagtgagactcaagacaagactccagaaaaatttcttttctcgaacctcaagtcgagccatttctcgactcgagaccaaaaatgctgagattcccggacctaattttgcgactcgtgaccaaaactaataatttatgttcgaaattttttttttttttttttgcagagggtggtaacacagcgcacaaaaagtcggatgtgaactcgcgcgagtgcatttccattccgccactatttgacgctgaacacaacggatggtgcgccacttatcctcatcttttgtgtacgacgcgccaaaaa

SEQ ID NO: 75903 - DNA, 1339 bp, Heterodera glycines
atggcaataaatttactatttttcaaggtaaaaaatttttttttttttttagaaaaattaatggcaaattttaggaaaagcatgtcctttttaatgtcttttttttaaattttcaagtgcttctgacttttttagtaaagagttttttcggaaaaaagaaattttaaaaaatctatttaacagttgaaaattcgtcattttttttcttgaatttccaatcaaaagcgaaatttttcggttttcaggaaaaaatccacgctcgcctggttgagctggtgaacaaagcgcatcggatgcaaccgcctccgacggttcagccaaatgatcaacaatttgagcgattttatcaggtagaagaaaaacagataaaatgttacaaaaatactttcgaaaaaaatgaaaatttctaaatttttattgctaaaaattctcaaaatttcaaagtccggcctggctttcttgatgcgattcgatttttttttacaaattcaattttttcggatacatgccggattttagaaaaaagtttcccttgaggctgggatttcttgggttttatttcaaggggcggcactaattcagataagggccaaatttcaggaaatttacggcattttaacaagaaaccattcaaggtttaagaagagtgtccatgtaattacggtctctaattaccgtactatttatacggtaaaaatgcaaattgaatttttcttttttgtccaggcttatgtaaccgcgttgatttcgctacacgaattgtacacattgtgccaacaaaaatgcttaaccagtgccgaatttgaagcccatttggccaatttcaagaagcaattagtcgccgcgctggcgcttcaacgcgatttctccaattgcgtaagtttaaaaaataattatttatttttgcatttttaaattgtttgtacagcacggcaatttgttgtggcgaaagttgcgcgaacaccaaatccaccgtatgacgcattacggttatgacaaccgtaccttcatggactcggccctgtccttctatgcccacatgctgtacaatttgggcgtgttggctgcacggatacaggtaaaaaaagaagaaggatggcatgccaattggtcataggtctcccggacaaatgcatttgtcaattagtgatatagtatcccaaaaacctattaccgtatcttattctccacatggaaatttcttttttttctactaaattagcgcacaaataagggtagaattgaaatctcattgggatgtgatcaccaatgtttatttgatcactaagtcatatatttcaaattgaattatgcgccaattcaaaaatgaacaattaaa

SEQ ID NO: 75904 - DNA, 258 bp, Heterodera glycines
gtccaggcctggatccaggtctcgaggagcctggatttttcctggacctggatttttgtccaggaaatccaggtccaggtccaacatggaatccaggtccaggtccaggcttttttcaaaatgtcgatctctagtaaaaacccaatttccttaattacctgtctcggaaaaattttttcggcatccgatcataatataacaagagcagaagagaaacacgtacaaccaaagtacaaaaatcgttctgagacaagaaaa

SEQ ID NO: 75905 - DNA, 289 bp, Heterodera glycines
attttctaagaaaaaataggagttttgggggcgcggcggtgccgataggcgccgccggggaaaaaaattggaaattttgatcatttataaacagtttttcactgaaaattagccaatttataggtaaaattttgaaaaattttatgggaatttaatccaattcttaggggtgtaaaagtcgcatttcgcgccaaaaagcgaaatgcgaaaagcgaaatgcgaaacgccaaaaaatgcgaataatgcgaaaggcgaaatgcgaaaagcgaaacctcggcccatccctgct

SEQ ID NO: 75906 - DNA, 2316 bp, Heterodera glycines
  unsure (1)..(2316): unsure at all n locations
atggcatcgtcactaatcattggccaaatgcaacaaccaacaaatataaatgccaatgccaacaataacaatttcaataataataacagtaataacaacagtgaatttgcaccacttcacatggaaatgtttgattttgtgagtaaatttggttttatggcgtcagtcaaaaaccatgaaaagtcaaaaaaatcatcaaatgaataacatttttcatataactttgctcaaaatcaaccaaatttttaattctttatatcattcgaaagcgctaagcattttctattagcctgcaaaatttcaaaaagtttcattaaagttcaaaaaagttatgaccaaaattaaaaaaaaaagttggtttttcgagttcctctggtcataactagagctcgcaaaaaaaaaggcaccaaaaatcgcgaaaaaggcactataaggcaccaaaaaattgaaaaaaaggcataaaaaaggcatttaaaattctttattaaggatttttagggagccaaaacacgtaaaactttaacaaaaaaacttaattttggtcatttaaatgattattaaatattttataatgttttcgaaaaaggaaaatttttaaaataaaattttttatcaagaaaaaaaattaaattattttttgagaaaatttttaaattcttaggggtgtattttcccaattttattgcattttaatggaatttttcgataaaaaacgctaaaaaaggcaccaaaacggcaaaatgccaaaaaggcatttaaggcacgaaaatcccgaaaaaaggcaaaaaaaaggcataataaaagtcaacgtagaagcctcaaaccaagtggaaaatgcgttatttatgcttaatataccgaaactagtgcgcagaaaaaaaggcttatgcctcaaaatgcgagctctagtcataactttttgaaactgaatgattttttttgttcaaattttgaaggccaatagcagggatgggccgaggtttcgcttttcgcatttcgcctttcgcattattcgcattttttggcgtttcgcatttcgcttttcgcatttcgctttttggcgcgaaatgcgacttttacacccctaagaattggattaaattcccataaaatttttcaaaattttacctataaattggctaattttcagtgaaaaactgtttataaatgatcaaaatttccaatttttttccccggcggcgcctatcggcaccgccgcgcccccaaaactcctattttttcttagaaaatggcccaaaatcgcaaaatttggtaatttgatgaaaaactgttctcagcggcgcgccaaaactcttatttctcattagaaaaatgataaaaatcacgaaaatttgatcattttttagtgaaaatctgtcaacaaattntaatcaaattttcaaaaattttcccggcgggcgcctgccgggcgccgcgcttgcttggcgcccctgctccctcttcccaaaaagtttttttggaaaaagcgcgcctcaaaaaagcgttttattgatttttaaatttggaataaaatttaaaaaaatgatttttgctttatgattttaactattaaaaagttgtagaaaaaatttcgcttttcgcatttcgcattttcgcaaatttcgcttttcgcatttcgctttttatttttcaatttggcccatccctgttatataccgcataaaaacagtcagagttgcttttttgctatttttgtgggtttgcctcctttttgagggtctttccccaatttgactcattttaattgcccacaatttgaccatttaaaaaatttcccttcaacatataatcaagaggcgcatttttattatataatgattattaaattattttttaaaatatattttaatgagaaatgctttaatatttttatttcttaagggtcattatcagttccgtcgaatggcattcttcacaattgcatggcaaatggtcatctgtgatttgatgactcaaactgtacaaatcattgtggctgtaccgataacttttacgggagaagcagtgagtttctgttatgacaataattaatggctgattgattaccattggtaccgttttttcaggtatacggtcatccgttttggtattatgccgtgcttttctttgatactgtagcgtacaatgccacattacatttttccgcgcttctcacatccaatcgcctttgcgtgttctttgtgccgcggcttaacgcttttctcttctcataccctaacattttcgggtacagtaagacgttcggaatacgaaatcaataaaactagaaaaatcctcaaaatttttaaaattaaa

SEQ ID NO: 75907 - DNA, 367 bp, Heterodera glycines
atgatcccaactatttttggttacatcgccaatgattgtgagtacataatgaatgtgattaagtgatgacgcatctgatcgctgatcaaaaagtgaccgaatttataaaaaaacaaatgcccaaaaagacggcggcaaaacatttgatggtattttaatgtgccaaaaattgaaccgacaagaatttgattttcctggataggctcattatctcaatactgtaataatttacagttagttattatttaaatatttttttattataatttgtctatatcggaaaattgttttacgttttaaattaaagctaaaattaacagttaaatattaaaatttatttattttagtaaatcttctacagaattaa

SEQ ID NO: 75908 - DNA, 380 bp, Heterodera glycines
atgaagaaatccgttaccgtcgctgttcccgaacaaaaagaaatcaatcaaccaaacgcggaagtggagccaccaaaatcagacactacaaagaagcgcaaggtggaggaccaggaactgtggaaattggcaaaagggaaattcatgctcgcgacgtacttatgcgcaggttaaattgaaatattaaatttaaattttattaatttaataaaatttatttagacgactgggaccgactgttccataatcaacagaaagtcgcgcgcttggaagatggccgttttgcggtgtgctttgagctctgtgaagaatgcgtgtggcgcaattgtcgcgcaaacgatctcattgcctctatgaagaaaaaacagaacaatgcatga

SEQ ID NO: 75909 - DNA, 2489 bp, Heterodera glycines
atggcaaataaatttttacttgtcccacaagaaatttatcgtggtctcacttccatgtccaacacgggtgacctaaatctggatgctgttcgacatgatttagaccgtgcaagggccgagcgaacacatcccagtacaaaaaatgtccattacaatcaacagcttaggcgatacttgaaaatgaggagggaacttgaagataggccagccaaagttgagctgacgaaaggaataagtgtactgctaaggaaaggcggcgaagatgaaaatggagaggttgtggacataccaccacgacctcccgctccaccgccaccaccgcctgggagacgtcctcgacgtggtcctagtcctcccgctcctcctccaccaccaccgccggctgggagacgttctcggcccccacccattcctccagctcccgctccgtacccaccaagtcctccacctcgtccagaacgtcctcccagaccgagtagagctgctgcgccttctcggagaggagatagtcgtttggagcaatggcataaaaggcgatctgatatacaacgacaacggccaattgtgcgggaccttcttgcggaagcagctgctgctccattgcccgaaagtgatgatgaatatgattatatgcttgagagtgggcgctgccagcgccatcacagtattatggcgatttgcctgcgctgcccgacaacgcggacgaaattgaggagatggacactgctcagcgcaggattgctaccagaagaaaattaaaaaaggacgagacagattatgccgatttacaaggtaaaagacaaaggatctatcgcccttcacctcctcgactcccacttcctcctcgtttgaaaacaaaagctggaccaaggcctgcaccccctcctccatctccacgacgtccttccgtcaagttagaaaaaaaagaaccaaagttgatggaagttaagccttctacgttaaagcaagccgaccaccctactccagcgcctcgggcgaatcgagagccaatgtccgggctcgaccctcgaccatccacatctagagaagccggttacttccctcccgcgacatacaaaatcgagccaaaacatgaaccgacaaagaggcccatgccttaccgtatcccgaaaaaagagccaaaaagtaaagaaaagccaccacagacgcagcagcagcagcctcctcctgctgctgtcgtcgaagaaatgccctatgttcctccgcctaggagggggaccaaacgccactaccctgtaaatggtgatgatgaggtgcgcgtaagaaaacgagttaggcaaccgaggagggtaagagtacagtactcgcccgaaccgggtccatcaacatctgcacaaagtgatgaacaacagcaacaacaacaacgtgaactgtttgccattccatcaaatcagctgaccatgcctcagcgttcggaacgactgtacatcaaatgcaaccgttacgcggatcgtatgggtgttcggggaaatacaattaacactgcaaacggtaagccgttggcgcatagcaatttgcgaatggccatcaggtatataattgaccggagagcgggccgccccaccattagaccacctggagcggccattttggaggagaggcttaggcaggacccaattttgtattcatggacggctccgtcaaagagaccgtcaaagagcacgaccaccaggacggcaccgaaaatcaagaaggaatttcgtccgaaaaaatggagctgatcaacaccactcttgacaagctgtacaatagtccatcttccccggcggcgttcgcaggcgttacagcgttgtggaaagaggcgcgaaaaaagttgaaacacttacggaaaagggacgtgcagaattatttggagggtcaccgtacatacactctgatgcggccccggagggtacgctttccaagggcaaaaactgtagcagtgggattcatgaccgatgtccaggtggatttagccgattttcaagctctttcgcgtcacaatcggggtcaccgctacctgctcgttgcggttgacgtcctatccaaacgtttgtttgttgtaccgctgaaaaacaagagagccgaggagatgttggatgcatttgtcaaagatgcggcatgtatacgatcaatcattacataacaaaaatgaacaaatgtttatttataaataataataaatgagcattacagtacctctgtccacttccgataagccgtttggcacagaagatgacaacaatttccgcttgtttgatggtgaattatcaggtagtggtgatgatgatgatgataatgatgatgatgatgaaatggtccgttttaatgattggagggcagtttccacaacagccagccacctctacatgccgtggcgtagaatccgatcggccatgacgtcgtgcactttttcttgttgtttcagcaaatcgaaccatttgcgcagaactgctagtgaaatcgacgaagtcgtgtcgaacggataa

SEQ ID NO: 75910 - DNA, 1519 bp, Heterodera glycines
atgcctattttccataatcccgaatttgctcaacacgacatgtatttggatgacacatgtaaaaaagcacctgatcttgttgtaatataattaatgaattaatttacaaattatagtatgggatgaggaaaatgccgccgacgatgaccaccaacaaaagccggaaaaaatacaacacttatggctcattgcgctcgttttcgtttgtgtcctagcgattgggctccattttttggttggttttgaattttaattatttgtttaataaaatgcatataaatttttgaacttttactcattttcttcaaaaataataaatttttagctttattttgttttcttttttctaaaattattttgcataccatatttggctaaatttagtgaatgtaaagaattttttcccattttctaacctgtttttggggtttttaggacctaaaatatacctattttggcagtttttagcacctaaaatattatcactaattattagtttattacatttgcgccatgtccgtttcaattttatttattttcaatctcacatattaaaaacggtattagtcaatgataccgtttacaatttgggattgaaaataattaaattcgatttttggcataggtgcgaatgtctgaacacacttttggggaaatgcctacttaaaaagagagattttcgtctaaaaattgtaaaaaaaaatttcagtttatgagtgacaaaatgaacaaattccaattggcaatgctcgacaaattggaacagaaagttagtcttaatttttttttgtttacaaaatatttatattaattttaaatttctgattcagctgatcagcgaacgccagcccaaagtgaatgagaatttccgtgaaattgaggtacagttgtttcttgaaaattaaaatatttttattagaaaaattaaatgcatttcaataaagttttctaaaattagcctatatgaggctttcaaattttgaaaaatagcttgctttttctaaaaatgggaattccggttatcacaaaaaaattttcaggcgattatcagcgaagcgattgatgcaaaaatcaaaacagccatatattatgtaattggattggccatcgccgcttttcttctcttaatgcgcttaaaagctaatcatgaagaagagagaagacgagaaatggaagagaatgaggaagaggagggaacacatcaaatggaagagaatgaggaagaggaggaaagaggagaaatggaagcgaatgaggaggaagagcagggaagagaagaaatggaagagaatgaggatgaggaggaatcacaagaaatggaagagaatgaggaagaggaggaaagaggagaaatggaagcgaatgaggaggaagagcagggaagagaagaaatggaagagaatgaggaagaggaggaaacacaagaaatggaagagaatgaggaagaggaggaaagaggagaaacggaagcgaatgaggaggaagagcagggaagagaagaaatgaagagaagaggaag

SEQ ID NO: 75911 - DNA, 331 bp, Heterodera glycines
  unsure (1)..(331): unsure at all n locations
atgcattatttttttacattttatttcatggttgttctttttcaacggattgatgcaattgcgcgtcccgcgacattcaatcgaaatattttgaagaataacagttttgagggtataataatttcaaaattcaaaaattattttaaataattatttaattttaaattttttaataatttaataaattattttttattttatagcaaaattgtcatccattctccacaatcatccagataaggaaggaacattgagtaaaaaagaagtcttttcaaacggtgttatcagaaaatgcctgaatatttttccgatttttntattcattttttaa

SEQ ID NO: 75912 - DNA, 5198 bp, Heterodera glycines; identical to SEQ ID NO: 12316

SEQ ID NO: 75913 - DNA, 502 bp, Heterodera glycines
atggctgatttaaagaaaatgaaaagagatacagaggcagagaaaaagtgagtaaatagagcaaagttaggactataaaaaattataagaaaaaaattttattacttcaaaaatgaattattggagggccgagtctaaaaatggtctccaaaaacggcatttttcaagaccatcaaataacaaaatgttttaaaagtggttttggaaattccgaatttaattaaactaagtaaattgaccacgctgagtccgaatatggctttagatttggtctctgggttctcaacaaacctgtagagcagtacaagctcagggttaaaagataggtcagatttaaggccatattcggagtctactggtctaatttgtacagaaaaccttcttttttgttatatcaggttacttttttgaccataaaaaaatcgagaaaaattagtgggctaattttcaatttttgcatggtcgggaaagcaaatactaaaaaattgcctaagcaaataaa

SEQ ID NO: 75914 - DNA, 1679 bp, Heterodera glycines; identical to SEQ ID NO: 12317
  unsure (1)..(1679): unsure at all n locations

SEQ ID NO: 75915 - DNA, 321 bp, Heterodera glycines
atgggtcttgtgcttagtgggaagcaatgttttacacatggtcaagtttacgtcgccatgtcaagggttacgcaaatggaaggcattcgtgttttttcaccgaatacctgcatgggcgataactgctatatccacaatgtggtctttcaagaattactcggattgccattaaatgcgtctacgcctactgaacaatttttcgacgtaaatggaaacaatgcaggggcgctaaatgaaattttgaatgatgagacagaagaattggttagtgtgcctgactttggttctgtgatggctgagggttcgagtcccattgctgat

SEQ ID NO: 75916 - DNA, 196 bp, Heterodera glycines
atgccatccgcttccgctgggacggttagcgtcagcaatggcaccaaggccaatggaaaccaaccgaacaaacacatgcaaatgttggctatggccggcccggctccgttcagcgactcgccggaggcgattgccattcgcgacgcggtcgactacacgcaaaagatcacgctggaaatggcatataacaacacgg

SEQ ID NO: 75917 - DNA, 489 bp, Heterodera glycines
atggacgccacaaattggcagccatctcaggaagagctcaatcaggttatttttttaacttggggaccacaaaacccatacaaaaaaaaacgatttagttgttaattatgaaggtggtatttatttgattctttttgtttttttcgcggaaaattttctttttgcaaatcaaaagggccaccctttttgttttgcaacaaaaaaactcaattttcggcccctaattattgtgattttatactcattatcgcgatttttccccatttttcagattgtctcacttttgcaacattctcagtctcctgacaaccaaatgcaacaacgagtccaacaagtgggttctgctggttttgtgtgtcgtttggtctttgattttgtcatttttaattttagcatttggaccaaatgaatgcacaccccgagttctgttgctatttgctctacattctcagcgaactcaccgaacaagacgtaattcattggatttaa

SEQ ID NO: 75918 - DNA, 230 bp, Heterodera glycines
atggactgctgctgcgtaagtgtaaagataattcacacccaattcaaactgtatttaattgtaggccttgtcaccagcagcggaagaagaaaaagaagcgcgtcaaagcaacgaaatggcgtctggcgcggaagtgaattaattatatctgagaaatggtcgatcacaccaattgaaatttgatttgatgctctcagaaatgcttttgttgactctttcattcgaataaa

SEQ ID NO: 75919 - DNA, 387 bp, Heterodera glycines
atgccgaaacgatccaaagcaggaaaagcgcagaaaaggcgttggaggaaatggagcaattttaaaaagggtattgaagaagcccgcagaacaggtgaaacgacacccgcattggtcgctgcgcacgaagcggcacattcaatagtggtcaaattgaatgaggacattgcggagagcttcatcagcaccaccatcattggccagaatggtcttgatggccaaacattgtcaacacggaggccgaatgaagactgcacgccagcgcaattgagagcagcattaatggcaacgatggccggcaaggccgtggaaatcaaattggtcggtgttagcactggccatgctgatgacctagccgacgctagagcagccgccagagaagtatga

SEQ ID NO: 75920 - DNA, 1653 bp, Heterodera glycines
gttctttggttggagcaacaagtggtgaagaagcgggtaaagcgcgactttcgcccggtcattcaccggcgacgccggcaccggcgcgagtcgtcctcctctttgacttccactgacgcgtcgacagagcagcagcaacagtcgctgtcggcgtcccttgcggcgacgctggcgtcagcagtgagtgaaggcggcagctacagtgccgttgttggcggcggcgacaacaccagcgacgcggtcgccgtgttacgtccacgcgctcgccaccacaccacgacgctgttgcagcgacagcagcaacgacagcgacaacagcagcacccattccgaccgccggtcattcagaacagcgacgacgaatatgagggggaggggacagcggcgggcgacgggccggacgactttttgaacatgaacaggtgggcgatgcgatgtgattggacgaatggaggaaaaccgggaaaaaatgtttaaattttattcaagtttttaaatttgacacgaaaatcccccaaaatggcacctattgcaaattaacgaattttttttagatctttatggaaaattttttaaaaaatggaaattttaaaacttgaaaaaacctacaaaaatggccatttttgagttaaaaatataacaattcaaaaaatttattctcgtgctccactggcgcctaatttttgaaaataatattggaaaaaaaaattaagactaggattgaattaaaatctatgtattgctgatttaatgatttttcttttagattttcttgaaaatttgaaaaaatagcattttaaaatttgaaaaatgaatttaaaaattcaaagaactaaccgttaaacaacaggatcagtcacaatgatcagcaccggacacagtgggcacgtcttcggtacggcgtgccaaacgacccgtactggaaggacttgtggtatttgcatcgacgggacgaacagccggacgaaatggatcacaacgtgaaggaggcatggtacctgggctacaccggcaagggcattgtggtgaccattttggacgacggattggagcgcacccatccggacattgggccaaactatgtgagtgttggttggcatggcacacactcatcatttaactaaatatttgccatacttttatagaaaaatttgtctgacaggagggatggaatttagtcgatctaaaaaaaatttttttttcgaaattgggtaattccgaggcctaaaaaatgcataaaaaattttctcgcagccctgtcaaaaagacaccgagttcgctacaataagttgagttttttttttaaagaaaagacgttcaaattttgcatcaaatgaatctgaaaaacaatggatttaacgcaaaaaatgatgaggcgcttcggatggggctcgaacccgcgactccttgtcccatagctcagttggtaaagtgggtgtgtatgtgcatgatgcgcacgggttcgattccttcccaccgtttttttttaaattattttttgcttttgtcataattgtcaattgttcatgtattctaatttatctctcctttttttcaggatccggatgcctcctacgatgtcaatgatcgggacgaagacccgaccccgcgctacgagtacacggacgagaatcggcacggcactcgttgtgc

SEQ ID NO: 75921 - DNA, 1886 bp, Heterodera glycines
atggaccaaattttggcagaatttgaattcgccacagcttacttggatgatgtgatcatcgtaagccaaagcgtcaaagagcacgctgatcacttgaagaaagttttggaaaaattccaagaatggggattccggatcaaattggaaaagtgttcgtttttccgagaagagattaaatatctcggacaaatcatcgacagaaacggacggagaccggacccagagaaaatctcggcaattagtaaaatgcccgcacccacagatgtgccatcgctgcgttcatacctcggaatggtgaaccactacgagcaattcgtcaaaaacatgcgttttgtacgaaaaccgctagacgatctgctgaagcaggacagcgaatggagtggagtgaaaaatgcaaacaagcatttgacaaaataaaggaaattttgtcatctgaacttctgctcacgcattacgacccaacaaaggaaatcgtggttgcagcagatgcatccgaactcgggattggagcggtaatctcccacaaatttcccgacggaacaataaaggcaattgcacatgcttcatcagctctaacaccggctgagaaaaactattctcaaatcgagaaagaaggattggcactgattttcgccgtgcaaaaattccataaaatgatttatggacggaaattcacgctgctaacggaccacaaaccacttcttgccatcttcggaagcaaaaagggggtgcgtcaatgtagtgccaaccgactcctccgatggtcgctgatcctcctcgcatacgatttcagcattgagtacatcagcaccaatgattttggtcaagccgatgtgctttcaaggctgatcgcaaatggaaaaagcgacgaagaccgagtgattgcatctctccgatcagattcggaaattgacgacattttgatcggatcaattgaagcactgccaattaaatttaaggaaattatcgcagctgctgaagccgacaaaaccattcaaaaagtcaagaaatttttgacgaatggttggccaaggaacgtcggagacgaaagtgccgaaataaagctttttcatcggatcaaagaacagctttgcatcacgagaaattgcctgatgtacgccgaccgagttgtcatccccgaaaaacttcggcagaaaactcttcatgcattccacaagggacacccgggaatcaaaagaatgaagcagttggcgagaaattatgcctattggccaaatatggacgccgacatccaacagatggtagaaaactgccaaccatgccaaatggaagcaaaggcaccagttaaaagtaatcttcaaccatggccaaaaccatctgcaccatggcaaagagtccacatcgactatgccggaccatttttcggcaaggaatatttaatcattgtcgatgctttttcgaaatacccggaggtattcgaaatggccaccaaatcgacagcggcaacaatcgaaaaacttcgatatttgttcagccgacacggcatcccggaaattttagtgtctgacaatggcacccaatttacgagcaacgaatttgccaaatttatggccgtcaacggtgttaaccacctgttttcagcgccgtataatccaatgtcaaacggccaggccgaacggttcgtggacgcgtttaagagaacgtttcgaaaattgaaaggggagggagccccaagcaaggaaatcatcgaaactttccttgtaagttaccggactacgccaaatgattcgttgccgaacagcaaaacacctgctgaaatgtttctgggaagaaaaccccgcacaactttggatttgttgcggccgccaccagcacaaccgatcgaaagagacgtagaaatggcgagacgcttcaataagcgatag

SEQ ID NO: 75922 - DNA, 807 bp, Heterodera glycines
atgaaaataaatattgaatgttctgaaaagcaacggattggagattttatggtagggtaggatttggtggtctggcgctgatggaaagtatcgacgaggaaattttttggaatatgttcaatttattaacagatttggccaaaaaatagctaatttttttaatttaaacatttcaaaaaggcacaaaatttgaataaatcacagataccgaaaacccaagaatttttaatcccgtcttttgctcagtagaattgcgaagaattaccatttttaatacatttttgggaatacattcccaacaaataaaattaatgcactattattttgaaattgtcgactcttaaaattatatttatttatttttaatattctttcttcagcttagtttcactgagaaatgaaatgtctaaaatttttaccactttaacgttgaaaaaacgggtttggagtttctagtatgattttttttaatgactatttctgtgtttattttgacttttttttttttgcattttcaagagtttataaaaagccattccaatgaatttttgtaaaatttcaaatttctcatcatcagttgttaatttgtagcttttatgaatttgtttttgaagaacaaattcattaatacattcataaattttgtttcgaatatttttgaattatttcccgtttcttcttttcattttgcattttttgcactttttcttcccatttttctccaaatattttgccaaatgacttttgttgtaattttttattttctgattcaattggactaattagggcaattataattaaaataaa

SEQ ID NO: 75923 - DNA, 179 bp, Heterodera glycines
atgatttctatggtaagcaatcaatgatgttcggcaaaaacattttcaaacgcccttcaattaaaattaattcaggcccaaaattattttttccaagtttatgttgaatattatgcgacattcggattttggtcatattgcacgctttaacatccccttttacagatttaacacaacta

SEQ ID NO: 75924 - DNA, 328 bp, Heterodera glycines
atgattgcaattccaattattcttatattctttgttcaaccggttatttgtttaaaaattttatgcttcatacacagcaaaatggtaatcattgagctattataattaaaaaaatttaaaagtatttttaataaataataattttaaaaatgcaaaagcatttttgtttagtttgaagcaaattcttttcttcaacaacaaccaaactgttcacatttggtcattaaagatttcgcaaaaattggattaaaggaattcaaagcggatttgaatgcacgttataaggcacaatatctgaagtgaaaattatacaataagaattaattga

SEQ ID NO: 75925 - DNA, 683 bp, Heterodera glycines
atgtcaccaaaaaatggcaacacactggtctttcccattggcattgaagggcagaaaaattttgttcaaaaattaaaaagaaatttacggcatctccgttctttgaacccattgactggaaagccaatttttagcggactattttttcgtgccggttcgttttcaattttttttttagaatcatgaattaaacttgagtgacgagtttattttaacaattatatattatttaagctatttttcaaacaaaaaaaattgcgaaaatttattactagagattttaagaaatatttaacccattggttatgcttaaaattagcgaatttatctatattttggggcggagttcattttccattttttttttgagtgtttcgaatgatgaaaaatttcgattttattaattgattttaaatttaaaaaaattattccgttttttgcacctcctttagctgcattccaaaaagaaggcgaattttttggctttttccctttattggccaaattacgtgaagaaaagttgcgcaaaaagaatacaccgtcgtttggtgaatttatgcttggcattgattcccattttaatccgtacaccatcggtttccctgctaataagtcaattgccaatctcattgacattttctacctttccatgatgtcagacggtttgatcaaggtataaaaca

SEQ ID NO: 75926 - DNA, 682 bp, Heterodera glycines
  unsure (1)..(682): unsure at all n locations
atgtcaccaaaaaatggcacnacactggtctttcccattggcatgaaggggcagaaaaatttgtttcaaaaattaaaaagaaatntacggcatctccgttctttgaacccattgactggaaagccaatttttagcggactattttttcgtgccggttcgttttcaatttttttttagaatcatgaattaaacttgagtgacgagtttattttaacaattatatattatttaatctatttttcaaacaaaaaaaaaattgcgaaaatttattactagaaattttaagaaatatttaacccattggttatgcttaaaattagcgaatttatctatgttttggggcggagttgattttccattttttttgagcgtttcgaatgatgaaaaatttcgattttattaattgattttaaatttaaaaaaattattccgtttttttcacctcctttagctgcattccaaaaagaaggcgaattttttggctttttccctttattggccaaattacgtgaagaaaagttgcgcaaaaagaatacaccgtcgtttggtgaatttatgcttggcattgattcccattttaatccgtacaccatcggtttccctgctaataagtcaattgccaatctcattgacattttctacctttccatgatgtcagacggtttgatcaaggtatagaaca

SEQ ID NO: 75927 - DNA, 2161 bp, Heterodera glycines
atgaaaaacaatttggtaaattaaccttaaacttctaactgttttataacaaattactaaatttgtgccttgaggcaattttaaaattgccgaaatttttcttaaatccccattaattcattaattaattgtcatctgttgcagaacaacaacaacggcaacaacaacaataacactaatcaaacacaaccggagaaaacatcgccaattttgctaccaccatttttggcgtctacagtaatgccaccagctggtgaagaaacgagtacggtggtggatcagcatactgtagatggactgacattgacagaggaaaagcctactgtggacgggagaggaccaatgaacagtacaccggcagaggaaaatcatcatacagtggcaatggaaaatcatacggtagacggaggaccaacgcatactgtagtggacggatcgtcgagtcatcaacagaaaggtgatcaggaagaccaggatgaagctgatcaccagcagcagggggaggaggaggaggactatgccattgatgatgatgatgatgaggacggcggttttggcactttgatcggactggctaacagtgaaacaacagtttcggtgtgtgctttttttgtgccgtacaaacaaatttcctacttactgtactcaaaccattttatttgtttttgtaggggtacggtattttgttgcttttgtggagcacagttaataatcccttcaaaatttcaagcatgaaatctatgggaacaattaaaaaaaaattcaaaattgagtgagtaatttcaaaaaaaaatttcgccattttatttttatatttttaaaaaattctctaattatgatgggtttattggtattagagaagacgggatttcaatacttaatcatttttcgcactaactcaaaaacttcttaatcaaaaatttagaaaaatatataaaaaaaaaaaatccgaaaaaaatcctgacttacctaactcagcgccaaacgggattttcaaaatcaggattttataataaataatttgtttaaattgttggattctctttaacattttgaaaaagccctaatgatatagggaaatcccgagcttccgggcaaatttggcagaaaaaaattaaaaagcattgcgtcactccttaattgcttcaggcggtgcccaattgttcggaatgtgccaacggggccaaatgtgtgcgcgttggccaacgaattcggtgcctttgtggcgctgactttgccggcactctgtgcaacatcaaaaagccggtgggtcagattaataactaataaattcttctcatatttttttcggtaatttctttttttaaataatttttttacaatttaaaattttgcattttttaagaaatttattaaaagcaaaaaaactatttttgtgcctatttaatgcctatttcgcgattttttgtgcctaaaaatgaagcactattaatcagacttatttttaggtaaaatccgattttttttaaacaatgtcagattatttgccttaattaggcctttctttgataaatgccacagccgtcgcactttcatgtacattttcagctttgtgccgcgctgaagtgccacaggccgggcgagttgtgccagccgatccggggacagccgggcggcaaaaaggacatggcacattgtgaatgtcagctggggatgggcggcaaacggtaggcacagaacacaaaaataacactactactgtatttttaatctttttatcgtatttttcatatcttttatttagtgccaattttttaaggcgtattaatttaatttaaaaattaaattaatcattaatatttacaaatttttttctaattagtgtttttcttttttaaaattattgaaaaaagaaatgccacgacccgggattgaaccggggacctttagatcttcagtctaacgctctcccaactgagctaccatggcgacagtaaatgttgtcttacagttttctaaaccattttctttttaagaatatcaacaagcacaattggagaaggaaattgaggaattgtcttggaaggtggagcgtgccgagcacacggacagagccgagttggagaaccaaatgcatgttgcggagctgaaacggcgcactttgctgcaggactttttcagttagccgcagagcaataaa

SEQ ID NO: 75928 - DNA, 2457 bp, Heterodera glycines
cccggcggccgttaggaccgccatggagatttgggtctagtttgttaggtatttttctgaaaaattttaatttttcatttcgagggggtagcaactgccctccctggttgggcctggagatgtcccccttcgacccaacgcaaatagtcaaaatgttttcccaaaaagttgcgacacggacattctgttcggccgtctcaacgggctgtccacgctgttggtgctgagcggcgtccattcgttggccgacgcggaacattttcgtggccagggccagtctcagcttgtgcccgagttttacgccgcttcgcttgccgaacttttgccaccgctgtcagtgcctttggggtggcattaatttttgtaatttttttaaaattttgcttttccctttagcaccgaacaaaatgggccagcaaatgctgtgaattgaaagaataaatgccatccatattttatcgggtcactattttcttcatctccctgaactttttttgttgtgtttacttttaatatatgtaaactttcgcgcaaattgttttgttattgtttttgattaaacacttggtaaagataaagaggctgacttctgaacttatggaggggtggaagctttgtaaaaagcaataaaaatttatttcttgaatattacaattttgtacagaaaattcttttaaaaaagcaaaagttactgcaaagtctgggttcgattgatgttgtttgcctcttttgttttagctttcactcgtttgtacattgtttgtttttcttgaatattttaattttactcgctttaaattacatttctttgttatgataaatggcaataatttgtcgccatggtagctcagtcgggagagcgttagactgaagatctaaaggtccccggttcaatcccgggtcgtggcatttctttttcaaaaattttaaaataaaaaatagtctttttttacaagatcatcaaaatgagcttctcttctcttcctgtgaaataatttatttttttaaaacgataattaaaatttttctcaaaacaaaaaaaaagaatgaacaatataatttgtaaacgcacttttcgcatttctccaaatttgtttgttcagtcataatctgctgatttgttaatgacaaataaaaaatgcgttttcccttcgtgtgttctcaaaattttcttcttttcagcaggcataagggcgcgtctctcatcggtcctatggtgtagtggctatcactctggactttgaatccagcaaccccggttcgaatccgggtaggacctattcttttttgttttttaactaatttgctttgaattaaatgtgtgtcttatttgttagtaaattaaataaaatgaataagcattttaatttgaaatttttacttctaaaacaaaaatcgaagagaaataaaagaacattttgaatcactaaaaaaagagttgccttttcgtctctatcccaaagtaatttacaatttctctttttcattggaattgttgccggttttctcccgtttctctctcattttcctcagtttttctttcctttttgtccatactttttgaattcttttgtgtgatatttttatttgtcaggtgtcaaattcgcttttcatttccgtttttgctataaaaatgaccgttgaaactgtcccggccgatttgcgcaatttgcgtgcgtgtctcgtgtgttctttggtgagttttttcgcttttttaatcaaattattatcctacggttcgcgaatggcattttcttcaaaagtcgacaaataattcggtggtaaatttttaaggtcaaatcggaggaccaattcatggcagatggctgcgacaattgcgaacgctttttgaatatcaaaggcgacattgacaagtgctacgagtgcacgaggtttgaagaaaacagccaaccctttttagattaataatttaccaaaaatggattttgctcgaaatttttgggtttttttttgttcggtcatacttaaaaatagggtttatttatcaggcctttagtttgtttctaatcaccactattgttttcaatttggttttcagtgccaactttgacggaataatcgccgtttgtgagccgaacgactcgtgggtgtgcaaatggcaggtcaacgaacagggagagggcgagggtcaatttgcaacaaagcaaaatcatctcttttattgggaatggatccaaaataatccaatttgaattttgtggaaattttccaaaataatgcattatttttggacggtttttgaattcgaaaaatgggataaacagcagtttttatgcttaaaaatccaattacaaaatacgaatatttaagaaaatcaaccgaaaatgccctggcatttatgctgtatccgtgtcggggaatctgccaaaacacgtggtggccgagttaagccacatgggcatcaagtacaagtcgggccaacgcgacaaatcggcg

SEQ ID NO: 75929 - DNA, 433 bp, Heterodera glycines
atgccattaaaaacaatgccattctcggcactctacccggttttggcaccccagaaccatatctacccaccttcaaaaccgggcgggcattggcactcaaaagtgccgggcaaattcacacatttgcccccattttggcacgggccgcgcaatagcgacaattcgcgtccaccaccgacatcatcaccaccaaaagcatgtgatgaagaagcatcgacggtttcggcacttcggcccacatttgccccttggcactcgtcgatgtcgtcggcacagtgccgtccgtcgaagccggccttgcactcgcagacaaagtcattcttgatcagaggaacattgggatgggtgtttttttagtaacttagaactaaaattctcgcatgccccggggctaaatttctcttgcactcgaaaattcatgtgagagtcaaga

SEQ ID NO: 75930 - DNA, 1003 bp, Heterodera glycines
atggcaagtgcaaagacatggacaaccgcggcaactaccgctgcatttgccatgccaatttcaccggcacacattgcgagacagaatgccaaccaccgcgcattgtggcgccgccaaatgcatcgtccggcgctggcggtgcggaatgcgtttgccctgcggggaaaatggtggcgcatttaaaataattttaaataaaattttattgcattttttatttggattaattggggcatataactaataagtggcttaaagtgctcatagccgtgtattaaatattaaagagataatagaggagggcttaaaatgccaaaaaagcgtcgtaaaccaatgaatttcaattgttttagattttttaaattattatttttttttactttggcaaatttaatatttcttaattcttcttataataatgatctgaaacttaccaaaaattaagtcaattattaaaaaaaagcagcgaagataatgaatatctattttttaattaattattttttaccggctttttttaaacaaatttgaatcccacaaaattaaagtctcagaaattcaccaatcttcggagggcttatactacataaaaggaagaggataattaatgtttgggccccagagtttttgttttaatattttaaattatttttaccctctttttacaactttaatccctcaaaatttaggccttttttaaattcatctttgatcattcataactcttccgaaaaatggtcaaatgttgttccgaatttttggaaaattgtttctctcccaatgaattggtgttcaaaaaattgacatttttttctggcatggcattttgccaaaattatgcaaataacaaaaagtgcgttttaagggtgatcactgtgagttggatgtgatggcagcagcaccgtgtgccggagaagatggcagcgcaaatggccagtgccaaaatgggggccaatgtgtgccggccggcacaaaagcattttgtatatgcccgacggggtaa

SEQ ID NO: 75931 - DNA, 868 bp, Heterodera glycines
atgtggcgaaaaattagtggaagacgtggtcgcagaagtggacgattgtcgtcagagttcgcgtggatgtccatttgcgcatgtttgcctccaggacccggagagcggcgagttccattgcgagtgcgtattttacaataattgactactcgagagtcttgacatggtgaaattctcgagtgtttttttttgtggcagctcgagtcttgacacgagagatttcttgaatttttttggggttgtcttagtcttgagaatctaggggacgactctcggtcttgaatctagaaaattttgactctcgactatcccttattaattaatattatcccgctgaggggattgattgatcgagaccataaacatttgttttggttggtcggaaattagctggaatctcgaacctaatctagcctgaccaaatcgttttccgggatcactggcatttggctccactaattagccaaattttaatttatttttattgccttggtaatgaatggttaatcaaacaatacaaaacaacaatacactaacaatttccctgcttaatagaaggaatttgtgcttgcgctggggacagtcgccgtgtgccaacaacgcaacgtgccggccaattaaggtggattgattgagatgaagaggagtgggaattactaagaaaagtttctcgatggtaaatttggttttgtttttcaaattttttattaaattatttaagatttaggtttgaatttagtttttttaaatttcttggctattttattattaattagaaaaaattaaatagaaattaataaatattttttagggtttgccaattaataggaggatcatccattttaccttcttctttttttggttttaa

SEQ ID NO: 75932 - DNA, 643 bp, Heterodera glycines
atgcagaagcgattgatcagttttgttgtttggttgttgatcagcccagccatcacatttttgtgagttttgggagggcgacgaacaaaaaaaaaaaagaatttatgcgaaacaaatttttgtgcataaaaatgcgacaaatttttattgggttggtggcggacgaccgacggacggacgaacgaacggaacgacctttacgcggcaataaaatttttgtgtttaattaatttaattaaatattgtatatataattttggaacaaaaatgcggcccaggaaaaaaatggaataatttttcaattatttaaaatgcaacaaattaatttttaaatgagttcataaatttatacgcaatttttacaataaattttatttttaaggaaaattaatcatgtttaaaaattatatttaattaaaaattattaatttttaggttttgttttcgagttttgtaattatgaagtcgtttatcccttggtactaaacaataggattttttgaaaaaataattaaaatattttatttgaaacatatttttgaggataaaaaggaaacgaattcgcttggataaagcaaaagcaaatatttggttgggttgtgccatattaattacgccccacggtgggcaattagaaaaatta

SEQ ID NO: 75933 - DNA, 237 bp, Heterodera glycines
atgccagtaagtgatttattattaaatttattattttaatttaaatatttttataaattttagctgcgggacactcgtctaatgacaaagacattgaatgtccagaatggcaaattcgcgaagtgaatgtgagtgccgaatttggaggtgacccgctgacagacgaaccgccgttaattcgagctgaatatccgccaattttagcaaaaaatcgcagattattgaggcaaaaataaa

SEQ ID NO: 75934 - DNA, 316 bp, Heterodera glycines
atgggccggtgtgcgcggaaaatttgccaacttttaaatattttagaataaaaatttttcaataaaaattattaaagatcggtaattttaaatttgcagatcccgctgcggtattggaattcaaaatttttgcgggattactggtggacaagccgtgctggacacgcggacacgttcaaccacaaagtttggccatttatcatcggcggagatttgaattcgaagtttggagtgcggggggaaaaattggatggaatggacgaacggatcggccataattcggcctaattaattgaaattaaaaattgatttggta

SEQ ID NO: 75935 - DNA, 511 bp, Heterodera glycines
atgacttgcaaaaagttgacaaactttgaaatggcatggtcaatggacgaattgccgaaatgcgaaggtcaaaaaagaaaacattttttaaattatttaattttagccaaaacagaaagtaacggcatttgtgatatgtccaaattcacagcaaattccaccattttgctgagtccgtcccgcgaaagtgtacctgaggggcaggaagtgtcctttgaatgtgtccaaccaaattacactctgagcgatcggaaagcgcggaaatgtgtaaaaagttaggttttaaatcattttgaatttaatgtcatgcgcccagtttttagattttgtcaggagggcagtgagagaagcgatggccgatggacagacgcagccgatcactgctgctgatcaaacatccgaatatggccaattagacgcactggtcagagcagcaaagcccgagaaaggcgagtcgattgaaaagcgagaaaaacaacagccgattggtgctgatcagtgccttctttag

SEQ ID NO: 75936 - DNA, 1626 bp, Heterodera glycines
atgcaaaactttcccgctgcttctgctccagcttcgtcctcttcctccacaggctttggcataagcggcggtggttgtgttgcagttactgctccatctccaacattttcctccactacagcgatcacatccgtgccgcagcagcagttcatccacccaccatacacaactgcgaattctgtcaccaccgtctcgccattgtcgccggccaagcaccagcaacatttggttgttgaccagtcggcacaacagccgcaaaaacattaccaccatcagcaacggcaccccaatgtgccctttgcgacgccacgtggagatggcacaacaatggttcatcagcaccaccaccaccatcgtttggctgctcatcatcatcagtacagttctcatgggatgggaatgggccagccgctggcgcgccattcggcatcacttttgccctcgacggctggtcagagtttggaggatttggccgacttggcccaggccagctccagcttgttgcaacatgcgacctcttctttgatgcggtcaacttcgaccgcctctgggccaccatcaccgccgtcacaatcatcatcagctgctggtgctgtaaatcatcaacaacagctacaacaagttcagccagtacaaacgcaccaacagcagcagcaaccaacaatgcatttcaaagtggtggcaaccaatgacaatggcagcggcactcacaatcggccagaaatattataccacccgaaagaatatcgacaacaagttttcactgtccagcagcaacgggaggaagaaggtccgtgacaaatcggatagaaaataaacatttcaatagaaaagtttgaaaaaaacatatggcatttttatattgatggtttttttttcaatttagcttattgttagctatttaaaattgttccttctcccaaaaacactcactttttggcaaatagagagcaaccacttggtttgaatggggaagcctatcactctctctgtgccttgcttatggggtatttgtcgtatgatttactcattaggccacattcatttttaattttccacgctttcagcaaatataagaattgaacagcagcggcagcactatccgctgcaacaccaccgtcctccggtggccaaaaagctgaccaagaagcaaatggcgaccatacagcgcgagttcaacgaactgcttccgtttggtagcaccagtggcggtggtggtgcggcagcagcaaatgcttcaactctgtgccagcaaatggaaaaagcggtgaccatcgatggtgacactaaactgcttcaacaacagcaaccgaagaagcgagggcgagcatccaaagagacgatcggagtgagccaaaccaatccaaaaaattctttagcattttgttttatgggaaatatgtattagttttttagtataaagtctcccatttttaggtaattccaacaaaaaatgatggaactgacaatgatgggcttgctgctgcggaccgacccgcacgcaggtcggcatctaccgttggagctaaaagaagtgccgaagctgatggtggacaaaaattgagcaacgaaggaacgaccagcaaaaagaagcgcatttgggagggggcagactatgtgacgtaa

SEQ ID NO: 75937 - DNA, 388 bp, Heterodera glycines
atgtgtttgcttattattttgtgcttttgcctctttttctttcttttcttttttttctttgcctttttcgaaaagtgccaaaaacgaatttttgaattccctggggacaaaaaaagcaatgaaagaatggcaaaagaagaaaaagcattaaaaagcgaaaggaaagaaacaaatggaaatccgccgaaagaaaaactcaatttcagaacgaaagtcggaatgacagcagggcattttgagtctgagctgattggagtgtgctgtgagctgtgagcgataagaaaagtgggcgatggacgcaaaagaaatgggcaaatttaattgcccatttattaatggacggattcttactaatgatcgaattaattaattaattggacaaaaagaa

SEQ ID NO: 75938 - DNA, 2360 bp, Heterodera glycines
atgcgcattactgatcgcattcggacatttgagcaaattgtgaccgaaattgacgtaagcgtttgcaaaaataggaaaattggttgctaatgccaataaaaattgaaaattttttgcgggtggcgggaaattggtgcaatagcaaaaattcaccatttgccaaatttcttgccccaccccctaacaaaaaatggtcatttttttaattttcacccttttccgtatttttaaaaattaattacgaactctccattatttttcgctaccctaccccaaaaaataaatatatatatttttacttttttcaaaattctcaccctcccccctccacagtttttagagcgtccaattttgtatttcaccctcccccctttaattttttttttctataacctgcctcaaatattttcacccccccccctccatccgttttttcaaattttcttttaaaatttgccaaccccttcctaatttttttaaaaatttcctaccccctctgattttcagtttctttacactgtgtccacggaagtgccgtcggcactctctgatgagcattgggtccaattgttggacacggtcagcgctgctgaacgtgaacatttgctgcgcaccattcactacgcccagctggtggagaaggcggcggccgcggaacgccaaacactgaaaaatggcacaaaaacggtaaaaaatggaaattttttgaaaaatttttttttgaggacgaccaccatatagaaggtcacgggattatctgggtcagttcaggaacgattctcgaattttggatagcaaataacgaaaaaaaaatttttttaaatttaaatacaaaaaattttccgccgttttttttttcgtttttgagtccttggcttggcgttggctgtccggttctggcaaaatgtacaaaaaaaaaggctcccttttccattgattggcatttccgggggagggggccttgaaaaatttccagtaagaattttttttttttggtcgacttgaaggaaaaaggactaaaaaattgccaaaaaaaatacgggcgccaaattttttttacattttttttctgttttttttttacctaatttaaactcatttaaaaaatgcgcatttttttaaagttggacgtcattgctggagttaatgatgatgatgatgatggttgtgttgctcattcttcctcctccgccacaacagcaacaaactctccaaattatcagcaaatgtttggcgacgaattctgtgaccaaagcgcactgaaaagtataaaatttattttcaaaaaaatttttttttttttttataaattttggccaaaaaagtaatttttttttaatttatccccaaaaagtgcgataaaaacgcatttttgtgcctggaaataaattttaaaatcgaaatttattttcccacaataaaatttagcatgaaaaagttctaaattcaaacaaatttttaccgtttatattagtaaaatgggaaaattcttgcaaaattttattgtttcagcagactttttttgcgtgcatttttcaaatctaaaaaatcgctttttttaggccgaatggacacacatttcgggttggcattgtgccgcaattttttgctggagccctccgatcgaatgcccaatttattcgtggactgtcgctttatgtacgcgcacaaaacggcgcacattctcagcgcggcaaagtgagcgatagcaaaaaaataattaattaattatccaataaaaataatataattaatttttgtgccggaaaaaaattttggaaggaaaaaatttcaaaattttttcaaaaccaaaaaatgttgcaaaatttttcataaaaaagtgcatcactttttttaagttagcatgtgtttctttatttaaatagcatatgatttttttactttctcgactttattaatttttttaaaaattttaagagttttttcctttggatcaaaaatttgtctgtcattatctttattttcaaaattaattaccataattaatttgttaattgcttttaacggcgtgtcaaccaattgcacatgacaaattggacgagttcagcaccatttcccgttaatattgtcaacttttttgcggacgacacagtgaatcgaattgtcaaaaagtttatttgtttttatgccaattaaattttatttttccaaattttagccaatggcactttttgcacggcacgccaaatgaacagtcaaaggaaatgggcggcggggtaattaattaatttttattatttttgtaaatatgtttcagcatttcgtgccccacccattcgcaccgcaagtgaccacgcgggggctaagcgaaatttgtgaacgcaattccatcccaaaag

SEQ ID NO: 75939 - DNA, 214 bp, Heterodera glycines
atgaaaaatttaacttatttttttgtttctattctctttatgctgcttttgaagcaccaaatttttgtcgatgggacaaaaacagggaaatccgtagaagcgaagaaacgaggagaaacattgggccaactgaaggccaaggaaggcaaagataaagcggagaatttacaagcagaggaaaagcaaaaaaagaaaaatttgggggatttaataa

SEQ ID NO: 75940 - DNA, 2369 bp, Heterodera glycines
atgttttcaaataagcgcaaatgttctttcaatcccgattgggaaaattccgattggctgttccgattatttttaaattgtttgttcttcttatttaaaaatttcagcccatattttgcataatgcagcaaaaaagggtgccgaacaattgcaatttgacattgagtccgtcgtttacaaattaacttcatatttcaaaggatcaacgcaaagacacaccgaatttcatgaaatttgtgaccaatatgaggtgctcaattttcaaattttaaaattaattttgttttaaagacgacttttgtaccattgccaactcatgcacccacacgttggactaccctatcaaaagtggtcagccggatgttagagaaatggcaccaattaaaagagctttttgcaatgccgaacaagccgcgtgttttacatgaattttttcaatcggaaaattctgaaccaatttgttactttttacaaaatgtgttgaagacgtttgatgagcccattttggcattacaagttaacaattatttttttaattaaggtcacaatgtttttacagaaatcaaatttgatgctgccggatttaatcagtattatggaacaatttcgtgccaaaattaaaggtcgtttgcacggcactggaaattcgggaaggccattttttggaggacattttgcgttgcgccgtgcatcaacggaacttgaaaaagatttttgcgtaaaattttttggtatttttgttttattaatgcatttttttaaagaatttttacaaaattgtgctcaaatacattgatcgctggttccaactccaattactaccaaaaaatatttcatggacaaatttacaaaatcatcctttgaattctgcagaagttgtgcaacttgctgagcaaatttgtcccgaaatagcgcaattggatgaactgtttgatgaagtgtctgcggtgaaccaaacattggccgacattcccgaagaattttggctcaaatcagccgaagataaatggaagggcatttttgaggcggatggtgcaacagaggcctatgcaaatttgtatcgaatcgtcagtgcagctttctcggtcattaaaaaataatggataaatgaaaatttattttaaagattccgacatccaacgcattcgtggaacgagttttttcactggcaagcagtcaatggaccaaagaaagaaatctattggaagttgaatcagtcaaagcgttgctactggtgcaggtgaactttgatctcacgtgcgcggaaatgaggaaaatgatcaatggaaacaaaaaaatattggaaaaaatccattccggtgaaaaatacaagccatttgaattaatattaaccattttcattgcatataataaaaattttaaatgtcctttgaatttcatgaattttccccactatgtccttgcaaatcggcatacccgtccttggaaaccgacattgggcgatcccatccctgaattagcacaatcatcatcccattctctaatatttttaattaaattattattttgtgccctttgtctgtgggtcctttgcctttgtgggtcctttgtcgtgggtctggaaaaaaaatttaaaaaaacagatttttttattttttttttaaataatttttttttacacctgaaacttcaaaaaaaataaaaattaaattaaaaaaaacgattttttttttaatattttttaaaattaaaaataaaataacaaaaaaaaatttactttaaaataaagaatttcctttgactgtgggtcctttgtcactgcggcgctctatccacccacaaaatttcattcagaaatcccacggacaattgaggcccttcctttgtaagtttgctccatttataaattcacttttaatgactaaattatttttatttttcaaataaactttcttaaggttgcacctttaaaaaatctttaacctaataaagcattgaaaatcaattcatgtcaatcacatatcacatgtgcaattttttatgaattgacatttataaattttccacattcattcttcaatttaatctaaattaataatttaaaaatttattatatgaaaattagtaataaaaaccctattctttgttatttaaaaaactggtaagaatagatagaagcgaaattttgtgattaaagggcataattgcagcatcaacccctgacttgggtcatgaatccaaataaatgaaaaaattgaaaagaatttttgattttttataaaaacaatttaaggaaagtgaacaaatttttttttgtggggatttcctagcagttgtattctccatattagcaccatccaatgataatcctaaatcaaatctatgaaggataattcaaaatcaataaa

SEQ ID NO: 75941 - DNA, 417 bp, Heterodera glycines
atgctttttgtccgggatccttcgggttcagtttggaatacggatcctggcccaagtccggattttcaactccaggttctacgtatccttaccaataacgaccagtgttgcgaatccatatttttttttcacgtcccgcggcaaccccttgaaaattatctcacttacatacttttgttgataagaagaaaaatgtaattccaatatagaaattaaaaataaaaccaaatttttagctttcgtttttaaacctgctatttttgttacaagcatcaaaattatattaagctattacgaacaattaaggaaatctgtaatccttcgctatggaacacatgatatgatcgtttttttcttctatcgtttgaaaaatttttgatttgaaatatcatagccttttctgcagcaaatcaatta

SEQ ID NO: 75942 - DNA, 1705 bp, Heterodera glycines
tttctacaaaaaatcattaaaatgactaattattaaacaaatatatttttttggaattcataattattattagtccatgtttattgaaaagatggaatttgcttatacaaaattttgaaaatttttaatcatgaaaattgaatcaatttttatatttagtcattaatcacttcctaattaatattttttgaattaattttatatttttgacatttttaaattaataataatttagcttaattacatgttcgaggtgttaatgccaaaatatggcctaaatgacaaatttttgattttactcgaagaggaccatattgtggcaccggattttttgcatacacttcaattgattgtcaaaaatcgtaaaaagtaaataaaaatattttttaatcctaacaattttttttgtaatttttgaattttgggcaattattttatggtataaattaaaataaaaaattaatttaagcatttgctccaattgtgaaatgctttgtcttggaacatatccaagcacatttgccaattatgcggagaatataaataaattgggtgtcgaagtgtggttcagcagcaagaacaatttgggccttgcaatggaccggcaattatggcgacaaattcaaaattgtgcaaaggttttaaaataaattttgacttttacatgaatatttttaaatattttgtgagaaatttttgtaaaaaaggttaaataatatatatataaaaataaattgatactaattggaaattcttaatttgtttaatcaaaatattaagtaaagagtttaaataaaatattgcttaattctaaacttttttttcattctgttcaccgctttttcatactttttattaaatttttaatttttaatcaaattaacaaataaattaattaaaattagaaataaaatttaaatcattataattcgctgcttttcctgtttttctgtacatgggacgattacaattgggattggaccttgttgcagttgagcattcaatgtttgcccaaaaggtttgaagtgatctacaccgaggcaccacggtcggatttaatgacacattttaaaatatataaaaataaaaatgtcattaattaaaggcttggtcctaattaaacattaattaattgggttacaatttattttactattaattaagggtaattcatgtcggtgactgtggcgtgcattggcacaaatgtgagaacgatcgccgatcattggaccaggcattgtcagcttgatcaattaattgactaattaattaatgtaaatggtaattatcatttatttttgaagggatttgttcgatagagttaacgattcatttttcccgtcaaaattggaagtgtctcatgtcaatgggcatatgaaaggtgttccgtccggaccaaatggtggttgggcggatccaaggcaaattttttttaaataaatttccgaaaaaatgagatatttaataaaaaataaatttaattataaattttgggtacttttccgttatggggccgcactttcaacttttaaaagtgcggcctcataactggaaattgccaattttgtaaaattagaccagaattcttgacaaaaaggcaaaatttcaaaataatatgacaaaaggaattttactcttttttaattgtttagggaccacagattatgtgaattgaacactcatccatcagctgatgataatcccg

SEQ ID NO: 75943 - DNA, 752 bp, Heterodera glycines
atgcgatacattggtgagagcgcaaaagcaatttcaagcgtggttggttcgacagttccatttggtggcggtcttggcttcccatttggcagtggtgggaccacttccggcacgccattaaggcgaacggccagcagcggcgcaaatcgtcataatggcctggatgatggggcgatttctggcacgccattaaggcgaacggccagcagcggcgcagggttgactaggccaaatcgccataatgatttgatggcattggaaccgctcagagaagcaatgtatgtgccagcatcattagtaaatggggataacgaaattatgaaggaggttaaagaagcgagagcagaggcgaaatgcaaacacaaatgtaatgccaaaattgtaattttaatttttttattaaatttaaatcctttcaggatttggccaactgttgggcaaaagagaacagcagatgaactgatgaacactttttttcccattttcaaccttgtatttcctagggattattggatttggaaactttcatatgtttattctcctaaattgtttattttttttgttgaaaattctcttttacaaaaattttttgtattctaaaaaatgtttttcgtgattttctcaatttattcggttcaagtctaattaaggaaaatatatcaattataatttttacatttatacaacccaaaaacaacaaaagcataaaatttaaaacaaatttaaaaatgattagaaatatcaaaaataaa

SEQ ID NO: 75944 - DNA, 632 bp, Heterodera glycines
atgagctgcttattcacggagctaacggaagtgaggctttagtcccattttttggttttttgaagaccgataaagcgcaattttcaaaaatgagaagattttgaggttttttagtggttttttgcgattatctaaggcatttgtggggttttttgtggaaaaaaaaattaaatctgatcaagcattgattatttttttttttgatttttacatttgaaaattaatcgttaaaaatgattttttttttttttgccagccaaatgaggcttttcaaaatttccatcttccagactggctcctttccaccaaaccgcacgcgacacttcgaacaaataaccgacaacaaaatgttggcaatggcaagcaagcggcggaaagcaaggctaagcagctcgagaaaatgcgaatggaagatgaggtgaaaaaaaagaaaaacaatttttaaagaatattgagggccgcagggcatcatctggatttcaattgatttcaaatcggattaaatttcacaattagggaagcaacttttagttacgaaaaatctcgaaatatttaactaaaataatgagcaaaaatgccaaaataatgacaaatagcgacataattttcagccaaaatcgagcaaaaataaa

SEQ ID NO: 75945 - DNA, 218 bp, Heterodera glycines
atgctgatatttttgattgtcatcagcgctgtcctcattaattcagcattgggaaacggtaattaattaattataaaaattaatatcgaaaattaccgatgattaatcagcaattaaacttcattttttaataaaatatatacatattcatttcagtagatcaccctaaaacggctgtggataaatcaactaatgaaggtatagtaactattttttaa

SEQ ID NO: 75946 - DNA, 689 bp, Heterodera glycines
atggtttggcttcttgcggcttcatcggggttcaacggtgccaatgccgtgggcgacaacggtgtagtacaagttaatccgaccattccaccggcgaacgcacctctcccaccaaaacatttcgtcaatttgcgtgacttaaaacctcatacacaactggtgccaaatgtaccacgaaaatttggcaaaaatgccaacaatgggaaggtcagttcttgggttaaatatggaaatttaaaaataataattgggctaatttttcaaattttagaagaacggtggtcaatgatcgcatggatagaaacgaatatatatccgatatcgcccagcccaatacttgcattatggcatatgaaaggaccgaacctatagataggagtttgaattattttctattcatttttttcatatttggttgcgaaaattgtttttgtaaaattcattttcctttttccattatggataaattttttcggtaaaaatatatttttgtgattcttgaataagttattcgtttaatccttcaaaaaattatatataaaatttacggtaattaatgtatgccgtgaaagacttttacccggcgctcgaataatctaacgttgtcccgttgattggaatactatttgttacaccgttaattagtaaaaaaaattctcaatttaatgaatcaaattgtttcgataaaa

SEQ ID NO: 75947 - DNA, 155 bp, Heterodera glycines
atgtgtagagctcgacctggacctgggtccaagcctggatttttcctgggtccaggcctgaatttttcctggattcctggatccagttccaggtccaggtcattttttgtcaacatggattttcctggatttttgtccaggaaatccagccccag

SEQ ID NO: 75948 - DNA, 1478 bp, Heterodera glycines
tgaagaacaaatagtcggctgggagcccgacgactacgaaaaggagttggtgaagcgcacatggagcgacgacttcgactttttgtacgaattgggcgcttcgatttacgacgtaaggccaagttttattttaaaaattttgaaattggtaaaaaataaacaaattattgtttttaatgttatcaaatttaaaaatttgacttaaatttttcgtcttttttaatttaatattgaattaaattaatttaaaaaattatttaataaatatattaaattttttatataaattataatttttcagtatatttttgagcacaatcctcaagcaaagcaattattccccaaaattcatcggcatggcgacgagtggcgccaatcggccgactttcgctcccaggccctcaaatttgtccaggcaataattaattaatttaatttaattaattaaaactaaaatttatttaggctaaagaaaaaagaaggaaaccatttggaatatcagctgaaaaaatagaatatttcgaaaataaaaatttaaaacttttcaatttttctcataaataaatgaatttaaaaattaattaaaacatttgtttgtatatttttttggcttttccctacattaaaattcacttgctattaaatgataaattaattattaattagtattatatccaattaaccttttaattgggtgtccgccttcccatcagcagacaatcgcttatgctgctaaaaatctctaccacatggaggagtgtttgaagccgtctctgctcgccatcggtgaacggcacgtgcagtacgcggcacgcggctttcggcccgaacattggaacatatttttggcgagaatttcaacaaaaattatattggatgggtgtgcgtgcattatgcccccgccccttagtgctactcgagagtctcgatcgagtctcgactcgagaaaagtcttgggttttttcggtctcgagtctcgatctcggatttttcacattattagcttttgctaaaaaatttaatatatttaagaaattgttttttctctaatttttcaaaacaattttttttcaatggaaaattcaaaataataatatgattgatcgccatttggtcgggatcccgactcgggattggtctggatcctgactcgggatccgttccgatcgtttttccaaaataatcgggatttggtcgggatttggtctggaccctgactcgggatccgttccgatcgtttttccaaaataatcgggatttggtcgggatttggtctggaccctgactcgggatccgttccgatcatttttccaaaatcatcgggattgatcggcacttggtctggatcccgactcgggatacaatccgagggtctttccaaaatcatcgggatttggtagggatttggtctggaccctgactagggatccgttcctgtgggatccaaaatcatcgggattgatcaccatttggtctgg

SEQ ID NO: 75949 - DNA, 355 bp, Heterodera glycines
accaaatccctaccaaatcccgatgattttggaaagaccctcggattgtatcccgagtcgggatccagaccaagtgccgatcaatcccgatgattttggaaaaatgatcggaacggatcccgagtcagggtccagaccaaatcccgaccaaatcccgattattttggaaaaacgatcggaacggatcccgagtcagggtccagaccaaatcccgaccaaatcccgattattttggaaaaacgatcggaacggatcccgagtcaggatccagaccaatcccgagtcgggatcccgaccaaatggcgatcaatcatattattattttgaattttccattgaaaaaaaattgttttga

SEQ ID NO: 75950 - DNA, 677 bp, Heterodera glycines
ttggatttgcaacgacgtttggatggacattttcccctcttttgaccgtgctcaactcggcctcaaattggcacttctttcgccacgtttcaatgcgttggtggacaaacatttcaatggcaaaagcgaattgacaatttggagaacgatcgaaattcagaagggcaaaggaccagaaccgaagctgtctgtacaaatggatgacaaatttgtgccatttccattgccggaccgtccgttgcccagcaaaatccgttttaagcgccttcggatgtggtaattaaaaatcagagctatcgcaataaaagcattcatcccatttttaggtacatcggtcactccgtcatcgcttttcttcgttcaaatcaccaaattttcaacaaaagaggcaccaatttaaaattgtggcttccttcttcacataccacgaatggccagcggatttgggacatttttacccgtgaaatttggcactttttttcgacaaacattcgccacttgggcttttacaatggtgatcatttggaccatttgcttcgtcaaatttcgccgacaattctcatcgatctcaaccaattggtttcaatccattcatttgatttgttgcccgaggcgattggtgatgattttgatgtgccaaatgcaacaatttctactggtcaagcattgtccaaatg

SEQ ID NO: 75951 - DNA, 1002 bp, Heterodera glycines
atgaaccgacggtaaaagaattttaatagtcacacaaattcatcatttatttagctaacaaaaaactgttttctataatttcagttggatttgcaacgacgtttggatggacattttcccctcttttgaccgtcctcaactcggcctcaaattggcacttctttcgccacgtttcgatgcgttggtggacaaacatttcgatggcaaaagcgaattgacaatttggagaccaatcgaaattcgtcgcaaggacaaaggaccagaaccgaagctgtctgtacgaatcgatgacaaatttgtgccatttctattgccggaccgtccgttgcccagcaaaatccgttttaattaccttcggattgagtacttaaaaaacagttttatggcaataaaagcattcattccattttcaggtacatcgatcactccgtcatcgcttttcttcgttccaatcaccaaattttcgacaaaagaggcacctatttacacttgcggattccatcaccacacaccacggaagagcagccaatttgggatgttttcaacaatttctgctggccaagcattgtccaaatggttgcactctccgagaaaagatggccaacccaagcgattgcgttgcgatggttacaacgaacaaacggacttagattggatcaacaatttcaaggaggtgtggcctaacatttttgtgatttttagtttccaaattgtctagcattttctccgtgccaatgccatttcttccgtcagttacgaaattcattttcatgttcatgtgccgtcaatacaaatggtgccatttgaattggtgaacgaatcgacaaaggaaaagctgacattggccaaagcaatggaaaatgaattggacaaccgatggataatgaaacgatgcaaaattgggaataagaccgcggcggttcagcagcacaaagagggcgattggaacaatgtgttattttggcttttcagtaccactaattgcattgggtgagcaataaa

SEQ ID NO: 75952 - DNA, 560 bp, Heterodera glycines
atgtacggttttgttttgaaatggacagaattatggtaaagtacaaaaaatcaaggaaagttagaattgattggactcataaactctcataaaatgccaatgatgagttataattgcaattgaatcatcgtttttcagtcttctcgacgccgcttctcccgggccgagtgatcagcagaagaaagatgcatgaattaattaatcaattaattaatcgattgattgattgatgcgattatgtgaccgaaaatgatgtgatgttacattgtgttattgttattacttaattaccgtatatgctctaattatagcccagtctctattaatcccccattctctaattatccccccttttctgaggaggttgaaaaataatcccccatgggctataattagagcatatacggtatgttattgtttggatgtgtttgacctttgcttgctcaccgcaaattcgtccatttcctttgtattttatttatatgtaattacataactcattaattgtgattaatcgttgataaaattgctgatgataaaatgtgacgcaacacaataaa

SEQ ID NO: 75953 - DNA, 811 bp, Heterodera glycines
atggcaaatcgactgacaaacttttatcattgtggcccagtgccgaagtgagtttatgccgttttgcagtgtgcttttcaccaaaagatgcccgactaatgccgcaggtgccgccgatgcgcattttgttgccctttcacgacgattctcttttggttcggctggccattcttcccgcttcttccgtcctcatttccaaaatgtttttgcagccgaatttgtcagcgtccgagttgcccttggaactttggccaaatttggcccaactttcgcatttcacattgtaaatcgactctttcccattactttgcctcttccttcagattcattcgttcgttcttttgcgacgctttcgtttgtgaacattttaacgaattggaacttttttattatggtcagcgccttattttccgcatcactgacatggaatttgcgaatgaatccgagggaaaaacgaaaggggagaagaaaaagactgacgaaaaaggccaagccgcggacgaaggaagacaaaatgtcaagacgcatcgaatttcgccactgtgtgcgtttgacattcattggaacgaagtgcgggagaatgcacggcgagaagaggacgacgatcccgagaatctctgttgatttcatttactcgaaactgactttttttcttaaagaaagggaatatgtagtaagaaaatttgatgtctgatgaaatatattcatgcaaggtgatttcgacagtgagtgaattcgacagcatcagaaaaattgtgaattcgacaaggatttattttgaagtaccgataaatttttaaaaaatagaata

SEQ ID NO: 75954 - DNA, 376 bp, Heterodera glycines
gcatgcgcgtcgccttccccgccacccaacgcacgcgttgctgtgacgcgtttccttccatcgagaaaataccgcgagttcgctgtccaacgctggtcatccatggagtagacgacgatgtgggaaggattgggactgcttttctgacaattcttttcaggtaatcgaattcagccacggcatgaaaatttacgaaaattgtcccggctccgtggaaccgttgtgggtgcgcggcgctggccataacgacgtggaattgcacgccgcatacctggacaggttgagacagttcatcgactcggaggtgtgcaacccgcccacccacagagagcagttgaaaaatgcgaagcggccgcagacgaaccaacaggcgcag

SEQ ID NO: 75955 - DNA, 937 bp, Heterodera glycines
atgacggccacaaccattgcccaggatccgactccctcccctcggcgtgtttttctccgtgacctttgttccctcttttgttgcccgccgctcccttcggctattgttgccaaattggcttttatgccaccggaaccgagttaccgaattttgaccaacgactcgggacggtaatatttgtgctgagaagacttacagtcattgagttaggttaagttcgatggaatactgagacgaataattatgctcaatgtctttagtgcttaccaatttcgaatcatttaaaatactaacttttgcaggacgacgttggagctgatcgacggcaggacagagtggccacatgggcaaggttcgttttgggcgatacggcgatggccgttcaagcttcgctgttcagatgagctgaacaatgtcgaggtgttcttcacccgtactcaacgtcgcaataaaatcgcctgtatgttcgtccgacccttcgaactttcgcatttcacccttttgttttctcacggaaatgcggtggatattggccaaatgtgtaacttttaccttgggctcggctgtcgactgcggtgcaatgtgttcagctacgattactcgggttggtcattctctaatttttacaattttgggtttgattttaggttatggtcagtctacaggtcgtccttcggaaaagtaaccaattttatttcttacgaattcctttttttataattggctttctttgaattacattagttaactttttaattcaaattcgcatttttccattccttttctcattctacaaaacattttttgcctccagaaatctctacgcggatatcgctgcggcacttaaatctctcgaaagccgttatcaaattccaccggagcaggtcattttgtacggtcagagcattggaactgtgccttccatcgacttggccag

SEQ ID NO: 75956 - DNA, 80 bp, Heterodera glycines
tagagaaaaaaagataatgtttttctctggcactctctatttattggtacacatctcgttttttcggacggtgtgtgtat

SEQ ID NO: 75957 - DNA, 2420 bp, Heterodera glycines
atgttgtcgggtgtaaattcctccactgacacagagaactcgtacgagttcaggacgaaggttatgggaaagaaatcttttaacagatcgccacatggcacatctttcggaaagcaaaggcgccggctgttttggcaaagtgaaaaacaaacggcgcgtgcggctggcacatccaatatttttgccaacaatttaccttttgggtactgttgacagcagatggctgctgacagccgacggcttttccaattgaatttaatttttcataaatttcatgtttattcatcaatgctaatatttatcgtcttctttttttttgttggaggggctgagtcaccacgcactaccaaaaaccgtgaattattgtttcacgacggttttgaatatcgccaaaaaagtgtatcaaaagacgggggaactcagttctggaattgtgtcaaaaaagactgcaatggacgtgcacacagcccttttggccggacagaacctcttaatattgtatccgcacataatcatgcaagaaaagctgccaaacatgaagtgaaaatttgatattgaaaggattctatattattttgcgacaagtgcaaaaatttgctttgtttgatttctgtggcaagacaccgtagtgatgaagccccgtctctttaggcgcgactttcgaaagaagcggtgaaagatattgccagacaacaacctgatgcacaacctcgcaatgtaattgcacaagaacgtgcacaactttctgatgaagcgcggatgaatttgccatctgcttcgtcattacaacgctcaattgagcgtcaacgagaaattcccgatcgagcacgaattgacgcaaatgaaattgcgaacgatgttattgaggtataaattaatatcgagtcggcaaagggtgatttaatgttcatttttagggaatattacttatatccgagttcttcaggtacttattgtttgtattttaatctgaccatgcaataattaacattcaattttaatttaaatttgctattaaaaataggccttggatgcttcacttggtattgcccctaacagtgttatgttagattttgaaagaggtaaataaagttttttgtttgacttataaagttatagccgcaaaaatgcttatctccacgtgtacggaaacgacgtgcaaattcgcttttgtctttttcatctcggccagagcattaacagaagagtatcaaaagacaaattaattcactattacacaacaaacaacgaatacaaaattctggttagaagcttggctgccctcgcatttcttcaagaatttcaagttgttcctggatttaatcttcttcgcttaaaagctcaagaattgaatgttcaagttattcaagatggaggccaaccaatctcagtttttgactattttggaaggtacataaatgggttaacaaatataatatttgttaacacagaacatatgtacatggtcatgctggccatggacccttgtttcctattgcaacttggaatcatcatgaaagtataattcaagatatgggacgtacaaacaacgcacaggaaggttttcacctggccttgcgaacacagttcactagtgtacacccgccattatcaaagtccaaatgttttgctccctttggtaatcctagtaaatgtaggctcgtcactgtattgaagaaggaggaacgtatagctgctgataaacttcgacaatacgagttggatcccacaaacggaattcggctccgtgaacgaaaaaaggtttacagggacaatgacgtggccctgcgaaacctagtcgaaggatttgatttgcttgcggatccaaacgatgacgaattccttactcatctgagatcgttgcaataccgtctgatgcgaaatgattttgaaaattgggatgggcccgatgtggagtaattaactacattttcccgttggcccttgggaaaggcattttctttttttcaaataaagaatcaacgactttgttgccttgaaaagtccatattaaattaatttaattaaaaaataatttttttttgaattcaaaaatgatttttctaattattttaacacgattttattaaaaaggtgattcccaagtgtcgagtccgcaaatgtcgggttccgcaaatgtcgggtccgcaaatgtcggggttatccgcaattgtcaggtccgcaagtgtcgagtccgcaaatgtcgggttccgcaaatgtcgggtccgcaaatgtcgggtccgcaaatgtcaaatccgcaaacgtcgcgccacgattttggcccattccgaaccccaaacccggattcgaacaaaaaagtcaaaatccatttttcaaaagattcacattttattttgatttttagatttgtttttgaagaattgatgcgagcctgggcgaagtattggcctctcgagtga

SEQ ID NO: 75958 - DNA, 1476 bp, Heterodera glycines
atgattcgtaataagcttgaaagtcaacaaaaaagtcggaagaagcgttatatttcagacatttcaaacacaaatgaggatgccgtgaatttgggagtggaatttggcgaaccgaatgccgtgataactttcgacaacgttgaacaacagactttgaacgaagctgaagtctcagtaatgacctttgagcgcggaaaaacaaattttgggggacattgcctatggttgaatggtacgtttgaagcgacgcaaaaaaatagactccaaatgttcaggatttcgttacacacaccactcaggggaccgttggagatgcacaattcgtagttgctcagcatatgcaaacatcacaaacaatgacgaaattggagctactggaaccttgggtcaaaaagaacacaaccacctcccagcgcctcagaaacaacaagtttgtttaaatttaaaaccaaataattaatgctgtgttaaaggcggaatcaaggcgacagaaaatcaaagaaagtgtcctggccgagccgtgtctgaagcccacgcgacttttggcaaaagtgaggcgatcagcaacagatgaagcatttgtggccatgagttcaaacaatgcgttgacccaaatgatgcggcgtgagaagagaaagttgctgggaaacgtcgacgtgcagaacccactggcctttgtcatcccagcaacgttacgcgaaaagggcggtgaggacatcgtcttgtatgacagtctaaatgtcaggcaaggcgaaaaggacgttgtccttattttcggcagtgttaaggtacattttttggctataaaattctgtttgttattggtattcctttagactggacattttgcgccaatgtggcacgtggcacctcgacggaactttcaaatgcgctccagcgatgtgggagcagtgcttcgtcattggtgcgtcagtgaatcagaaaatgtgcatctgtatgtggtgtcttctgcctgggaaacagcgacgctactacgaagaagcactgaactttctccgtgaacgcatctctccggaggtcccaagcaaaggtcaaccctttgaaatttacaaaaaaaacaaatcaaaaatgtgatttttagttttgtgtgactttgaaaaggccgaaattacttcggtccgtacggcatttcccacggcacagattaagtgctgcatgttccactacaggcaaagcctttacaggaacttcaaacgacttggtcttgtccatttgtacggtgagaagacagaacgtggggaggaagttcgcaacacattccggttaaaattttggtgaaattcaaattccttttcagaagtgttcttgctttgcctcttttgcctcccagcattgtcagaatggctttctcaattattttggcgtcagctcctgcaggaatgcatgagtttttcctttacttctctcgaacatacataggcttgacacagcgtcagttattgaatgtttaataaa

SEQ ID NO: 75959 - DNA, 1863 bp, Heterodera glycines
atgataataattttatcaacaaaactgctaccgttatccgttctgctgcttccaattatgcttggcattaccaatgccgctggcatcggcgacagacaaaaaagggcggtggaggaggaagaacaaagaagcatgagcgaactgtgtgccatccatgaacagaagttcaaggagttattcaaggttaaaactggaaatgccgaagttttatggatggaaaacaaagagaagaaagcggaggaaaagcaggaggaaaaggaaaagcgggaagagaaagcggcagaagagacaatggatgctaaaaataaagcatggcttagcactttgttaggcaattatttgtgccaaaaattacggggcaaaggcggggagcaaagacacggaaaaaataatgagaaattggattatggcgtggagaagaatgtgtggtggaccacgcctgaaaagaattcaaatgaatttaaagttagggcggagaaaatttttggacgtatcagagtcaaaaatgggatcagtgacgagcaattgctggtatgggaaaagccagggattcggggaatgggttcgggtttttttttatttaaaaaaatccccattttatattttagaaattgttgttttaaattgaaaaattgattattgtgtttggtcaaaaaccgctaattaactacaatctaacataaattcttaaattttctccggcggatgtcttgttagggttggaatatcggattcgggaagccggaattctggatttaggactttgaatttttggcgactccggacccacccttattgaaaattatccttagtgcaagcttttttgaaaattgtttcgaacaggtgtcactgtccgagcttgtgccgttgaaagagcgcggaggcagcggaggtgtgtttttcagaaccaaggacgacaaattcattttaaagaatctgaaccctgagcatgatgagcccgcaaaaatggatgaagtgttagacaaatatgcggcttatgtaatcgacggagtgatcagcggtcaatccgagaagggcaagcagtccacgaagaaaaacagcaacactattcacaaatccatgatgaacaccatgttcatgtgcttcaaaatgaagctgtatgccaagcggaaggaggacgatggaaatgagaggaaaaaagtaagataattaaattttaatatataattttcaaacaatttaaattctgctggcaattgaattttttattttaatttatttggaatttattccaaaatttctaataatctaagaaaatattatctgcatcaattattttttcgctaaaatattttaaattgattttttaatgaaaaattttgaattgaaacgaataataatttttcaataaagttttaattttttttttctcgggagagattatgttcgccccttggtcatgccggtttattagtctgataaaaattcccgactctttgatttcggcattccccggctttccccgcccaactctttttcaacaatttcctaattttaaggtgattcgccttcacgaattacaatttgtggtgctgaacaacgcatttgaggggctcaaattagagtacgctacactcccccatgtcgtctctcttcccccgaaaaaaatgtaattttccaaattttttttttaatttcgaggaaaaaaagaaaaattttaatagccaatttgcgccgttatttgagcggctactgggagccataagagcatgcacaatgttcatgatatatgttaagttttcgcaatcgccgaaaaacgcgcgccgaactggccgtgccgaactaaccccgacccatttgtacggattttctttaaaaatgataaaatatgtatcaattaaa

SEQ ID NO: 75960 - DNA, 75 bp, Heterodera glycines; identical to SEQ ID NO: 52311

SEQ ID NO: 75961 - DNA, 170 bp, Heterodera glycines
agccctaaatgaatgaatgatgaatgagatgagtcggacggagaaagaatgtgctgcaacccaagaagagaattcaaagaaaaaaggagatggaaatgattgaaatttgtcaaaaaataaataaattcatagcggtagaaaatttttgataaataaatcatttttaaaaa

SEQ ID NO: 75962 - DNA, 1630 bp, Heterodera glycines
atgtccaactttttgttccgtgccgaaacgcctcagctgaattttgctgaggttgaggtagaaaaaaactgaaaataaaaaaatactaatttattttaaattttaggaccgtctgaggcccaacccaaatttgttgaccgaaaatgtgacaattccggaattttttgaatatgcgccgattcgggaccgaattccggcgcgaatgagagaaatggtaaaaataatgaaattttaatattatatttaattttattaaaaatgttttttaaattatttaattcattttatctttttcaaatattattaaaattttatttaaattcataacgaaaaaattattttcctttttttattaatttgttttttgggattatacaaaaaaattttttctaatatttaaatatttgatatcaaactgtgttttattttgttttgttttctttttattaatttgttgggaattggacaattatttttttaatatcaaaaatatgttttaattttcttagttaatccctttttatatatatttattaaatattttacatatttaataattttgcaaaaaataaaataattcgaaaacttagaatttcgaaaaaatttctaaaagccaataagcgttgaaatatattcaggatatgggatgagaaggattaaaataagttaattctcttccttttagtttccctggcaaagtttggtaagcttctgatcactattcgaaaaacttttggggcaaaagtatttcaaaaattagaaaacattgaaaatccaaaaaattttaaggaaagcctatgggattgaaaaaaattaattttttataaataagtctttatctcagctgttatcctgcaaaatctggtgcacttctgatcactttttcgaaaaaattatgaggggattaaattttcactaaaatataacttttattttaaaatgttttatcgaacttacaattaggtctttctattagggttcctccccgagcctcggggagcaaaatgtcggggaacggggaggaaattccccgaaagaatttgtcggggatggctggagaaatttaaaaaatgtcggggagcaacaccttcgtcggggaggaaattttcataaaaagtctaaaaaatacaaaaagaaaaagtccagaacaaaaaagtcttaaaaactcatttaaagattcgtccatcttatttcaagtgcaatttacgactttcgtaattccccgaaacatgtcggggaggaaccctactttctataattaataaagtggctccaactttggtgggcacatctccggtatgggagtcatttatcttgaaaatatttccacgcttaatggttctaacattcttttgaaattctgagttttccatcttattttattttgttggaaattagacaatttatttttcaattgcaccctgtcaatttaattattaatattttattctttgttattcattttttattttttccccatttcacgagtcattttgttcgtggccataccgatcggttggcctcgtacctcatgagcaatcacagcgtccaccacttcgccaacacctccgtctccatgtacatgcaaagtcaattctctctggacgagccccttatatcggaggtgcag

SEQ ID NO: 75963 - DNA, 622 bp, Heterodera glycines
atggtggaagttcaacgaatttatgccttcttggctctgttcacatttatttattttttggagtccattggcggaacgtaaaaaatttttaaattgttttttttttgaaatttaaatatttttttcaggtatatgatcgcttctgttcaaaacattgagcgacaatttcgaataccgtcaaaattgtccggttttctcgtctcagcccgtcagaattttttcaaaattttttttttaaattttttaaaattaaatttccaatttttcagatgacatttcctatgtgctcactgtggtttttgtttcttactatggctcaagaggtggtggaaaatggaattattattttttttattaatttaaattttactgttttttaaggtaaggggtaaattatttgagaaaatgtttaaaaattcgaaaaaggatttaaattagctcatgtatgtactaattcattattttattatagaaattaatcaaaaatttattatttatttaatttttaaattttgaaaattatgtatttgtttttgggggcagctcacttttaaaaattttccagcgattttttgggaaaattttttgacgaaaaacttagtgtaattcttcgtaaaataaa

SEQ ID NO: 75964 - DNA, 1773 bp, Heterodera glycines
atgttcaatgatcgaatattaagggataatgtgatggtgttgtgtatgatgatcattattcttcaatggaatgtgaggatggtcgtaaaaaatgggtgcgaaatttaaaaaaaataaaataaaaatatacccatgccgtaatggccatttcgcagtgtcctaacaattcgtacaatgaggaacttgtaaattttttttctaaaaagctagaattatctctttaaaataaaaataaaaaaatttttttttgattttttcgttttttttttgaaaaatgataatttccatgaaaaaaacgagaaaatttcaagaaaccaactacaataacatgttcgaagagttcatctcgtttggtcaaatacaatatttatggccaaattaagtaaattgatgatcgaattttcaccgaaattaaaacgagacaaaaatgttcgctcggttttcgatcactcaaacttttggtcaaattcaatcaaaacagatctacgatttatgacaatggcgtcattattttaaaacccagacaaaacttttcatgaaataattaatgcaattttagaaatttcacaattattttttcactaattttttattaaaactgaaaaaaataaaaatttatcgaaagattttcatttctataaaaatattttctgtcaacaaacttaaagcaatttctgcatcaacagcaaaagccacttgaaaggaagaagaagcttttccctagaataaactttcaataaaataaaatgttttgtctggcacaaaaaaaaagttgcgaatcatccaaaaaaaatttttcaaaattttatcattagaggcacaaaaatttatattatttttgaccaaaaaataaattaaattaaattaaaattttctttttttttactagccgacgaagatgaaagtttgaagcgcatttttgacatttgaaaaaggaatttttcgagccaatgaatgcatcaacaaaatgtgtcatggcttttgctttttgaaaaaagggaaagggcgcgcgaaagaaattccaaaatgaaagaaaaaaaggaaattgtgaaactgaatgaatgctatctttccattcttcatttttagcataatttctcgaatttttgactaggctgatgttaaaatggaatttaaaggatttaaaaggaggaaaactataatatttacacattttaataattacaaatgaataaaacggataaattttagacatactcaaattataaaatttttaattatggcctaatttgggaatgtttaacccagttgagtactaaaagttacccatttgagtactaaaagttacccatttgagtactaaaagttacccatttgagtactaaaagttacccatttgagtactaaaagttacccatttgagtactaaaagttacccatttgagtactaaaagttacccatttgagtactaaaagttacccatttgagtactaaaagttacccatttgagtactaaaagttacccatttgagtactaaaagttacccatttgagtactaaaagttacccatttgagtactaaaagttaaccattagagtactaaaagttaaccattagagtactaaaagtatgtatgtagctgcaactagagcccggagcaggaccggatcctgcgcaggattttgcaggatcccagtctgcaatcctgcattttttggaaaatgcaggatttgcaggattaatccgggccggatccggtcctgcaaaaatttttgaattccaatccctgcacagggttccgcaaatttga

SEQ ID NO: 75965 - DNA, 715 bp, Heterodera glycines
atgctaaatttaatatttctgttaggtctcaactgacttcaaaaataaatatttaattgacccgagttctgcgtttatttgagaatttggtcaagaaaaaacaattgtatgtggcaaaaatcgtataggtaaaaaacattaaacatttaaaaaaaataccaaatggacatatttataaaaaaaaagcttcgataatttatgccaaaaaatcaataatttaaattttatttttagtgcctggcttgatactgatccattagaaagtgacaatgataattagatttgtaattatatgaaatccatatttttttcctggactgttggaggcctgaaacgcatgaaaaacatgtttttagcttggtttgaagcctctaggaaggagttcttatccatatttttccatatttcgcgatttatttccatattttggcattaagtcctattaaacggcccccatcagctaaattagccgttttgaccccaaaggccgtaaaaatttccgaaaaagacattttttagcaaaattttgtcgaaaaaattgattaaatttaaattttcttaaaaattggttaatttatgtcaaaaataagcaaaaatggaaattttcgattttttggtttgttttctctagaaattgctttttttcttctaaaacgagttcttatacagtatttagccattttagatgtattttactagaatttgatgaatttga

SEQ ID NO: 75966 - DNA, 1339 bp, Heterodera glycines
atgcttctcgacctcgtctccatttcttttattctctttccttccattgggcttttcttatttttgatttaccaaaaaggaaattctgctgctgatgataaaaatgatgactcatttgaggacaaagtgaaccatttatcattttaatttattcatttgtctctgtttgtttaaaattggatttatacgcaaaatattccaattttctaatggtttccctattttcacttttcatttaatgatggcaaccaaaatttattaagagagaagaaattatgacaacgaaaaacacaaaaatttttaaatttctaagttcttgcgagtttactgggtttatatttccacatttttcggcatgttttaagagaatacgcgtccaatatatttgatatggcctatgattttgagcaccgttaaatactcaattgttttttacgcatccattcattttttcaatttttactttgggatctggctattacagagttcccaagtgtctttctcttgtgtcttccctttgaaggattctttcaaattcccgaattttattcagaaaaatatgctgtacgaattgtttgggattgtgcacagtttccgttcacatttgaacaagctctttttggagtgtgttttagttggcgaagtgccaaaaaattggagtgacaattccctttttgcattgtttggcgctgcattgaacggacagattgaaacccttaaaattctggtaattgcattcagttttagattaaaaaataacaaaataatttattttattaagtcggaaagcaacgacgtaaatctgagaatgggccaactgaaaaccgctggaggcacaatcggtgattaaatacaatagcaagatctggacttgctggccggatccattcctaaatttttctctgatttttttttccaaaaaatataggtccagatcagtctgaaaacagaatttagacatgaaaaatctgggttatttttcattgtccagctttgtctaattctgaagtcactttattagatataaattgtgtgtttagacggcgtctcattgctttggattgcatctgccgccggccattttgaaattgtcaaatttttggtaaaataaataatcaatttaaaatattaaaacttaattttttagcaccaaaagggcgacgatgttaatggaaatggatcagtgacatttggggatcacaaaataataagtgacaaatttaatttaattaataaaaattgaaatgtgataaaattccaagagagggaaagaggaaattcctataaaaaatattttattttttaattatttttttgtattacctaataatacaaataa

SEQ ID NO: 75967 - DNA, 2406 bp, Heterodera glycines
cgcaaatttgaccagctcaacgcgtgcaacagtgaccagttcgacctgatcgaataccaaagggaacgcggcggcgaatttgccctcggcagcgatggcagcggcacaatgccattgaacaagaagcggcagcagaaagtgatcaaactgcgccagaagcggcaaaaagtgctgatcgacggcgccttccgtgccatccccatggtcgacacaatgtgccgcattgtcgagagtcaagactttgaccggaccgacttgttcccattgggtgtgtgttgatttcactcactgtctgactgttcacatttcaatttttggaaaacagtaagggaaacgatctactccgtaaaaatttaatttcctatggttacgggttaatccaaactctgtgggtttttcttccaacaaattcacattgctccgtttttcgtcagtgtttcaattgccattatcaattttctttttccctcaaaaaaggtctcgagccgtcggacgacgaaagttcggacgattcctttccgtcgttgggtgaagaaagaatcggctgctcaagtagcagaagcgccgtcggctacgtaccgccgccccaaacaccgccggcgccgtcgtccaacggttgcggcgttccctccgccgccgccgccgctcccattcaaaacgggggctgtcggctggagctgtacctgctgaagaagcagctgcggctcgagagttgtcggctcgtccagcgtgccaaactgtgcgtgcccatcaacaccaccgcccgcgagtacaaaaacagtgtgggcgcagcgctacgtgtgcgagcaaacaaccacagcagcagcaccacaaccaccaacagtgggagcggacgttgcgggcacagcctcggcagggagcagcaacggcggatgcagcggtgcgcatacatcgcacagccccaacaggtgggagaattgttttcaaaaatgaaatatttgtccggcaaaaatttttaaaaacaatttttatcaatttttttcgtatttttataatttctgaaagcttaaaaaccaagatattcctttgacaaatgcatttgtttccgtttaaattaccgcttctaatttgtctccaaattcacagagccatcatttgccgtcttcgtcggatggcaccggcgtggacggcaacaccaacggtggtggcggtggcataccgccgtttcgttgtcctaaccaatgtttgccctgggcccggcactgtgccgaccacatcacgtacaacgtggcgcagcagttgttcaccttttgcaagtggcgtttgtgcaacgaggcgatgccaaccacggacctggtactgtttgatggactgtgccgacgccatttttacgcacaacaacagcaccaaaatcaacaacaacatcagcaacagcagcaaaggcatcagttggtggcaccgaccgagcagcaacaacacccgcacagactgcaacacaacaacaacggcaacaacagccacggcattgtcaacgcgatggcacagagcgtaagggagggattcatcggaggaatttcatggcattaagagcattaattgggggagatttatacctgccatgttgaaaatgcacataaaaatatggcgattttttagcatgtttgtgcagcttgggtcgctcccgtaaccgcaggagggagggggggttcccacgccaccccaaaatgaaaactaaaagaaaatttttgaattttcctccttaaagggcgatctgcggttgtccatgctgcaccatggcgttgcttgtcccgaccattcgctgaagaagaattgccactgctttcaacagcaccaacaacagcagcagcaattcctcctccaccaccagcgcaccgccgcccacggcgattcgtcgctgtcctccgccgtcacaattcgctgcgaaccttttggtgtgccgcaccacgcgccgtactgtcccagcagtgtgccgcccgcaaaccgaggggacgaccatctccatgaaagtgcgttcaggacaacaccccaaaaagactaaatatcgaagggattgttaggcccgtaaccagaaaaattttgctgaggaggggggaaatccgaaaacctttttatgtaaaatttacaaacgaatttaagccatggatgtgtcgttggcctccgtcgcgaaggacctcggcttcgacggccacgacctgaccgacatgttggccaaactgccggtcgaagagggcttcgagggcgacatggacccggacgaggacaccctgctcagtaattgcccacaacattgggtggctttccagtccaaagtgtccccatgcttagcagacatcaacaaggaggactcggacgaggcgccccccggcacaacgctgggccacagttgggccgacgtggaacagtttctgctcgagcaggaggagg

SEQ ID NO: 75968 - DNA, 306 bp, Heterodera glycines
atgcctttgctgctgttgctgatgttgttgttgattttggtgctgttgttgtgcgtaaaaatggcgtcggcacagtccatcaaacagtaccaggtccgtggttggcatcgcctcgttgcacaaacgccacttgcaaaaggtgaacaactgctgcgccacgttgtacgtgatgtggtcggcacagtgccgggcccagggcaaacattggttaggacaacgaaacggcggtatgccaccgccaccaccgttggtgttgccgtccacgccggtgccatccgacgaagacggcaaatgatggctctgtga

SEQ ID NO: 75969 - DNA, 1603 bp, Heterodera glycines
atggaaaaggggggttggctcaaccgaatttttttttaattttcgggaagggcatccgaaattgttgttgttgtttttttcggacctaaatgttttgttatttttctaaattttcagccccgtggaaaacaggaatttatagtcgttttgcgccaaaaacaatttgttaccttgtaaacaatttttaaaatttgcgaatttttggactgcggttgtctgtcatacatccaattttaactttaccaaaaaagaaaaacttttttgtttgaaaatcaattttgaggtccggccgcgctgtgttccaactgtacgcggacagtgatgcgcaacaacggctgatcaccggacaggcgttgcgcgcggggttccaggcacgtggcactgaatactgaatttctcataactgcttaagtgggcagttttgccgtttgttcgatttgtgggtgtgtccactgtcagatggcctttccaaggtcccaaaaaagtttccggaaattgtccgagtatccccaaaattttttgaaaatcggaaaaaaatttgcgactactcggacatttacacccttgcaccaaactaggtatttcaaatttaacttctttttttttaattcattctaaaattgtatattcaaaacgcattttcagggtggcataattgtcgaccgcccggactcggccagacatcgcagtgtttttggttttaagtgccggcaaagcggccgcatttgggtagcatttgaagtattgtaaatgatgcccaatttttttttttgttattcgacgccaaagttgaaaatgcttttaattgagtgtcaatttatggaacataatgcatttttgcttccaaaaaagcgggtgcatctcatttccacagccccccccctcccccttctgtcgtccttccgagaaaatttaataatagaatttttcaaaaaaatctagtaataaaaattttttagccagaaaaatatagtatctttaaaattttgaaaaatgatgaaaataatttttaaattgcaaatacagtttgcgagtttgtcttgtttagatggaaattttctcgagtgattggaaaacgaccgacttcgaaaaattgtctaattgattctcccctatgcaaaaaaatttggcacgcattttgccatggtaaaaaaattaaaaaaaaattctgtttaagcccaagtgctcatctgttgagaacatcgacaaagcaaatgggtgaagatggtgatgatgatggtggaaatcagcagcaaattgaaaatgttggacgaacacggccatggaaaggggcaaacaaaaagaaagcggcggcatggaaaggcggtgccggcggaggacgggtggaaaagagacggcagagacgcgaagcgaagagagagcgcaggaaaggcggagattggcacagagatggacagcagaagagacaaacagaggaaaatgatggggaagaaatggagcaatgacagagagaggaagagagagagagagagcacaggaaaagtggagagaaattagagatggagaaggacagaagagagattgtggcgattctaattcaaatttttgtttattgttttcttcaattgttactttaaataaa

SEQ ID NO: 75970 - DNA, 902 bp, Heterodera glycines
  unsure (1)..(902): unsure at all n locations
atgcttattttcaaaattaataaacaagtccatttcacatacttaccatgggccaatcaagtcgaaaatattaaatggactaacaagggaacctcgcgaactgttagtcaaaaagtgggtataaatttggtatcattggatagagcagggtcgacttctgctgttgtgaatttttaatattagcggtgtgagatcaaaaataaaaaagttatgaggcctcaaaaatcgaaattttagtataagagactacttaccggctttngctaacttttcccttaccctctctcactctattcccataagatatgagggtctacttataaacgcattcaaaatgtttttctacaaccttatcaaataataagcaatcaaaaaggattttttacgcaatgggtgatcataacccgacgacttcttcagcttcgataattccagacgattcaccggtaaatgtacaaaatcctgaaaattcagatagcatttgattttaaggtcgatgaaaaagatatgccggcaacggaccgcgcgattgaaaaactttttgatggaattgacgcaatttacttcatggaaaacggattcaaagcgattgcgcacgaattggaagtgcgtgccaattggaattcttacaaataaacataaaatttttgcagtagatttagttaaatttagaacaattttagaaactttccgccatttgttccgaattggaaattgacgagttggaaagggaacggtttaagcttaaacggcaaatgcaaattgtgtcgaggaaaatgtcggcgttaatcgtcaaaaattcgctgtctttcaatcgacaagtggaaaattatgaaagtgtccgaacaaatgctgaacatttgttacgaataacgaggcgaatgccgaggtgcgaagaatga

SEQ ID NO: 75971 - DNA, 569 bp, Heterodera glycines
atgtggcgtggcaaaagtgcacattttggcacccggcgacaatttgccattcacaaacaattcggtggactttgtggtcagtgcccatgtgttggagcacttttgggatccgataaaaaccatcaaagaatggctaagggtggtgaagccaggtaaaacgggagaataagtgtcgaatgcaaattaatagctaaattgcttaattaaaattccaaatgtttccctagggggcttcgtttacatggatgtgccgcacaaagagcgaacgatggaaaacaatttgccacggacgccgctcaccgaactgcttgaacggcacgaaggaaaacggaagccgaccaatccggcggaggaactgaagccggaacggcacaagtcggtgtggatcacgtcggacttgctggagttgtgccggcatttcaattggaatgtggtggaatggcgagatgtggacgacaaagttggaaacgggttcaccattgtgatcaaaaagaaatgaacaaacagtggaaaaaacagaatgtgatgaaaaggaacggaatggcattgtgtacattaaatacaataaa

SEQ ID NO: 75972 - DNA, 1692 bp, Heterodera glycines
atggtttcggactttttctgccccaacacgggcggagtggagacgcacatttatcagctgtccaagtgccttctgcgcaacggacataaggtaagagcggacatgtgctcccaaatggatttatccgggattttttagaaattgagtttgaaattttaagtaaaatatttttactatttaaaattcatctctcacttcattatgtgggtgtcaaaatatttattgcatcggaataataaaataaagccttcaaatagccggaaattcattaatttctaaccggtatattttttgaaaaaatatcggcggattgttttccatgaaatgctgctgaagaccaaagcaaaatggtagtttttctgtatgtgtttttttttgttgagaaaagtaatattaatctctgatcacttatctgtgattttgatctatgatttttatcatccgacggattaaatttacgatgaaaaaaccactaaaaaaacgagaactaaacttcttagtctttttttcatctcaaagttcgagcgacaacacccgaaaattaaaaaaaaacaggcggggacgggtagcaaagctttctagaagaatataaaatcaaatagttgttatatgcaatttcattttctccaacgtttattcaagaattttctttacaaatacataatcgacaaataataataaaatcttttaaattggtttttttttaaattgaatttttctatgcatatgcaatttaataacgaagaaattattgtatctctgaatacgtgtaaaactaaattaaattttcattgcttttggttgtatattaaatttaaaaaattattttcaaatacaaataaagtatgtactatgtttttgcagttttgtatattttctcaaggttatcgtactcacgcacgcgtatggtcagcggaagggcatacggtacctgtgcggtggaacactgaaggtgtactatttgccaggcttggtgttgggcaacaactatttgccgtctgtgctcggctcgttgccgtggttccgacgcattttcatacgcgaacaaattcaaatcgtccattgccattcggtaggaatcgcattttttattactataattattatgtttattaaaaaataaaattaattaggacaataataatagcatataataattacatttaattcttgttttaatcaataattaataaggatgggaattttatgtaagaaaaatcgcgaaatatgtaaataaaaaatgttaaaaaaaatgctaaaatatgtaagaaaaaatgtacaaaaatcccaaaatatgtactaaaatatgtaaataaatttttctaaatggttaaaaaaattcctcttaaagggtgaaataagcacaaattgccattaaaataatctaaataggcttagagatcacttttagtattttaaaaattatttttgatatctcacttttggaaagaaaaaccgattttttcggtaccttttctaaaaaaaattttaatttttcacaagaaatttatataaagtgtcaaaaatccacaaattgcaaaatatgtacgaaaaaatccaaaatatgtataaaaatatgtacatatgtaatatgtagaaaaaccttggcctaatgttttgtcagcattggtggatttatttgtgatcttcgagggttgaaatgggattggttggcgcattgaaatgccacaa

SEQ ID NO: 75973 - DNA, 641 bp, Heterodera glycines
atgcgccaaacttacggatgcaatattgccaatacaaagcaatgtgatctcttcagagccgagaaaggcaccgaccaaatcggcaaaaatgttggtgagtgtcgaaatgagaatggccgggcccgtgtcctaattgattgattgattgattaattaattagcatcattagcaactagcataatgattattagggtgccccattagttttgcccgtataaattaattaattaatgaataatttttctttattattaattgtttttcattgtttactctaattaatttggcattaatattaattaattggtctttcgtaccaattaattgattaattaattagtgggtagttggtattttgcgctaattaataaaaacattaattagttaattggcaatcccaaattgaaaaagggattattaacgttttaaatgagggtaatctgttcaaatattcaacacctctaacacttcggccaactgatcgaccaccgccaaattcaccgacaaagcgtcgtgtgccattacagcgcggccgccttcgtgccgtcgacgttttgaggctaattgccaagaatggatcattaggaaggcgtcatcaacgcctggagaattaaataaattaaacacgaatttatacata

SEQ ID NO: 75974 - DNA, 2644 bp, Heterodera glycines
tcatcatcagaagcgtcgtcctcaaatcgtgttcacctctttggacagtgtggagatggttgtgttgctgtaccgtgccgaacgaattggcggatggaaagacgacgacatcaggcaaaacaattgaaaattggcaattttaaaaattaatttactaaattcggcatttttaataagatttaattgaatagaaagtttttatacattttaaacaattttttaaataaaatattttacgatattacaaaaatttgcaaaaaaaaaaaaaataaaattattgaacttttttcattttacattttaatttatcatttgaattttcattttttttaaagaaaaaaatcttgtttaaatgaaatatttttttttcgaattgaaaatttctaaaaattttccctaaagtttataatgagaactaattatgtgttaattaacgactaattaatttcgaactaataattggtcaaatcaacatcaatttcagtgactacgagatgagcatctccaactacttcaaggagtacgacgctttttgacagcaaacacatttaataataattgcccttttttgcccatatttagcaaatacattggccaacatattcgcgttctgaccatctcgacatcgtaagttttgacactgtttaatggaattttgaattttttgggattatctcaaattttcgggcaatttttcatccattggtactccatttttggcactttttcatttctggcattttatttttgccattttcactcttggagttccacttttggcattttttgatgttcagcattccatttttggcactttttcatttttggcattgtatttttgctattttcaccctaaaacgttccatttttggcgttttttttccattttcatcatttgcataacctttttgccattttcacccttggcattccacatttttgccattttcttcagttatgtccaagtggaggtggaccgtgccggcaacatcatccgctcctattttggctttgggcttgccgtgatgattttgtgctcactgttcagcaattcattatccgcttttttcatgcatcaattctccatttataaggttaaaaaaaaattaattttaatttttcaaattcggtgtgcctatttttccaaggccccttcattaccgtacacctaatgcaggataattctctctttatcttgggaaaaattaggggtttctcacaactagagcccggacatgacaccggatcttgtcagaattgttccggacccctaatgagtcctgtcaaacaggatttctaatcctgaaacttagtgaaacctgttctgaaaatccgggctcctctttttaaaacggagcatttttaggaaaaaattaaaaattaattaattttagaaaataaattaatcgctaatttaaaaaataaaagaattttcaaaaatttctcgagtgtctgctttattttgaacaactgtacagtaagaatgcctgggtggggaaggctttacaattagctcattgtaccgtaaaatgtatacggtaaacacagtaatggttggccaattaattgactaaatcatttgtctaattgtttttttttccatgtgcagttgcccgtcgctattttcgcctgtctgtgcccgttcatggccagcggcactgcgcttggcattctgttctttgccggcgttcggcacagttcaattttggcggtcactccctttctgatcttggcactaggccagtcaattaattcattaattattcaattaactaattggctaattaccttaattatgaatttaatttgtgtgaaaaataaatgaatttcaaattgttgaaagttattttataataatttttatctttatttgaatggttttttgtttaaataagtttaaatattattttaataaaaataaattcaaaacttaaaaatcattaaataaatttattattctatttatttaatttaaatttaaataaattattattatttttattatgtataaattcgtgtttaatttatttaattctccaggcgttgatgacgccttcctaatgatccattcttggcaattagcctcaaaacgtcgacggcacgaaggcggccgcgctgtaatggcacacgacgctttgtcggtgaatttggcggtggtcgatcagttggccgaagtgttagaggtgttgaatatttgaacagattaccctcatttaaaacgttaataatccctttttcaatttgggattgccaattaactaattaatgtttttattaattagcgcaaaataccaactacccactaattaattaatcaattaattggtacgaaagaccaattaattaatattaatgccaaattaattagagtaaacaatgaaaaacaattaataataaagaaaaattattcattaattaattaatttatacgggcaaaactaatggggcaccctaataatcattatgctagttgctaatgatgctaattaattaatcaatcaatcaatcaattaggacacgggcccggccattctcatttcgacactcaccaacatttttgccgatttggtcggtgcctttctcggctctgaagagatcacattgctttgtattggcaatattgcatccgtaagtttggcgcatc

SEQ ID NO: 75975 - DNA, 612 bp, Heterodera glycines
atgaacccccaaaaatgggccaaatacagtagtaagtgtcccaaaaaccgataccgtaacccacctgtatgtttatacgttgtccgaacactgtagaagtgggatagtcaagctgcacattgtgactcggttgctggtgcttggccacccgtcgttggtggtctttgaagccgtcctgacaaattgggcacaaaatttgtgtacaaattaatcaatgaatatcatggcaaccgtgccaaaaacgacggcatgagaatgccagaaaaatggcaaataatttgttttaaaaaaatttctaatttggggttttcagcgtcgaagacaattttagacattgaaattcaaggggaatatttttttctacaatatgctcttggattgatatttatgtagaatttttcttaatttgtgtccttgaatgagtcaatttccagggacacccctcgagggaattccaggacgaaataattccatcaaatgatcgcacataaaacagtcggacgggctcattaattgtgcaaaaacggcgacaaatgcgcgaaaacggctcatcacgttgagtgatccgattgtaaatggtcaaattgttttggatcagttcgtcgacctgaa

SEQ ID NO: 75976 - DNA, 1767 bp, Heterodera glycines
atgaatgataatgatagggcaattagtaatcatcggcagaaacaacaacaacaacaacaacaaggcggcgacatcaatggggcgattgtgattaataatttcactgatcaacaacaccaacaccagcagcagcaaaagagtgggtttatcagaaagaaagaaatttaaaattaatttttaatcaaaaatcattagccttttaaatgtacagtttgacatttttaatgtacttaaaattcaaattgatcgattcatttaattttgacattttaaatgcaaatatatccagaattaatgcctttttgtcattgatcggggttttacaaattgaccagacagagatttatttacccaccccttttatccaaatctgatcaatggtgataaacaattcaaattgatcacacagcaaaaaaaaccacactaatcacacaatatatttagcaaaaattacatccaaatttgacaagcgtgtccaatccaaaaactgatcagagagctgcacagctgactgttgtcttccaataattattgattgactagagctgatcaggctacaaaatttcaccctgaactgatcagtgatcaccaattttgttcactttccagcagctgatcaacagtgccattcaccgtcggcatcgtcgtcatcctcgtcctcggcatcctccgctgcccacagtgacacgtcgtcccaatcgttttccgcccgctgctccctccgtctccatgcggtcgttgcgcgtgcctatcgccgctgggcccattttgtggtggcacatccgtacaaaattgtgttcatatgcttcatcttgaccgcaatatgtgtggtcaaaatggcaaaaaccaagtgagtgagtgatgcggagtgtgccaatttagccgagaaaattagacaaagtgccgatggggcccaagtaggatgagggctaaatgccgaaaagtacggcccaaaaaggatggcgacaaaatgccgaaagtgatgcccaaaaagggcggggacaaaatgccaacaaagtgggacaaaacgccgaaaaatgcgggccaaaaaaaggatgggacaaaatgccggaaagtgctgcgcggctaaaaaggacgggcaaatggcaaaaaccaagtgcggtgttggcggagtgccaattttaccgagagaaatggggcaaaatgccggaaaaccttgtcctgatggtgtgccgtaggcagtcttaattggtcccttaattttgacattttgtctagctttcggctttcgacaccactttaccccaactttgtcggcattttatccaattttttgttattttttattcattttgtcctaattttatcccacttcgccttttctctcccatacattttatctgaaatgtgagcttttgttccccattatgtcgacactttgtcccactcttcgtgccattttcccctcttctgtcgaccttttgtcccacttaagacataagaacaacatccgtggctatacgccgtacggctcacgggcactgtatgagtttgatgtgcgcgacgaattttttgaccagtccggtgttggcattcgcttctttgtgctgattttgcctcggaatggcaccaatatgatgcgcatggaaacactgcgcgagacggttgaggtaaaaaaaaagaaaacaaatcgccaaaaaacagggattttgaacgacttccaaaaaccgttacaatgaatggcttttatgtatacggtagcaaaaaattattgtacaaaccaaaataccgtagaaatttaataaa

SEQ ID NO: 75977 - DNA, 742 bp, Heterodera glycines
atggcgcttagaatccgattctcaaattttgggttaataatcacaattgtaccagaatcttttttcctagtgccaagcgttatcttaattgtaccagaatcttttttcctagtgccaagcgttattttagggaaggtaccccggccgagatttgggattttctaaaaaaataaaattcaagtaacatttactacaaaattcaagtcccgattttaagtctcgagcagcaagactcaatttaccatcattatcattattttggacagcatcggaaaatgtatttccatatttccatcccatttaatttataataaccgcacaatgaattgaagaaaactttgcttttgcccatttctttctttttcacttccttttttgccacaataatcacgttttcggcaactttttatcgcttttgcttgaccgtgcggttaattgagtcccagctgagtttggcactccatttccggcactttttcagcctgaaaagggcaagcacgccgctaattctattttccttcccatttctgaatttttacatcggttctgaccctttttgagcagttttgagtttgtgacctaaagcaatattttccatattttctgatttctatgctaaaagaaaaaaattccttcaaaatttcaaatatggattcataaaactcggaaatttgactttttatagcttttctggcaaaaattctacaatctgtgataaaaaaaaatataaaaaacaaattta

SEQ ID NO: 75978 - DNA, 792 bp, Heterodera glycines
atgagctcaacacaatatttaatattttttcttttgttgtgctgcttaaaaaatatcagtggaattggtttcgatgaatttgcaaaaaatgctggtgcgataaatttagctgatcagtatcttaaaaaagaaataaagacaaaaggagaattattggaaaagcttgcccaaattggagttgaaataagtctaaggacgctggagagacatctttcaaaaataaaaagcaatgtttttcaaaatttgacaataaatttctttttattattggccatggagacgaatatagaaaataccaaaaaacgaacgaaaatgcaaatactgtctatgcctaatgcgaaacgtggttttatacatttagtaaggcgttagtttggtgaaaattattgaataactatagatgaagaccatatagactactcagaaccgtttgaatggcactgtgtcaaatcactccgagataagaaaggatgtaattgaatatttggaagaaactgtttaccaacattctttttctaatcatcacgataatgaatggtggtgtaagtctgctattttagtttttaacatgtagccaacattttagtgctttttgatagtattgaaaacataagaaaacacatagagaatgctattgctcctgcaataggcacccatgaaattgaaaaatggatgaataatttggatctagcagcagtcaccaaaatgtttcgaataaatataattgtgtgtgaacgtatacaagaacgaattttccgttggcaagtgtactcaccagatttagaaacatcg

SEQ ID NO: 75979 - DNA, 953 bp, Heterodera glycines
atggactgtcccaaaaaagttaaacttccccctgaactccttacggagttggccaattgccttcattacaattcgctggtatggcatccgaatttctttgtcctttgaccattttctcgccaaaaatcaaaagaaaattcttcgcaataaaataaaggtaatgagttttcctctgcattaaatattggaaatgagaataagtgaaggtccattagagctcattagacattgtgtacttaatttttaatttaaacattttctctcgggtctttttcctcatcttaattgctgtttcagagaacagagggagaaattgatgctctgaaggaggctctcgcaagtttggagcaacgacacaccttggacgggttggaaatcgaacgattgaagaagaatatcagaagtttgtgccgccgcaaagcgaaagtacgagtcaacagcccgtcagttcggtactgtaacttcaaaaattgtaacatttaatattttttttgaaaaatttacaaagttgcaaaaaaattttttaaattttcttggcggggaaaccgtgcggggaactgagcccgggggggagggaatagctgctaccgatttaacattggccctaggtcagtttcggtgatgcctactttgattttctttttttttaatcaaaattttcatttttttgtattttatttgaaaaagccaaattccgatgcacttatgtaaaatccatctcaatttgtttactaaatcatcaattaaattcatatgacaaatttttatttagccgcccattgatccgccaattttggagaaagaagaagagggagaggagccagaagcaaagagactgaaagcaaacgacgagtgaaggaacaaaagggaaagaaaagaaaagggcacggcacactttgacaagaatgccatttgccgatctctgtacaacgaaacataaaggaattgtttaa

SEQ ID NO: 75980 - DNA, 714 bp, Heterodera glycines
atggcacaaattgtgccattactcagcgaaccaccggaaggagggtatgggcgacaaatcgggcgtcaaaaatgctgacgtatacctaattttttataagaaaatttaaagaaaaaagtagtatttcatcataaaccttgaaaaatcgttggaaaatttttttcgaaaattttgttttcttgaattttaaaatttatgtttgaatttttctttttgttagggagagggacgggaaacggtgggggaatggatgtagtacacccatttggtcaatgatcagtatttaaaccccccaaaaatttaattcaggaacgtaacattaaagccgggattggtgatcgggtggcctaccgctgggagggaaacgagccaggcgacgagcggacaatcacttaccaacaactgcttgatcaggtggtgttttcaatggcaaaaaatgataattgagcctattgtagataatgggaaataattttctcagaattatgccatgttacctggcttaaaaagggttgatggcttttcgtacaatgggcagttagtttgtacaatggagtttcgtacatttttaatttccaattaaaacctagaatttctttctcaaaaagaattaaaattattatttttttctaggaaacacgaaaaatttctgctaattttttcgttatttcaaatttaaaaaaaattagaattttttaaatttttttagaaaaa

SEQ ID NO: 75981 - DNA, 1397 bp, Heterodera glycines
atgtcccaagaggaattgctgctgtcgttccaagatgaaactgctctggactggttcgttcggcttgcccatccgtcgttgtcctttcgttctggccatgccgaattggacgcactaaatgccattgtcccgggcgaactggtcgaaattgttgggcgggaatcatccggcaaattgcaggtggaaaatgaatcaaatcgctgaaatgccatagatggtggacctctttttgaaaaattttttttttttaatttttcgcgaataaaatatttaggaaacccgagtttgccaatattttggtccatatttatcaattttcgagcattttagtccatataattgtctgccctagtaaaaaactaactcattctttttccgataaaaataatcgtcaaaaaagcaacaaaaaataagaaaacacattcctaagaattgaaaaattttaaaaaatgatcctctaaaatcttttttttcttgtgattaagtttttaaatgttttggctaaagcgttactaaaaatttaataaattttcccatttttgtgcctatttaatccccattttgcgcttgtttctgcctttttcacgatttttatgcctaaaaaatgaagccctacttatggccaaaaatcgtaattctctgttatatttttcacatttaataatttttttttatttgtaaaaaaatagagaaagcgctaacgaatgataccaaaaaatgtttaatttggtcgaccatttacaaaagttatgacaatttaaacagttggccatgactttggtggcggaatttttgttgtgcgaaagcaaagcggcacagcaccgggccgtggttttggatttcaacggcagcttccgcacggagcggctaatgcaaattttggtgaacaaaaggccacaattggaggaaaatgtatggaaaatgaatgggatgggaatttgtaaaataccgttttccttcaattcagtcccccccccctctcaattagaagcgccccctgaaataaaggcctcactttttaggtgggggtggaaaataaagcccctgggggcggagtagctcagttgggccccggcacgtttgggccccagcgggtttttggctataacttttttctttgcaaaccaaattcaacaatcttggtatcatttagttatggccagaagaatttaaaaacccagattttccaacctttttttgccataaatttgttcaaaattgacgaaattttttcggattttgcaggctaatagatcatgtgaagagctttcgaatgataccaagattgttagatttgattgacaaagaaaaaaagttataatccaaaaacatgctggggcccaactgacgtgtaccgcccgggggctttattttaggaaaaacggtagataagcaaa

SEQ ID NO: 75982 - DNA, 165 bp, Heterodera glycines
ccgaacgaaggctgcctgagcgggttcatcaccggctttggtctcgttggttacacggcactttggctgatcgaagtgccattcacattcaacagtccgatcagtgatcacaaggatttgcgtgaaaagctgcaggaggcgcttgatgatgtcattgactattga

SEQ ID NO: 75983 - DNA, 1043 bp, Heterodera glycines
atgattcaattccgtcatcctttaatcctgctgctgctgatacttattggagttgaagtcatctgcagcactaaggacaacaacagcaattataaagttcatgtgaaaaccgtgacatgggaggttgatgcgattaaaattcaaaaaaataataaaatataaatctgaccctgatgataaatgcgtgaaggcccgagtccgctccttatttctaagatttgttcttatttggaggggccatgtcctagaaacttaaaatgtccttatttctaaaatttttttatttcaggcttcccctaaactttttaaatttctgtgcttaatgatttatttcgctaatttttagtggtttatttttaatgattttttatgttgagctgattatattgctaatttttgagaaatttcggtttgtagtcctgttttaattatttctaaaacgtagccattttttcaaaaaatcatatttttgaggtcaaactcttaattttagcctcgtttgtcttattttgaaaaaaaaagttgggagccttggttttacaattttaatgaaaaaaacaaaaaaataaaaacccaaaaacaataaaacactgtgagattgtaaaataattaaggaatttgttgctgatgcactgaaatcggacaatgaattggaacgcgaagaagtgagttaacggcatatttttttttacagaaaaaatagtaaatatttaataaaaattgcgataagcatacgccgatcggccccatttttgggcaaattttttaaaattttgcacaattttctatatgccataaaatttctcggcggcgcctatttgcaccgccatgctccattgaaccatcattttttgaaaatttgatcccaacacggaaaaaatttagtcatttttggcgcaaaacagttaaaaatgctttatttttggatgcaattttcaggtagagccactttttgacccgatctacaaaaaggacaccgagcggatgaaggcattgattggcacattaagcgaggagaagctgcggcgcttcttgcgcacgcg

SEQ ID NO: 75984 - DNA, 689 bp, Heterodera glycines
atggctgtcaattatggaaatatggaaaaatatggaagtgaaaaggcatcctagaagcatcatcaaaccaagctaaaaacactatttacgtggtttttaggccgaaataagtgtgcaaaaaatatggaaatccatacaaatccggttcctagttattatgtatgaaaaatgcatgaaacatttattatttaattgttagcataaatgtaaaagcgcaattcattatttaattggcaggtaccataaacagaaaggcagaagatagttagggaaggcgaacatttcaccggattacggtagtcactgcctggtttggtcaggtgatcaacggaatttcatagaatattggtgcatcatcgaatgcgcgcacccattttatacttcacaaggtacttgaataattatttaaaaatatttttaaaatatttatttttaatattggatatcgccaggcattccaaacgctattcccatttgtattcaaacgaatttcaaatttgaaccaagtaattttattgcaaaatgggcttatattaggcactacgtaaatttgaatgatgtcatccagcagaagatattctttgctatcaatcagcccatcattaattggcagtgaaattgatgctacgatttttttctatttttataaatccgccgttctccgagaaattttcttttaaaaaattaaa

SEQ ID NO: 75985 - DNA, 1077 bp, Heterodera glycines
atgtcccgtcacgaatcctttatccccaaaaaccctcgtaaatcccgaaaccaattgtctcctacgccacctacagtattggtgtccatatcatcagatgaatccgacaatgaaagtgcagaagaacaacccgagcaacagtcgaaaaaacaacaaactgtggtcggcattcagcaacgcccctacaatccgaaacttcatgaatttgagaggagcaatgtccgagttcttaattcaattgagcaacgccgtgtttctgaacaacaaaaaatggtacagtttcctgaaacggcaacagaaagccaacgggaaagggaaattcgagagttgaagcagcgaattctcttactcgaaagtgaaaatgcaaaagaagagcaaaaaacagaagaaaaggaagaaaaagcgaagaaagatgccgaagaaaaggaagaaaaagcgaagaaagacgccgaagaaaaggaagaaaaagcgaagaaagatgccgaagaaaaggaagaaaaagcgaagaaagacgccgaagaaaaggaagaaaaagcgaagaaagatgccgaagaaaaagccaaggaaggtaaagaaggaggtgattcggaattgtcattaggggaagatgacatagaaagagaagaagctgaaagaaaaattgaagaaataagagaaaaattacgaaaaaaggagcgaagggatgcgttgaaggcaaaaaatgatttgcgcaaaacatcagaaaaagagaaagggcagagtgtagtaaaaggaattttgagaagaaaaatgactgaggaggaaaaggaagaaaagacaaaaagggaagaagcgcaaggagcagccaagaaagaccaggaggaagttggcaaaaatgccaatcaaaaaggaccgttaattggcgccgacgcaaaaaaatcgattcttgagacgatcaaccagccctacgtccacggacgagtgatagggcaggtcattgatcccagggcggaagtggaagaaccctgggacatgaccaaagccctcgcgaatcgagaaaaggaggatgaaataagagtgaaaaggaaggatgaaagagaggaaggatggaaaaatctg

SEQ ID NO: 75986 - DNA, 972 bp, Heterodera glycines
atggcattcgatgtagatattattcacagaccgggaaaacgaaaccaattctgtgactatttatctcgatatttgggcgacaaaacggatcaaggaattaattcattgaaattcgaccagaagataacacgagaagaaatgatcgcagcacaaaaacaggacaaagaatcgcagagaatttgcgaattaataaaaaatgcggacgaaaaagggaattctgaggggacattcggaagatggaagctttttgggggacttttgtgcgttacagataggggagagtggaaaatttatgtcccagagtgtatgcgacgccgggtaatgagtgaatatcattctgaccctttccaaggaggccatttgggcgagaaacgaacgaaagaaaaaattagacgaagtttattttgggaagggatggacaaagatattggaaatcaggtcaaaaactgcgacgcatgccaaaggaggaaaattattggcattaataaaagcgcggaaccaatttgtccaatagaaccggcagctcgaccatttgaaagacttcatctcgacttaatgggacccctaagaacgtctaagggaggattccaatacgttctaatgattattgactcattttccaaatttatggccgctatcccactgagagaacaaacagcgacaactgttacttcagcattcgtagaaaaatttctatgtctatttgggctaccaaaaattgtgataacagattgcggcacacaatttttgagtgcgacttttgagtcactcgctgagaattggggctttaaacaccaaactacggtaccgtaccatcagtccgctaatggacaagttgaacggtacaaccgaacattggtggatatgcttgttacaacgacaggggggaaagattgggcttctgcccttccaatactttgttttgcgtataattcttcaataattcgcaaattggacatcaccgttctatga

SEQ ID NO: 75987 - DNA, 752 bp, Heterodera glycines
atgggtgaatttgaaggcaaatttccgatattagtaagcgaagacgaaggatgcccatgtgcagcgataatcggaacggatttgatggatcatatcagtgaacaaggaggagaagaggaaattgggcttaattttaaaaagggaactgttcgagtcggccatattcaccttccaatgatcgctgcaataaacttcgaaaataagccaaccgaagttcgactcttacaaacacagacacttcccccattatctgactcattcgtgtgggggcagataaatcgaaattttgatcccgaggacacattcatcactgtcgaaaaagaacacggctattttcctattcgtgtcggaaagtgcttaatttgtcccgggtcaacctgagttattccgcttcgattacttaatttcggcaattgtgttgtgaaagtccacgccggctcgcgattggcatttattgagcctatttccgactcagcagaaataaattcgttaaaaagggatcagaatcccgacgatccaaacatgctaatgaatgacgaagaatggggaaaatttaaatcggaaagagaccaaattccaccagaggcggattggaccgacgaaaccttggtattcccgaaaaaggatgacaaaattaagcctattttggaacggatttcctttaaaatgaggccatattcagtcctaattcaatggaaagattgaagggaattattagtgacaacgaagaagctttcattagaccaggagaa

SEQ ID NO: 75988 - DNA, 561 bp, Heterodera glycines
atgaccagacccgaacttgatttcggtgaaatcaccgcaatggaagtcaacaacactgatgacaatggaaattcaatctctggaattttttcggttggagaaatattggttgaagcggcgcaagaggaaggagaaaatttaaggcaaaaagccagtgaaaccatcgaaaagggcaaggaatggatggaagatccgattgggatcgttaaatatattaaatggaccgcttttattattattgccattataattctcattggctgctccgttctcctaataaaggctaaattatacgcctcagcactaatgcttcccctccaactaatccgctcgcttatcaccactttggtgagctgcttttcatcaggcagagaaattgcggaccaagtccgttatccaatggtaatggaagtggaattacgggagcaaacaaaaccaacggcaccccctgaagaagcgttactcgaaacaaaagcatacgttttaaattatatgccaaaaatctgtcaaataaatcgatcaggaccgaagaaaaagagatgttatgtgaatattttctga

SEQ ID NO: 75989 - DNA, 480 bp, Heterodera glycines
atggccaatcatctattgctggtccctgccctgctctttcatttgctctttgttctccacggccgctcaaaattttctgccattctgccatttttgctctctggactagttcacaattggccgctatttaagccatgggtcgcaagaatgggccatcattcgtttccctccgactccccaattccaaacacattctgtgccatgcccgccaagcccaactctctctcgcaggagctcgccgatttggaaaaaaggaaaatggaactggaaaagctgatcgcttcagctacgaatgaaaagccggaagggaaggcccgacgcccaaagaagtgccaaaaccctgacgagcccccccccacgggaagaacaggaaaaaaagggaccaaaggcggcagcttcatccgattccccgactacgcagccatcccattcgccgatcaatgttgtgccaccgccacctgtcgactcagaaatggctga

SEQ ID NO: 75990 - DNA, 1480 bp, Heterodera glycines
  unsure (1)..(1480): unsure at all n locations
atgtttaaattccctttgcaagcaaaatcacattctgttcaaaggctcccagtgcatttggaaaatgaacagataatatattttgatgaaaatgatgatgttgaaacaattacagaaaaaagagataaaaaaagtaaattgatggcttattttgctttttttaacgaaaatcattgttcacctaaatttttgtacacagaaatgcctaaatattgtatttggaaccctaagcaaggaaagtggatattgcgaaaaaacccagaaataagtaaaacaatcggacgaatgtttccgattagtccaacggagggcgaaaaatattatctccgttatcttttacttcatgttcatggtacaagttttgaagaccttaaaactgttaatggaattaaatataatacttatgcaaaggcgtgtttagcacgtggattaactaaagacgatgatgaatggaagcattgcttaaatgaagcaagtcagttcaggtttccagcagcgttaaggagtttgttcacaagtatcttattgtatggtgacccaaaacaaccagaaattttgtgggaacaatttaaaaataatttatcagaagatttcttaattaaaaaccaaccaaacattgcttatgtattggctttgacccgtatcaataaaaatttattacaagaggggaaatctttgaaagattttaaaaatttaccccaagaaacctctttaacagatgaaaacgaaaatataaactatgaagaagaaaagaaaatcgcagaaaatttgtataagtctatgaacgctgaccaaaaaattatttacgaaaaaataaaacaaatagcatcaggcaaacttaatcctaaattaatttacattgatggcccgggtggcacaggcaaatcatttacattgaatgcattatatcatttagtacgtagttataaaaaacatatgacaaacatggcattttcaggaattgctgctacattattaaaaaatggtagaacaatacataatcgatttaaatttccgcttaatcttaatgctcatattatttctggagttgttcaaggcactaaagctgccgaagaaataataaaaagtgatttttttgttatagacgaagcgccgatgacaccacgatttgcacttgatgctatcgagaaaaaattgcgtgaattaactaactgtaaacaattatttggtggcaaaacaataattcttgcaggtgattttagacaaacgttacctgtaaaaaaatttgcagtaagaagcgaaattattgacctgacaataaaaaagtcaatattttggagtaaatttgagcagatgaaattaataataaataatcgggctaaagaccaaattttcgctgaacagatacttgaaattggtaatggaacttttggcgattctatntcattacctaataattgtatcatagccaacgattcaaatttaatagatgaaatttatgatgatgtttttaaagaac

SEQ ID NO: 75991 - DNA, 1715 bp, Heterodera glycines
atgttccgatttttaaaatacaaggaaatatttatcattcttataatgcagttgcccagccgaataacggtgagttaccgacaaacgggcaattgtattttattgacacagaccaagcaattgattttcgattaacatgttgggtgaaaaatcctctgattcaaatgataatataattgaaataattgcatatgttgaaaattatcttcgtgaaaattatgtttactcgcattcatacgaaatgatgaaaaatgtctatgaaaatgcggtagaaaaggcaaaaaacatgggcacaaatatccccgaaattatgatgttatttgatattcgtgaaggtacagatctaagattgaaaccattttccctttaagtccattggtggaacctatgtgttatcccctattttatcctaataattaccgagggtggcattataatatgaaagatacaaacaataaaaaaatatcgttgtgcgattttacaaaatataaattatttttccgaaatgaaggaaaatttttgcctcatcattatggtaatagactttttcagcaatggtgtgtcgaccaggctgccagaattgaatggagtagattaaattacataagattacatcaaaaagaaatctgtaaagagtcgtataatgcaattgataaatttttgtatgcaaaagcagctgaaacaggtgctcaggttaaaaaaaagataattttgccctctagctttaatggcggccctagaaatttgcatgaaaattttatggatgcgatggctattgttaatgaagttggccgtcctgatttatttattacttttacatgtaatccaaaggatgaagacatacaaaaagggatattatcaggtcaacaatcttttgatagacccgacattgtagcaagggtttttcatttaaaagttacacaatttttaaaagaaataattgatggtaaaatatttggaagagttgttggattttgttatacaattgagttccaaaaaagaggccttcctcatgttcatattttgttaacattggacccattaaataaatggaagaacacgagtgacattgataaatttatatcagcggaaatacctaatgaaaataatgatagggatttgtatgaattagtcacttcattgatgactcatggcccttgcggttcagagtttccaaatgctatgtgttggtgccaaaaaacaaaaaagtgtattaaaaaatttccaaaacaatttagagaaaaaacagaaaccaacgaaaatggttatcctttgtataaaaggccaaataatggcaaaacattcgttaaaaaagattggaaaacaggaaagatcaaaataatgactaaccaagatatagttccatataatcgatatttattaaaaaggtttaaatcacatataaatgttgaaaaggtggctgacataaaagcagtaaagtatatttatatttaaaggttatgatgcagcaactcttcgctgtatatcaaacgaaaatggaaatataaaagaattagtttatgatgagaccggaacctatttggacgcacgttttttaagtcccgtagaggcttgctggaaaatgtttaaattcccgttgcaagcaaaatcacattctgttcaaaggctcccagtgcatttggaaaatgaacagataatatattttgatgaaaatgatgatgttgaaacaattacagaaaaaagagataaaaaaa

SEQ ID NO: 75992 - DNA, 1163 bp, Heterodera glycines
atgtatataaaatatgaacataatgataaaatatggacaaatatggaaaaaacttatgtttgaacccgattttttgcataggcgcaagtgtttggacatgatccattcggagatccaaaaaaaaatttttttgttgaatgcatggataaattaaataaagtatattttttctttattctaattctatttttttcaattagaatgcatcggttgacgaaaaaaatggtagagataatgttaagaagataaaattaaacaaaaaggaagacgattataagctacagaaaagatatcatatagacgataagaaagaagcagaggaaaaggttgacaaagtgaccaaagcaaaaagaagtgttaaaaagtaagtttgctttttgtacttttaattgagggggtgaatagcagggatgggctttcgctttcgcgtttcgctttcgcatgtttcgctttttggtactttcgctttcgcattttggcgcaaaacgcaaatattacaccccctaagaatgagggataaaaagcccctaaaattttcaaaaatttgatatataaattggctaattgtcagtgaaaagctgtttaaaaatggtcaaaatttccaatttttcccccagcagcgccaatcggcaccgccgtgccccaaaaagccctattttttcttataaaaatggtccaaaaatcgcaaaatttgataattttttagtgaaaatctgttgataaattgtattcaaattttcaaaaattttcccggcagcgtaaaaaagttgtagaaaaaatttcgctttcgcgtttcgcaatttcgcgttttttggaatttcgcgtttcgcataaagacaaaaaaacgaaactagagaaattttgagaattttaagccacaaacctagaaaggaagaaggcattttgttgctcattgttgagaaattggattttccaagcattcaattttaaaaaaaattttttttttaatttttaaaggaccattgattcattggctgatattgagaaaaaagatgaaatgtatttatttggaaattttttcaatttgccagtgcgccagaaatcagcgccgtttagagcagaaattttggcaagagagaatgaaaaggtcatagaaatgggcaaagattatatgacaatttgggtaaaacgtaactcacaaa

SEQ ID NO: 75993 - DNA, 588 bp, Heterodera glycines
atgtggcacccacaaaaagagaatgacaaaaagaaagcggggaagaaaaaaagtacgaatgtcgaacccaaagtcgaacccgacccaaaaaagctgaaagaagtcaccgaatttctactgcttgatgcggcactcgatcgggaggcgcgcaacttgtgcctgaacttgatttttagagtgccaatgcgcaattgggcagcgattgcgaaagacatggacgacaaggaaattgaaaactacttcataaagccattggaggaaaagcatttaaaaaataataatatttaaatgaacggtggtgctatgacgttactcaaaacccataaaatttgggcgttagacaaaaaatcattaaatgaaaatatatatttttttgatataactttgctcaaaagcaaccaaatttttaattattgataccattcgatagccctaagtgttttctattaaaccttcaaaatttcataaaatttcgttacatttcaagaaagctatgaccaaaaatgttcaagaaaacttgcttttttgagtttctctgctcataactatatttaaaattaatgaaattttttgaaattttgcaatata

SEQ ID NO: 75994 - DNA, 1396 bp, Heterodera glycines
atgatccctttctctttgctctccgttcaattgttcgtcattatcgttgcttctgtgctcacactcgtcacccaatgctgtgcttgttgtaagaaaaaggtgaataaatgattcattcattatttatcaaatgaattaatttaatttgttttttattgacagaaaaagccaccgacaacaaacttcgctgatcgtaagtgctgtttactcaagtgttttgtgtctccgaacagctccaaaacctttatattttcagcagccgattcgcgctattcgacgcttgccggtataaacaaggaaattttcgttcaaaaaacgccatcgcagcaacagcggtcacaagccgtaccctatggaccttattgtatgtcggagtgttttgtttgcttttttgaaatggcattaattgcgttttttggtttcagcaagtgcgacgcccgtaaagccggcactttcggacgagtacaaattcttgccgacattgcgcgtggacccgcccgcttttccagcgcaggccgcaccaccaacttctgtattggcctcaccgaccatctcggcaaaaccgaccgctccaacaaaaccgacaatctcagcaaaaccgaccacctcaactaaacggcccacttcagcagcaccggcaccgaccgctccagcaaaaccgaccatctcaacgaaaccgaccacttcagcaccatcggcctcaccgactacctccgcaggaaaatcatccatttcatcaacaccgatggatttggcttccacatcgatggctgagacgcaaccgatcattgcagaagcaacgggtgtggtttttgagcaattcttcaagatttcagttctaaattctcaatgttagcatccattcatctttttctttccttttcagcagccgactcgggatactcacaaatggatcaatttggtccggacatgtccattaaagtgctaacgccggaggaggcgaagaacagaagtgagagagtgcagcagagcattgcattgattctgatcactcgtttagcgccagagacgggccaatccatcttgatttttgtgccggtcagcagcagtaagaaggcggacaagcgccgctgagatcgtcaacggtcagtcaaacaatcgaataaatgtgtttttttcaatgtttatctgttctttttcagcactcgatcggatggcttatttgtgatgctctgttggccaattggaccgttaatttaccctttgaaagcgttcgctgtgttcagatgaaatgtgacctttcgataacctctgtttatcatgtgcttgctgtcttattattcccactgtttctgtccccttaattatgttcttgtcattgtcatgtgattattgtatgtattatttacatgaaatgtcgttgcatataaataaa

SEQ ID NO: 75995 - DNA, 1452 bp, Heterodera glycines
atgctttactggtcttcacaacaaaaaatagattattcaataagatgtttgaataagaataaaatttatataatgtaagattattttggcggatttgtaaacgcttaattctgccgattcatttggtcgagcaaaacattgtccatgaaattgcgaacgtcgctaattactttggagaggctcattaagtaatattcatcacaagtcgggcaaaacttcagcagcaaaatgacataaggctgcaaaaattggaaacattaagtgaaaaatgagccaatttatggacaaagggcttctgttggggttttagaatatttcacatttaacaaatttaaaacgaaaaaatttaggaacaggtggcagatttaattttaataatttattttttcattatttcgaaataattcttttgttaatattttaatgaaaaactgacagctgtgtcgagcggcacaaattccacttgcaatactttggacatgagcacagagtttacaacggtgctaggtcgtttcttaaaaaccgccacattgggcgttttttaaaaccgccagggcgtttcttaaaaccgtcagggcgtttcttaaaaccgccaactcatatgattatgtatgtatatccgttaaattaaatatacaataataatcggttagactcttttgattatacaaattcatattaaaaatttagcttacgaatctgagtcaaaaagaaacaacagcatcagtatttttgtattataatgatggacattttgaactgattaaacagccaacaaagataaattaattattttgttttatttctgtgataatctttataaaattcattcccttttgaaagttgcaaagaaattctgtgggacttattgtggcacctctctattagactcttgtctaatagctcctgtaatctggttttgcaactttcaaaaaagtaacaaattacgaattagcaattttatattcgaaaattttgcagttgataattgttgctataaccacgatgtgtgctacataaataaatatcagaaacgttacgattgtgatattaaattttgcaattgccttaatgaatatcctaattgctttctaacaaaagtctgttctccaactcatatcttaaatatttttttttttagaatatattatgctggtcagttcatatttttggagaacgttttaaaggataaaaataattattttattttaccgtcactagatatgcatatgtattttaaattttttattgttatgtaaacttctaatatatatatatatatatatatttatatacataatcatatgagttggcggttttaagaaacgcccaaagtggcggttttaagaaacgcccaatgtggcggttttaagaaacgcccaaagtggcggttttaagaaacgtcccagcaccatatttaatataattttattctattttattttcagaata

SEQ ID NO: 75996 - DNA, 629 bp, Heterodera glycines
atggcaataaaaactcgggttcaaatggcacaaattttcacatggatggagggggcgaacgatgttgacattcttccaccaggcggaagagttgcaaacattgctacgatggattggagttttaaggcattgagtttattcaaaaatggtaataactgaaaacgaataaaataaatttcctttttaattgtaattaatgaatttaatattcatagattcccgtaattcggctgccactgagcatggctttcccgctcatttgctgctttcaaaaggctatttccaagtcagtctgagccgtgccatggtcgagttcatccagctggaactgaacctgaccgagttagtcagacgtttaaatttgattggatatggacgggacgaaatcctgctcaccactttgcactccgccgatcagcttaatgcaccgggcggatttacgcagacgtgcttcagccggaagggtggcggacggaccaaccatttgaccaggtgttttttaacgggatttaatttacaaattaaaagtcttagcatttttggcatgaagcatgaaattgtcaaagttttgtcttaaaatttaattatctgggctttccgaacaggctaaaagtattgaaacgtattaa

SEQ ID NO: 75997 - DNA, 343 bp, Heterodera glycines
atgacatatttacacacgggaggagaacaattggacaaaatggaggcgttggtgaacaaatctgtggttgagcagctgccgaatgtgagtaattattgttgtgtaagaaatatgaaaatgagccaagtcataaattaatttttttttttttttaatataattttccaaaatttttaagaaatttcaattttaggtgaaatttcagcgatttaaaagggatatgattttacgcaacaaaaacaataagcaacaaaagcgtggtgttggtgaaaagcaattaacattcgaagaagtgatggggtttcagtgtgaagtataatgacttaaagcattcaatttataa

SEQ ID NO: 75998 - DNA, 718 bp, Heterodera glycines
atggtcgataagggcgaaggctacaccggctatcaagagctgaaggacggagtgtaccacggctatcagccgttgaagccgcgcaaaacgcccaaattcaccgcagaatttggactgagctcgggcatgctgaacatgtagggtctgacacctgacacaaaaacatttaggcatagcgaattttgaaaattctatgtgctactgactcatttggtaaagtaatacaaatgccaaaatattacggtggaatttgaaaataaattattcttaggcgctttataatttttagaagcaatttttcaaaaaaaaaacttgcttctcagtgcggttgcccgcgacattgactcaattccgaagggggacaaccaggacggaagccaataccagtacttgtcggcacacaacgtggccagaggtcaggtaagaaaacaaaatgatttataaaaacgaaatatatttaaataaaaaattaatttaaaaataaatgaaaacaaataattctatttataaataaaaaattcagtacattcctccgaccaacccgaacctgccgaacttggacattcctgttcaacaacagcagcaggaagtggccgaagaataactggataattcagaatccaattggtgatgaagatggaaaagaatgttcaatttaatatgtttgaatggttaaaaaaattggattaaaattacgataaaattgaaatttaataaa

SEQ ID NO: 75999 - DNA, 1689 bp, Heterodera glycines
aaggaaacggacaattcgacttcggtgaaggcagagacggaagatgcggactattcgacaactgagacaaaggaaacggacaattcgactttggtggaggcagagacggatgaagcggactattcgacaactgagacaaaggaaacggacaattcgacttcggtggaggcagagacggaagatgcggattattcgacagctgagacaaaggaaacggacaattcgacttcggtggaggcagagacggaagaagcggattattcgacaactgagacaaaggaaacagacaattcgacttcggtggaggcagagacggaagaagcggattattcgacaactgagacaaaggaaacggacaattccactacagtaaaggcagagacggaagaagcggattattcgacaactgagacaaaggaaacggacaattcgactttggtggaggcagagacggaagacgcggattattcgacggaaacggacaattccactacagtaaaggcagagacggaagaagcggattattcgacaactgagacaaaggaaacggacaattccactacagtaaaggcagagacggaagaagcggattattcgacaactgagacaaaggaaacggacaattccactacagtaaaggcagagacggaagaagcagaaagttcgtctactgtaccagtgagcacgaaaatctcaatcaaattggtaatttaagaaaaaaattcatcaatcatgttacattaaaaagttttttaaaacaaagatggtgaagaaagcgattgtcgcactgaaatcaaaaaaggggtcggccaaaggcgcaattctcaactacattatgagcacctttgacgtgggcaaggacacttcccgcgtaaatgcactaattaattacttttcaaaaaatgtttgagttggtaaagcaataataattattatttcggtaattatttgtaaaaataagcatctattttcactagtacacacaattaatgaatgataatcacaaatacaccaaatgataattgtcattgaatattaattaaattattgatttatcattcttaattttaattaattaatgtgcttaaattattttttcaaacctttgaatttaagatttatgaaaagatggatttggcaatcaaagaattagtccactctggtgaactcattgaggtaaataaatatgtaatcatttacgagatcaatcaagaaacattgtttaaataatatttatttaaaattaatttcatttttctttatttaaagacaaaaggaattggctcttccgtttactacaatctcaacgtcattacgaacgcaacgccttctgctgctgaaaatatggtttcgatggatgtcgtgctcggataaaaacacggctaaatgggaatttgggattttgttttcttaagaattaaataccacattttgtaaatgagttatcaaaattctatttttcattttaaaagctgtgaatttttcatatttttttaagttttcaaattaatttttaaataatattttttgacagtgatcggaatattttattataattaatttttaataattttttgaggattcttttgcttttcttttttattgttaatgtatctttgtctaatattttttatttgtgactaatgtgatgtttttacttattcattttacatttttaaccttaataaa

SEQ ID NO: 76000 - DNA, 1119 bp, Heterodera glycines
atgaaaaaagacgttacgaaaaaggttgctgtcagagaagttggaaaagtggacaattcgactaccatgaaagctaaaacggaagaagcgggcaatggcaattcaactaagggaaaggtggtggagacgaaagaagctgtcaattcgactacggtaaaggcaaagatggaaaaagtggacaattcgactacggtaaaggcaaagatggaacatgcggacaattcgactacggtaaaggcaaagatggaagatgcggacaattcgactacggtaaaggcagagacggaagaagcggacaattctactacgggaaatgcagagattgaaaaatcgaactcgacaactgtgatagctgagaaggaggaagtggacaattcgactacggtggcgtcagagacgaaaaaagcggacaattcgactacggtaatggcacaagcggacaatttgactaagggaaagacagagacggaagaagcggacaattcgacaactgagacaaaggaaacggacaattccactacagtaaaggcagagacggaagaagcggattattcgacaactgagacaaaggaaacggacaattcgactttggtggaggcagagacggaagacgcggattattcgacaactgagacaaaggaaacagacaattcgacttcggtggaggcaaagacggaagaagcggattattcgacaactgagacaaaggaaacggacaattccactacagtaaaggcagagacggaaaaagcggattattcgacaactgagacaaaggaaacggacaattcgactttggtggaggcagagacggaagacgcggacaattcgacaactgagacaaaggaaacggacaattcgacttcggtggaggcagagacggaagatgcggacaattcgacaactgagacaaaggaaacggacaattcgactttggtggaggcagagacggaagacgcggacaattcgacaactgagacaaaggaaacggacaattcgactttggtggaggcagagacggaagacgcggattattcgacaactgagacaaaggaaacggacaattccactacagtaaaggcagagacggaagaagcagaaagttcgtctactgtacca

SEQ ID NO: 76001 - DNA, 2165 bp, Heterodera glycines; identical to SEQ ID NO: 12391

SEQ ID NO: 76002 - DNA, 436 bp, Heterodera glycines
tttaatgtaccgttttgttttttcatttgtcttttcttcctcccttttgtgccgtcgttttgctctgttaaatgccctcccctccgccggcatttttccccgtccttttgctgctcctttcggtgttcggtccgtcccggcaccaatcgctcatcggcaccggcaatccgttgcccgacattggcattggcacgcccatcgccaccactccctccggcgcaatctctcttccgaccagttcgcccattagcaattcgtccgtccccccggcggtggttggggcgttgccgcccattcagctgaaaatcggccttctctttgtcaatggcagccaacggttgcgaatgcttttcggctttggccaatccgcgcccgccgtttctttggcactcgaaagggcgcgacaggaacacctcatcgacaacatcaacttcac

SEQ ID NO: 76003 - DNA, 2478 bp, Heterodera glycines
atgcaagtcacacttaaaggacataaggttaaagctatttatgataaaaatatttgtaatattgttacaatatcattggaaggatgttattcctgtactagtggtgctaattggactctatcatgcaaaacaaattttggtaccgcattagccaatgtggaatgtccaagtcaaaaggtccgagtgaattgtgataaagaaggaaaagaacaacaaatccaactcgcatataataagaaaaatattacagaaaattgtgaagttatatgtcccgatggtaagactgaaattattagctaatctggaatacatacaccaacaagatacaaaaatcattcccactaacaatactaatgaaaaccccactattggaatttcatttgaccaagtaactgatatattaaattttatctattcccttattaaagccaattttttcaatatatttattattatcatattcatactcattatgattttcctaattccatgtctactacctattctatatagaattatgtgtcgttgccttcctctttcgcgcgggagtgtcgcgacaacgcgaaatcctaagataaaacccaaaataaaaaagaggaaaaataaaaaacaatagaaaataaaatggggaaaaataaaacataaataataaaaaatatttttacatttattttggaaaaataatattataaaaaactatcgaaaatataattacataaaaataaaaaaaaaaccttttgaaatgaataacggaaaattgtttgaaaaggaaaagtgcatttcctcaggaatgaaaggaacgaaaattaattaatattaaattgcgaattctgttaaggattgttcgtaaacaaattattaataattaatatattaaagaaattggaattgtaaagggaaaacggaaaagcaaacaattaatgggaaaatggcaaatccaaacggataacacacaaaaacatattttaattaaaatgagaaattgtagcgtactttggtgcaaaaaaatcgtatttaaaggggtggacttttccggaaatttcagattcgagacaaacggttccctccgaagtttcccggcacccgcccaccgcctttcactgcacccggccttcgctgctctctgtctgtgcgagtgccctccctgtccgcgcctactcgagtgccctccctttcctttgccattgtgtggccccttttggaccagccgttgcccgaatgcccttccttttcccatcgccgttctgaccccttttgattttgccacatttttccatttgtgatttatttactgtcaccgtttttgtgcccccttttccccgttcacattatcatgtttgtcccccatttttcgtttccctcaccgtcccgattgggacggtttaattacccaagtttgaggtcgacacaataaacatactcttattaaaattgtgcccaacttggtctatttgcctggacgaaaaccggcacgactcatcgctctccgatcggtcccgaccccctacattcccccgaacggctactctgcgcgcctcgcccatttcatccccttcccgtccccttcaccccgcagagttcgacgcaaatttcttgtcgccacgacattttttgcctatcaaatattcgcaataaatgcccatctatttaaaaaatattctattctattaaaatgttctgtattttgctatatattaagaatagccgtacatctaaaggagtcagtaattgaacaaatttctcaaatttcaagaaaggttcaggcagtcgccgtaaaaattgtctatataaaaacaatggcgatacgcatttctgcactaggtcctttttcaaaattgatgtgcttttattgaaaaacatgtttaacgggccacaaattaatagacaaattcaggcacattcttaaaaaattctgcttttaattagttcatttaatagattatgcttttgctttgtttttttaaattctacgcccgcgattatctgataggacaatgatatcaataaattttcttctgaagaagcgaagagttagcccaaatgttttccttcctttctatttaatgatctatcatttcagatataacagtcaaaatttaatcggccggctaaaaatgaattcggtaggattttatgaaaatagtttgaaaaaattgaaaatttctttcaaagatttaatggaagctagtagaaggatacctttttgagtaatattcgagatgttgccaattgtttaatggcaccccatacctcaaaaaagcattattctttggctaaaaaatatcattagaaaatagcgggcgtagatactgaaaaaactgttcttataattttaaacaattagaaacgccaaaggttacaattatagtaaatgccaaataggttgtaagaataggctcatttgctacaatttagaacagaatgtaatcggcaagaaagggtttttaaactaatttcaatgaaagaacttcataacaa

SEQ ID NO: 76004 - DNA, 181 bp, Heterodera glycines
gcacagacagagagcagcgaaggccgggtgcagtgaaaggcggtgggcgggtgccgggaaacttcggagggaaccgtttgtctcgaatctgaaatttccggaaaagtccacccctttaaatacgatttttttgcaccaaagtacgctacaatttctcattttaattaaaatatgtttttgt

SEQ ID NO: 76005 - DNA, 484 bp, Heterodera glycines
attttttgcctatcaaatattcgcaataaatgcccatctatttaaaaaatattctattctattaaaatgttctgtattttgctatatattaagaatagccgtacatctaaaggcgtcagtaattgaacaaatttctcaaatttcaagaaaggttcaggcagtcgccgtagaaattgtctatataaaaacaatggcgatacgcatttctgcactaggtcctttttcaaaattgatgtgcttttattgaaaaaacatgtttaacgggccacaaattaatagacaaattccggcacattcttaaaaaattctgcttttaattagttcatttaatagattatgcttttgctttgtttttttaaattctacgcccgcgattatctgataggacaatgatatcaataaattttcttctgaagaagcgaagagttagcccaaacgttttccttcctttctatttaatgatctatcatttcagatataacag

SEQ ID NO: 76006 - DNA, 540 bp, Heterodera glycines
atggcaaacaatcggcggctaatgaaaagggaaaagcgccctctggcgaaagtaagccaaatccggggcagaagccgagcggagaacggcgaaagagggacgttttggggcacgccggcggatacgtcggaggatgggaccatcccattgactcgacactgtaagagcataaatttaataaaaatggcatattcaaaaatgaaaaatacattttaaattaaataattattattaatttgagttattatttttaaaaagtttacaaattaaaatatttcttttgaatttaattgtcctttattttagtgattgggcaaagagtcagtggaatgatgccaattggctcgccgatgttgtcaacagaaacggatgggaaaacaccggcactccaaccggcggacgatgaatcagtgaattgtgccgaccaaagaacgaaagacggcatttttgcttgggaatttaattgactttttggaatcaaacacactttcctgtttaaattttagatagttttgcggttaagcattaacggcaaaagca

SEQ ID NO: 76007 - DNA, 664 bp, Heterodera glycines
atgtacccattgaaaatatttgcaaaaattacaaagaaaaaggaaagcactgacaatgagaaaagtttgggcattttccttttgtgtgatgctccaaaagaaggtgcacaataaatgttcatcaaaagtaatcaagaactaattgcaattaatcgaaaattggaattgcaaatgttcggcaatcattcgaattgtctcgcaaataaacataatggaagattattggggagaattcagcgaagaagaacttttagcagcaaatcgaactccggctggggatattccaatttcatttcattttcagtgagtaattaatatgaattaactgattaatttgaaatgagcagaaaattggtaaaagcaagtcaaaatttcaaatgcatatttgatgactgccgtaaaatattaagtttatttttaagagaacattttttgaatttattatttttcaataacttaaaatgttattttgttttattcatttttcattttctgtgttttttcagttccatccgaagttttatcagaagatgaagtgcacgctgtttatcagttcaaatctcttccaaattttcttgggatttccgacggacttttcccaatcccatttccgaccaatgaaagatatatggaaaaggacagagttttgctgtacattgaaaaa

SEQ ID NO: 76008 - DNA, 1346 bp, Heterodera glycines
cagcacaccgcgccgcacaacacattgatttggccacggtccgtcgccgacaaaagcagcaacaaaaacaagttggaggaggacaacatgacgatgatgacgacgacgagcatgaacatgaacagcagcaacccgttgctgaacaacaacaatggttgcgacaacgtcagcaacaactgttgttggccaacaccgagtcgtccagtcaggaggcggcggatgaagctgatcagagctgttgctcatcatccatcgcctcgtccagctccgttacatgccgtgaggaagtgtcgggtaaattttattttcgaaatttatgggggaaaaaatttgggaaatttttctccaagaagcggcttgaaaagcaaaaaaaaaaacgttgatttatatggaccggacgcacttaattaaaaagccttagcgacatcacttattagggtattaattaccattaattaattcttacccgcactcgtttagattttaattgccattaattaattccctgccgagtgttaattagcattaattaattcctacccgcactcatttagcttctaactgccattaattaattccttcccgattgaatattaattagcattaattaattcctacccgcactcatctagctttaattaccattaattattcctagtccgcactcattaccattaattaatttcagccgacaacaatttggtgacagccgtttcatcttccactgttgctgctgctgatcatttttgtcactctcaacaacaaatgccaaattcgtctgttgccgaattagcggcttctgctgacccattggcatcgtcggcattggcacataaaccggcttctgccgttgttgctgttgatgaacatgactacactaccatggacaaggtcagctgttcgtccgactcattctcccacttgccggtgccgcaacattgtgagtttttttttattggcattagtagttaattaacttttttggcattatttaaaaatattttgggaattctacttttttctgtttagacaatttaaattttgtcattaattaattaatagtttcttggatttaaagttaattaatcttttttgtaaacagtggcaattaatataatcaatcataaccactaattaacattcttttactaatttttaggaatttatttttaagggaatttatatttagttttcttttaaatttaattatccattttctgctttctccaggggatcgtcaacattcgtcaattggaattggcggctgctgccaagaggaaatttgttcctgtgccagcgacagtggggacagttgctactcatcaatggtcggtcattaaatttga

SEQ ID NO: 76009 - DNA, 62 bp, Heterodera glycines
atgagcaaagagcagcagatgtgctcacacttacatttaacatggtcaatagcaaatacaat

SEQ ID NO: 76010 - DNA, 1723 bp, Heterodera glycines
atttttacagcaattggggtgagaatgaatatgaaaattaaaaaaaagtgaaattgcaaaaaaaaaataaaaaaaacacccgccccccttaattacaaaatttggcagaacaatgccgaaacgcgtcgcctgattcggcatcagatgagcacactgtgcaaggaagacactttctgtgcatcggtgaaattttagaaatggaaactttcaaatgattttaaatttcaaattgattttaaattaatgccaatgctttctcatttctcagtgcattttgccgtgtcgcgaatcgctgtacgaattcgacgtgtgttcccacactttgtgcagggtaaaacaaacatacccgacaattcactttgcttttccacttttgaggacactcccgacccaacgcattgtcgagagtcttgcgttttcatggaacaaattgcggccaaaaaggcgggccattgcccaccacaaaaaccgtcggtccccgtttcagtaaggcaatttggcaaattttttattaatttttggcacatttcgaaggaatgttcggcattttgtgacgtggacagcgattgtgccgaagtgctttctgcgaattgctcctcaaattgctccgaattcaggtggaaaaatgctgcgtggtcggctgcagtcgcttttgtctgtccccgtccctcaacgactcgcgccttctcccgcgccccgagggcataaccgtacacgagaggaagaggaaacggtaatgacattaccgtaataccagggagaagggcccttgttggacaacaccgtattgtgaaactacagaaggacaaacactcattttttcaatttaagctcggccattttgcgatgggttatgaagcgattgtcgccacaacacaccgccacaaattcgaactgtatttgccaaaatgaaaattgctcaatttgcttttttaagtgtttgtcatccaatggcgttggtccgtccacaaacaatcggacacaatggcaccttggcaaaccgtgggcatttttgaaattactaataaaaaataagaagaaattcttcaattctaaaaggcagcacttcacccattatttttttaaattttaattatttcttcttttttcagattatggtgcgcaacaaaatgtacgccattcttaagcatttgctttcgcccggccgcttttacattttccgagtggcggcagtgaatttgcacgggacatgtgagaaaagggcgaatgaatggggtgaaatatcggcgaatgtccgttcagacggattttcggagccaagtcgcccgcccttcaaattgagcaaagaagcgaaggcaccgccggtggggggaaagattaaaaattcacataaaaatggagaggaattgaaaatattcttaaaaagaactaaaatcattttatattaaactttttcctttggtttagaagctttaaaacacataaaatacattaagaaatgggcaaaatgttaggccgtgggtgggaatcgaaccaaacgtgcccacccaaaccgtggggagctttgccattgagctaccaagacacatccgcccggcttttattaatcccaattttccgcattttaacctctcattagccatcttcttctttacagtgtcaatgcttttccgtttaggcaccactcaatttgacttttgtttacgaccctttttcaccaacgccaaaaattgttggaatgcgccaatttcggaaattcctc

SEQ ID NO: 76011 - DNA, 2176 bp, Heterodera glycines
  unsure (1)..(2176): unsure at all n locations
tggtgttcgccgtgtacgggtgcagtcagttgcgcgaggggttggagccggtcaacctgctggtcaaagactcgtatgccatcccccactaccgggcgctagagaactatttttggcactacggcgccaccgttcaggttcatgtttgatataaaagcatttttaaaagtaacataacaaaaagaagattgtcgaattcgactttgcggcctcccctcaaaaatttggtttacaaaaacaaaaaaaaccaagaaacccccccccccccttttttcatgtgtcaagaatttatttttgggagagcaccatttcccgtctgggtgggctctttttaagatattcctttaagattgttttaaaatatatcagtctctacaataatcacaccttttttgtttgtttttcgttgtctgtttttttatgcttttaaaatggcaaattaaacaaaaaaaaaatcaaaatttttccatttttttcttcgaacagtgtacgtaattttgtaggaatggatttaattaaccaaaaattagataaaatcgaactattttcgaatatattaacagcattttgattttgatttgattttttttataagtgtgttttatacaaattttattctttcgttttagtttttatccattaaaaggtgtaactagttgttccaacctaagccttaaaaatttctacttataaagtattttgttattggcttcattgtgtccagctgtagctcagttggtagagcggaggactgtagttgttcaattgacatccttaggtcgatggttcaaatccgtccagctggaattcttttttcccattttaaattggaaatttttgctttaattcgccaatttattttgtttcattttgttttataattttcaaaatttttttaaaaatatttttgaagttattattttttgcagattgttgtgaacaatccacccaacttgggcgacccggacgaacggcaaaagattcgctcgatggtccacgcatttgccaacactcggcacaccatcggggacgagtcggtccagttttggatggacgaaatggagcactattacatggaccaccggatgggcattggtattccggtgcacaatgtgaccagtgcaaagcacttctacgggttgacacaggttttgtttttcagacatatttattaccaattttgtacaacaatttatgcttcttttttgtcatttttagtgaaagatttttgaaagcattttctgggggttttagccgtcccttaatttttgccacttttttatttccccgtcaaatttagaactaaaatccctccatattcaagcataaactattttttgggttttcgtaatgtcgcaaaatcattgtaacgggctgcctcacgatttttattgtttcgcccttcaaaaaagccgctttttcgatggacacgtgacatacatgcacaagaggtgtctcgacacacccctcccccctcggcacagcggaccgcctgccacccccttccccaaaattgtcactgtcccactcgtccgtcgtatggcccttgggttaagtaagacaccccgtgtatgactcgtagcgcaactttacaacatttacagaaaaaaaatgattttgtttttttttagcattttctctccgcacggcgcaacgacttttggcccgaggatgtgaaatgggaatggcaaccgaacaaaggcttttcacgcatcaaagcatttcggtgagtgggcgagaaagcaattattaaattaagtaaaaattgaaaaaaaatccctttcgctcaacaatcactaatctccaacaaaaaataactaaaattctccccgatttataaaaaaaatgttgcaaatcatctccgcgccattttgaaaaaataaagaaaatttgattcgcattgtcgtcatttctttgcgctgtgccgtcccgtgccattccattttgtgccgtgccgctgcgtccggtctacccgtagagccgaaccagtctgtgcggtgtcgtgccgtcccaattggtgccaacaataagactgggctcagccctcgggtggaccgtgcgtttgcgtgaaaggcgccattttgggacgtgaaaattaattcatgccctcctcctttcgctctcccatctcaaagcgaaattttgctttattgactcctnattcantattataaaa

SEQ ID NO: 76012 - DNA, 2069 bp, Heterodera glycines
attcgcacctacaaaagcccatacatcagcttcacctatctttactcacaggtttttttatttttatggaataacaatagggtgcaaaaaaaatcgaaattttaaaaaatcaaatcaaaaaacagagccaaaaagccagtttttgatatatttttaaaggatagccaacgcctgagtgaaacaaaaaaattttcccctaaaagcattgtaaaatccgaaatttttatacaattgggtgcaaattgtagacagttaattgtaagcaaccaattacttttggcaatagtccaataaaaaaaattacggttggctttggtttttgcgctaaattgattactgtatgtattttttttcatacccgcctaccctttttttttgtcagacattggccgaagagttgaaacgcaacgcggacacgctggtgccccgttttgtgttcgcctttttcatcctcatcatgttctcggtaagcgatgttttttttcaaatttcagcggactaaatttaaactatggcaattatttttggtgacaattccacatgcttaaaggaataactcaatttgagcacccaataatttttaatttgtccaatatatattttttatgtatttggttcaagaaacaatttttaatatttttttttgtctcaattttgataaacacaacgcaaatgttttggtttgaccatgtcgataattggcacgatgtgcaaaatattttgaaattggcgaaatctttgctacgaaaattggttcaaagcccaacttttcacagtttttcaaatttttcattgcctttatcctataatttgcaggtgttgtgcaacatgtccacctgtcgtgcccgcaactgttacattgactggacactgtccaagccggtgctggccattttgggtgtggccaacgcggcatgggcattgtgacggccatcggactgctgaacatgtgctcggtgccctacaacgacattgtcggcgtgatgcccttcctggttgttggtgagtgtttttgtgccgagcccgtaaaaattggtgtgtggggcaagagcgcgctgaaggcattttttacaattactattctcatagcataaattaacggaacggtaaaggtcctcccctcccaattttgcgtataaattacataatgtgaaagcgatgcttaactcctatttgtgcgagttcctttggcgcgaggattgcaaaagacgcaatgtggacccttttgaagaaattttgcttcagattgttgcatttatggccccaaaatagggcgcatactaaaatgccttcagcgcgccctttgttgacattttttaaaattttgaggtgtaggcacaaaaccgaaaagtaccgatggagcagcttttttgaatttttcgcaaattttaccaaaaaaacgctgaaattttttttcaaaatatggtctgccaaagtgacgacctatatttactgtccgagaaaatggaccaaaaaggcaccgtcgtccaaaaattaaaactgaatttaaaaaaatataacccacaatttcgtttcaactgttttccctcaaatgaagaaaaatttttttggctaaaatgcccacatttgccattttaaatggcattgtatacatttaaattataaataagggatttgagtttcaacggacctgaaatgagccttcagggataaatgtttctgttaattccattgaaattgcaacctttttgttgtttgattgtttattgggtgcaaaataattttaattttaaaattcaaaaataatttagctgtcggtgtggacaacatgttcctgatgattgcggctgttcgacggacaaatcgggcctcgcccgtctgtcgacggatgggcgaagcgatggcggacgcggcaatttcggtgggtacacttcccctctccacgttcggagcaggacaaaactccgtctgcgaaactccgccaagaaaaaattataaaaaaatttttaaacagaagggaaagaggtgactaattactattaaaactctaattatttcctttgggggagcgaatcgttatttttttttttcgtttagctttctaagaa

SEQ ID NO: 76013 - DNA, 4842 bp, Heterodera glycines
atggccatccacagcactaatgtagaacaaatgccaaccatcaatgaggttgagcatttcttcaacctcgaatccttggggatccaggatgatcctgcccaggatgacgaccaaacagctctgaagctgtttaacaaatccatccgtcaggaagctgacggaagatactccgtcaaatggccgtggaaggagtccaatccggacctctcttccaatttcaaaatggcccacagcaggctgtcatcggtgctaaccaaactccgacattctccagaaattctggagaagtacgatgccaccatctgcgatcaactgcaacagggcatcagcgaggaggcccaaagggctcctggacagcttgagcacttcctccttcaccatggagtgctcaccaaaaagctacgcgtcgtttatgacgcgagtgcacacacacgcggaacaccaagcctcaacagctgcctcttccgaggcccattgcttctgccagatttggcaggcatgcttcttcggttccgttgcccgacttttccacttctcgcggacattcaagccgcatttctccaaatttcattggagccggaagaccgggaggtcacgaagttcctctggctaaaggacacttcaaagggactgactcccgacaacttggcaatatttcgattttgccgagttgcgttcggggtcgtcagctcgccattcattttggcggcgacactccgccatcacttgcaacagttcgactccccactgtccagggagatttcggagtccatttatgtggacaatgtactcctcgagtgcgagacggtacaggaggccttggaaaaatacaaattttccaaggacatcctccaacaaggatgcttcaacctgagggagttcatctctaactcaaaagaggtgatgaaacaaatccctcaggaggatcagcttgataagccgaaggccaaagtccttggccttccttgggacaccgagaaagacgaaattgtcttcaaattcccaacacctgatccattgaggccagtcacacgaagactggtcctcagccatctagcatcgctcttcgaccctttgggggtccttgggccatgcattttgccagccaaacgactcttccaagaactttggaaggagggccactcttgggatgatgccctctcagaagaggactcaatccgctggaattctatccaaagacaatggaaagacgaggaaatcagagttcctcgccgagcaatgctcaatgacacacagtcaattgagctccacgcttttgtggacgcatcggtccacacattcgcgaccgcgatatacgtacgctgcgccatgaacgacaaggttcaagcgtggctgattttctccaaaaatcgtttgaagccaaagagtgcctcaaaggcactcacgatacccaggatggagcttttggccatcctggtggggaccagagcactcaaatttgctcaaaggcagttgcgccgtccaattgccagccttcatctttggagcgattcacaaatcgctctgtcatgggtcaaaacccatgaaactcaaccacaatttgttgagcgaaggctgaaagaaatccaagaatgtctcggatgtacctttcatttcgtccgtactggggacaacccagcggacctcgcaacacgcggagcaactccttcggagctccgcaaccatcatctttggtggaaagggccaccttggctcgcacaagcgagtcaccattggcccagcgaactctgttttcaagtaacagagtcggatcaacagccagactcaacagagaatgttggcccgagtggtgcgtttctcgcacatactcactcaaaccagccaaatgagcaggtcttaattgacccctcacgcttcagctcatggaaacgccttatgcgaacaacaatgttcgtattaagattcctcgccttaatgttcaaaagaggcgaagaaccgattgcttcactcgtgaagcacagaaaggaaattcgccagatttccaagtctggggacttcaaggcggaagacttcgcactcgcggagcgagttctcatccgcctagaccagatggatgacgctgaagaattccagcactttaaaacagtgactggagacgacggaattctccgtctgagaaccagactggagatgagtgagaagccgtacagcttctctcatcccattcttcttgccaagcattcagctttggcaaagctgatcatcttggatcggcaccaaaaaaggcatcaccttggagtggacactactctgacagaattcctgagcgaattctggatgccaagtgcacgtttaaatgttaaacgagctcttcgggactgtcttctctgtcgccgaatgaatgcacaacaatttgcattaccaaccatgccacccttgccgggtgagcgagtgcgccgacacgcgccatttcagtccattggaattgactatctcgggccaacgacaatctcgttggccggagaaaaaataaaggcatggatcctcatcataacatgcctcgccacgcgcgctgtctaccttgaggcaacattggacctcacatcggaatcattcatcaatgttctccgtcgattcataagtcgacggggaaaacccgacatcatttggagcgacaacgctacgacattcaagctcgctcagaaaaccctggagcttctcagtgctccggggccggatcaggaagtacaaaacttcctgacccataatcgaatccagtggcgattcattgcccaaataagtccttgggcaggaggcttttacgagcgcctcgtgaagctagtcaaggactgcttcaagcgaactttgggccgaaggattctttccttcgaccaactcaacacattcgtggccgaagtggaggccaccctcaattacagaccgattactgcggtctcagacgcagtggatggaccagttccactgcgtcccatcaatctcttacaaccagagattcagatcaattgggaaaccgcaacagacccaattgattcagaggaacagatttcctccacacacgaacgtctagcttcccgaatacaagcacttcgggaagccaacgacgttttctgggccaaatggcactctgagtatttaacattactcagagaaagagcccagtgggaccacaaaggcccacgactccaaaacttcggtgaaccgaagaaagggatggtggtcctaatctctcaggacctcgttcctcgcaatcaatggccaatgggacgaatcgttgaaacacacggacggcctggagccatccgaagtgttaaagttgaaatccctgtccgagggaccaacaacaggaaaccaaaggacatgccacgaaagacagtccttactcgtccagtgaaccgcatcttccctttggaagcgggtcctgaaatgacggacccaggaactgaagctgttgctgcaactgaacagccaaatgaaaaccatcccaagctcgctcgagagccgggacatcaaatggtcaccagaagaaaggccaaactactggaaatgcttccagtagtggccatgatcattctcacacttgctcttccctatgcaagtggtttcccaattgggaaatgtgatgagtgtggcctcacttgttacacgaaaggaatcgtcgtaacagtgccacccgaaatccaaaagttcgaaatatgctgtgcagaaagctgcatagttcggcaaggcatcaaagccttgaacttcgaactaccaatcgaagtcctactcaacaatcatcactgtgaggccagattttggactgactcacagcacaccttcacatcaaacacgacctgcccggcagtcgatgaatgtgatctcatcgactgctatttttgtttcacacaacttgtgaatccaacatgccagcctgtcattgcggcaatgctggcaggaggcctgtccctaagtctcttgtgcttcatcttcaccatgtgttccatggtgggatacgccatggcaggactgagaatccttttttggattttctcagtcttgttcgcgcgcttattcaagccgcgaaaagagacatgggtattgagtgaggaggaggaaaacctcctctatcctcaccgacgaatacgccggcccaggccagcaacaagaaactgggccagtggccgagttagccaaatggcaatgcttgtcatggcatctctcccgtttgtacacgggggaattgagacagtggccataatggccaaatcagagagctgtctcaacaacggcacaactaaaatgtgtcaagtcaagggaagcgtgactcttgcgcttctcccggcaggacaaccgaatgtcctgtcaataaagaccgatgatggtctcattttgggaacccttcaagtgatcttgaaaggactctccctcgaatgccaagccttcaccaaggcatggaaacgatcacgagatcgcttccatagccagcaaacgatgtccgtctgctggctcatgtttcggagacttttgtacaaaagtccgaccctccacagccatccgagagctgagggagacagaaatgttccccgggaacagtttctgcatcgacagcacggctttttggggaaaccaatgtctcctcgccgccagttcttgtctcttctacaagtggtttgccaaaccacgctcatcagccatttacgaagtcattggatgcaactcttgggagtttggcatccatattcaacttcgcctcgactctaccactggaagaagtgccacagtcgaaactgtgcttcttccaggtcgtgtgctcaaatggcacaacatcagcatttcaacaataggggtcagccaagcaccggcccccctattgaacgctga

SEQ ID NO: 76014 - DNA, 533 bp, Heterodera glycines
ggtgtcccaaggaaggccaaggactttggccttcggcttatcaagctgatcctcctgagggatttgtttcatcacctcttttgagttagagatgaactccctcaggttgaagcatccttgttggaggatgtccttggaaaatttgtatttttccaaggcctcctgtaccgtctcgcactcgaggagtacattgtccacataaatggactccgaaatctccctggacagtggggagtcgaactgttgcaagtgatggcggagtgtcgccgccaaaatgaatggcgagctgacgaccccgaacgcaactcggcaaaatcgaaatattgccaagttgtcgggagtcagtccctttgaagtgtcctttagccagaggaacttcgtgacctcccggtcttccggctccaatgaaatttggagaaatgcggcttgaatgtccgcgagaagtggaaaagtcgggcaacggaaccgaagaagcatgcctgccaaatctggcagaagcaatgggcctcggaagaggcagctgttgaggcttg

SEQ ID NO: 76015 - DNA, 2061 bp, Heterodera glycines
tctcctacacggggcaataatctattagatttattatttacaaacaatgaaaatctgttgaataatgttaaagttggacctccattcgggaatagtgatcataatgcaattcaattcagcataaatttacaggttaatagtgatgcctctaaaaaattttataacttcaaaaaagcaaattatttggaaataaatggcatactctcaatggttgattggaatttatttttttctgattgcccggacatagagcttatttaccaaaaatttatgtttttcctaaataatttgataaggaattatgttcccatacaaacaacgaaaaaagttgaaaaactaccagaacatattttgaaactaatcatctatcgtaaacagctttggaaggacattcacaaagaccatataaaaataaaattcttagaagtttcgaaaaaaatcgatgtagaaataaataaattttataaaaatcgcgaaaataagtttttgcggaccttggactctaaaaaacgtttccaatttataaattctttccttaagactaaaaatactatgatacctgcatttactgataaaaatagtctgattctcttctcagataaggaaaagtcgaatgcattagcgcaacaatttttttccgtttttacagatcaaaatctagaacaatttcaatgcatagaaaatcctgaaaaaaatatcgaatattttaacataactccatatgaaatttatttttctctttccaaactttcaaattctaacaacactagtattgatggaattcccaatatttttttaaaaattgtaaagaaaatttagtccgacctcttttccatatttttagtttctcattgatgactgccaaaattccagaaatatggaaaaagtcaattatttgccctgtcccaaaaattcaaaatccggtaaacccagtcgactttcgtccgatttccctgctatgttctgtttccaaaattttggaagaaaatatagcaggaaaaataaaaaattttgttgaaaaaaataatttgttaccaaattgtcaacatggttttcgtaaagcacattctgttactactcaacttcttgaagtggtggatgatttcagttttgctttagaaaatagaaaatcaattgatgtaatttattttgatttagctaaagcattcgacacggttccacataaccggctaatatctaagctccaaaacattggtataaataattccttattaaaatggattcagaattacttaaaaaaccgaaagtttttcgtcaaaatcgggtctgatttctctgatgaatatccctgtctcagtggtgtgccgcaaggctcaatattgggaccactgttatttcttatttacatttacgatttaccaaaattctgcgaaactgaaaatgttaaaattaaactatttgccgatgatcttaaggcctatcatgttctttcaaatatttccttttctccactccaaaattttattaacaaatttaatcgatactgtaaattaaacggccttaaaatcgcttcaaataaatgtttaactttacatttaggacacaaaaaccaaaaaataaattattttattgatgattttccaattactaaaaatcccggaaacgaaccagtcagagaccttggcatttattttactaatgatttgaaatgggcacaacatattgaaattatctcgaagaaagcattacgatctgcttttgctatattaaagtcaatcaaaactggtgatacgaaaatacttgtaaatttgtttaatatttattgcagaccaattttagaattcggatctccaattttcaatccttatttaaaaaaggatattgaaaaactggagaatgtccaaaaaacttttttgagagtaatatttagacgtaacaattatgctgctgatttacctaattatgctgaattgttaaacatttatgatcaaaagtcgcttgagagtcgtaggttaaaaatagacttaaaactttttcatgaaataattttaggtaaaataaatttacaaaataacgaatccttttcttttcccaaaaccc

SEQ ID NO: 76016 - DNA, 1314 bp, Heterodera glycines
atgacttcaattaacaccagttcaaatgacccggtaaaagtgattaattaatgaattaataattaatttaattttaattatttttaatgttaaaataaataagaaatttttattttgatttttataattcagctttatttggcctaccgttctatcggtccatccgccgatttgattgtgccggccgttgcgctgtatttggttgcattggttggcattgtgttaaacggcacagttttagtggtcactgccagatccaagtaaatgccatggcattttcttattttatttataatgatttaaatgataaattaaattaaactttccatttttaattaatttaatttcctatttttcagttccctccgcggctccgccaattttctgatggctttgatttgtctttgtgaattggtccaccaaattgggcacacttttttcctggttgttgtcatttcgggcacaaattttgtcagttttctcactgctgacttaattatgaaggtatattttgaaagttaaaaattatttaaatattccaatttttagccttcaatttttgctataaattgtggcttaatggcaatgctttgtgctgcagttgaccgactttttactgttatttcacctttaaagtgaggaaaattaacagtttttgacttaaaactttgaaaaagaaaatcattttcgatacgttagttataattgagaattattttaaacagaatgccaaaatttatttttattaatggacattttttctttctcaaaaatgccgattccaaggaacattctgtccataaatttatttatttttatgtttttagacatatggacattttattacagttcaaatatgtgtacctgttcagttatctgttaatttgcacaatttatggtgcatattcattgaattatgtgctcgcaaatgcatttgaaaatgcgggaaagtatggcgcaattagaattaaatatacttaattttcaaattttgtttcagtccaaccaccggaatggtggccgaatcttttcggggcaccgttgggtataaatccatcacccacacattcattatttcattgtgtagcacttgttgttacgtggcaatttttgtgctcatccgacgcagaaattttggcaatttttggcattatgaaaaaatttgaaagtatttttttacagtaaatcaacagacgaacgcacgagtgttacggtcattagtcatcattttgtccattaatattggcgggtatttgttaaatttggcaatatatcaatttattggtgcatttcgccatatgtttgtgtaataaa

SEQ ID NO: 76017 - DNA, 863 bp, Heterodera glycines
agtgccattgggcagtgtcccaaacggaaatcgccgtgtcacttggctgatcgcaatggcatggctgctagccattctctgcgctcttccgatgaccgtcttccgtggcactcggcccatcccccacacgccgttcgtccaatgctaccatcttcaagggttcaacgccagtcatatcattgtgtaagttcttctccattttggtttcccgttcagtgtctttttccttttggcacttttttctgggtcacttttccattgctggcactctcccccttacccccccctcctttctcgtcccttttgattccccctcccccctttgtcgctttttctttacatccccatcccctttgttatccctcctcctcatccccctttcttgtgccgcctatcccccattgatcccacccccccccctcattcgcccatgtgtgattttctctctcctttttcctcttatccaccttattgccgcttcagtttccacttcttccatgtgatcaccaccttctacatccctttgggtgtcattttgttctgctacgtctccatcggcttgtcccttcgccatcagggcgcttcgctgcgtcagtccaattgtttggccaacaccgaccagcacaaacggcttcagcaaaacacaaaattgcgctttctgaaggcaaccgccgccattgtgtgcactttcgtgctcagttggctgccttatcaggtgtttcccctcccccttcccaatgaatcaatcattcaatgcttctcaggtgatggcacttcttcgcgtggtctgtgagcccgagtcaaagtgcgaacagttggcctcaaatttcaattggcttcagtccattctgctggccaggtaa

SEQ ID NO: 76018 - DNA, 353 bp, Heterodera glycines
accatggcaaaaaacatagcctgttcaatgatttataactttttttcagaagcaaatagattaaattttctttttagaatttcaagtactctatttattctatttatctttaaaatttcaaaaaatttcattgagtttcaaaaaagttctggacaaaaaattctgacttaaggttttgtggaatttaattaccatatctttttatatacttaagtaaaaaatttaataaaattatattctgatagaaaacacctagagctattgaatgataccaagaattattaatttggttgaaaatggaccaagttatgaatttatatgtcttacattttttgttttcctaccacatggcg

SEQ ID NO: 76019 - DNA, 409 bp, Heterodera glycines
atggtttggaaatgccatttggattcgaagagacaggcttttcctattcccagtgaacttcgcgattacatcgttaatgctctggtcgaaatgggcgttgaagtggccaaacactcgttcagactgactccgtcatcttttttggcaatttcgaattcgcttatttcagtttagtaatcacaataatcgaaggtttaagactaactcttccgtggataaagtgaatgtctatggaattgtccgttcctttcgtgccaacccggccgagtccattcttctcgctgtcccaatgcgttcttctaagattgaagcggttgctgttgccttagcttttgctgattatgctaaaagttgtgccatttcggctcgtagccaagggagagggacaaatgccctccctattctatga

SEQ ID NO: 76020 - DNA, 674 bp, Heterodera glycines
atggggagtaagaatgggagaattccatccgaattgcttttcgaactcatttccaatcttccgtttgacattcgatgggccttcacccgggtttccaaggcctatgattgttttgtgtggcagaaacaaaattcatgggttagagctgagctaatccgcaagaatgctggaaggaaaaaagtaggctaattactaggaaaatatggccatttttggcataaaagtttttacaagtccaaggcagaaacaaaataaacaaatttttgtcaataaaaaaagaatttagaaaatcgaattggttcattgtatcaactcggttttggtctatgctcaaaacattagcgatgacgttataagggcaaatgaaggagaatgcaacgcccatattgaaagtaaatattttatgtttatcaatttttgcaattatatcttttttagatctgctttgtattcgtcgtcagttggctcgtctgtaccgcttgggcagaacgtcaccgattgacacgtcgcaggtaacaaagaaaaactgataaacttgaaatttggaatttgcttgcctgggttttccctacacatgtaaatgaatttatgtttatgttcctgatttcttttaattttctattccatgttatgttcagactgtatctgccgaagaagttaatgccgaagattga

SEQ ID NO: 76021 - DNA, 1184 bp, Heterodera glycines
atggaacaagagcaaaatccgggcgtgacaaatactgaggtttgattttcagtggtttcacattgcgcctcgtgttattcgggtcggagtcagttcggcgccgacagtcgccaaagtgtaaacttacatccaaaaattggcatgctttaaaatctatatgggctccacatttacctatgtgtcaaaacgaaacggttcatgaaggcataaattttggctgtcagcaaagaaaagaaattgttattagcggtgccgaaccgcctgtgccgtgtcattctttaatgagacaatgaaattattggcaacactaacatattttgtgttttaggcttcgtcaacatcggtcgctattctcgacccttctgctgtgaccgaatcagaccgttcgtcaccgttggtaccggagtccgctgctgtggccactgacgccgccactcattttgtagcccaaggcagtccccaagcgtcggtaagtcagttttatcacaaaattctcatcttgtgctttgtaggctggttgtccccagggataatttaaattttaaaagttgggtgaggctagggagggaaaatattgccaatggaactaatttaacaacgaaataaaatgtctgtctggcagcacagatgggagtaaattactgttcttcctttgatattacccctaacgtttattaaaattcttttaaaaaatttttgtagcttccaacgcctccatacattgagaacaatgacgtgtggagaggacagttcatatggagggaacaaaaattcttcgactgtacgtgcacacctttgagtggtggtcctacagtgtcaaaagcgggtcgtgagatgatgacaaccgtgtcggaaggcgaacagagtggaagcggtgacggaggaggacgcatctttttgatcggactgacggactcgtgcgctgtttggaagtacgtggtggagctgagggacagctgggatgagaaggtgtgtatgatgatcatcaacaaacccgaaggtatgtaattaagcacttgttttcgttcctgcttttctctcaatccatttattgatgtcgttttacaaaaattgttttataggagggcaacttttggacaaatacagcgaatgtgttactttctgcgacaaggaaaaccaaattggtgtgctggactttgtcgaccacccgacaatcaaagacg

SEQ ID NO: 76022 - DNA, 49 bp, Heterodera glycines; identical to SEQ ID NO: 51273

SEQ ID NO: 76023 - DNA, 961 bp, Heterodera glycines
atgattgacaatgaacaaaagccattggaacgcaaatttattcaacaattgatagacaaagtgcgaccattgtacggtaagtgaaggaaaaagtactgtaattttaaataaaaataaaatattaaaaaaagtagttgatacgaagaaggaccatctgcatttgtggtccaaattgcgcattttggggcatgacaagcagataaaagatgacatatccaccacggaactgttggtaaaaaatcttatgtaattgttagacactagcgggtgcgtgaaccgtcggctatttagctgggaaaaagcgcttcgcgctttgggagcttcgctacctagatttgatcgaattggttggagagatttttttgaatttttaaaaaattattaggggtttttagtccacatcgaggctcaagacgggcgcttcgcgcccgtttttaaatttgttggccttggacgggcgcttcgcgcccgttatttaaagtttgttggttcatacgggcgcttcgcgcccgttattcaaattttgttggccttacagagattagaagaggtacaacagtgattaaaagacgtcaaaagtgattaaaagaggtggtacatcagtgattagatgaggtacaactgtgagtaaaagaggtacaactgtgattagaagaggtacaatttgatcgtaaatatacacctaccctatcccgagttatgattttttgaaaattccttcaaattcccagtggccaaaaaagccggaaagtgattaaaagaggtacaaaagtgattagaagaggtacaagagtgattagaagaggtacaatggtgattagaagaggtacaatagtgattagaagaggtacaacagtgatttgaagaggtacatcagtgattagtaaattcattaaattaaaatgaaaatattttttaacaaatttaattaatttattaactcaaaaaatattttaaatga

SEQ ID NO: 76024 - DNA, 906 bp, Heterodera glycines
atggaggacaattctacacaaactgacattaacgactgccattccgaacattgttcgaaagaaaaaacccatatttccgaattgcataaaagtgtgcaaaagaaatttcatctcgagttggaacaaactgagaaaaaggtcgtaaaaatatgacttttaaattaaattatataaattaataattatgctttcttacaatttcaggacgtaattatcgaggagcagagcaaaaaattggaagaattgcaacagaaggcgcacaaagacgaagtcgcgaaggcagcgctcagacaggcagtcgccgaggaatgccaacaaaagtgtgactacgctgacaaacttggcaaagtggaagcagctcttgagaaagcaaataaaaacaacaaggaactgaaagatgatctcgacaaagtccgacgacagaaagccgagaatgatgcgcaaaacgcggctgaaattcgccgtttggaaagcgacctagaattggttcagcatgtcaccagcgccattcatcagcaacgttctcattcggtagtgcttggctattaatagggggggggggggtgttaatgagagaatttattttattattatacagtagcatacagtatttcaaatgataatttatgaatttaaaaataaaaaatagggggggggttaatgagagaacttattttattattatacagtaaacatacagtatttcagatgaattttatcaattacaaaataaaaaatcacaataatttttgaaaagaagcatttaatcgaagtttatttttttgaaatttaaggcaattggccacttttcgttcacgacttccaccaggaccatttcatcaccggaagaagaagaagaacaaaatgaaaaggcgctggacgaattggcaccaatcggagcaaaaa

SEQ ID NO: 76025 - DNA, 374 bp, Heterodera glycines
atgaaacgttcttcaagtggaaacgagtctgacagtgcgaccaaaaaaattaaatggtaaaaaattctttttttaaattgtttttccatgtaaaaatcctctacaggagcccaccggaaaaaataaacttcaatcactactggactgggtaagttatgttataataacttaataattattacttttttaaaaatttaatttttcaataattaattcatcttttaggaaggttacgtttgcgcagtactgggacgggtaaaaaatataatgttaatatgttacttacaatttttaaattcagaggctaccttcctcctgaccccgaatttgcgaattggtgagtcagaaatattaaaaaaaatgtaaacaatata

SEQ ID NO: 76026 - DNA, 156 bp, Heterodera glycines
atggaagacgacggtccagcggtgcgcacagaagtttcgacggtgacgaaagttgttgcaccaatgacgatggatgaagaagaagaggaagcagcggcagacgcagattttgttgaagataagcataagcaactcatattagctaaatttataatg

SEQ ID NO: 76027 - DNA, 586 bp, Heterodera glycines
cttcatctctgccgactgttggctcgaagtgtttgctttacttccgccttctcagcttggactcggaatcgctctgatcagtcgccgattttaccgccgcgtggacaaacatttcaaagcacgcaaatggatattggacaccgaattgcgaattcaagagaaagagctatggtttggcaggaagcaaatggaaattgtcaatgccaattggaagcgtttgccaatcccacaaaatccgttgcccaacaaagtcatcggatttaaacacattacgttcatgtaaaattgataagtttcccattggtttgagataactttttcttgttttagttacttcgaccacaatattctcacatttgtccgccgttttcaccgctttttcactttaattacaacatctttgggcattatgagtgaaaatgttcgcatttttgagttcttcctgtccaccatttggccaatttttggtgacttgatttttaaatttttgataaattttctagatttttttcctaaaattagaagaaaaaaaaattttcggcggcgggagacgttttgtggtgtacccgggacggacggtgccgaa

SEQ ID NO: 76028 - DNA, 1744 bp, Heterodera glycines
gatctttctcctataattggccttattgtatgttgcctacttattgtgcttttttctcccattaagatcagccacggtaatccggtaaagtcaaacaacaaatggccatggttggtggcactgtttgcccgcgaggccggcatttgtggcgatgatggcaacaaattctgttgtacggcatcaatcattggaccgcagcatgtgctgaccgcggcacattgtttcatgtctttcaaaggcgaacagcgagaaaatatgcacgaaaaggttaatgaaaatcgaagggaaaatatttttatattccttattaggcccactaattaattaattttatatatgatttgccgaattgaacacaaaattgtagggctattgaatgttgtacctgagtagtctaaataaattcacttggagtagggttgttgctgggacgatagccaaaaactatcaaaatggcgttagtcaaaaaaatatcaaattgaaaatttttgacagaaaattcttcataacttctcccattttcatttgatgcttttttgactaacggccattttgattttagtccgactcactaactaattatatcaaaatgttttttaaattaaattttggaaatttaccgaaatttgcctactggtggtgggaggaagttaaaatttttaacggatttttaaaactggcattaaaaattgagcattttaaaaaagaggaggcaaatgacgccggaagagcgcaaatcgccacctttggctaagttccattttttactttttaaaattgagctctaggaagtctgatatttttctctgatcagatttttgtccgcctcggctcatacaatcacagctcaaaggaggcaattgagcccaatttagcgaaagtgattgtccattcggagtacgatgagctcacatttgtgaacgatttggccatcataaaagtcagcgacagagaaaaacaataatcagcagaaggctttatgttaattgacattagtccaaaaaaaactatatcatgaaggtttgtttagcccttcacataaaagaaggagcaccagatgtgggaccgaattacgcattttgcattccggcatttttatgacaatttcggaaaatgcaaattcttattttgcaggaatagtgttttaaaataaaaaatgcccataatgaaaaatacatattgaaaaaaacgaactcagcaaataaatgagaaatttagatactatttcaaaattattaatagatatttaaaaaattccgtaattctaccgtattccgtcaatttttgcgggcattgatagagggaggatgcttgcattttaattaatattattatttcaatgattttcaatttagttagctgaaccaattacttttatggaaaatgtggagccaatttgtttggccaattctacttctgaaaaagattttaattccaataataacttgcacattgttggctggggacatcaaaatggtaattaattactaaatgattcgcaattaaaaataattttctctttgataagctaattaggtataaaatcgcccaagcattaaaacagcaattaatattaaaatatatttaaatatggacactcagaatgctgaataaaagttggcatttgttttacagaagccgaatatgatgaagagggaaacgaattgtggcgagacccggatgttgagccggaaatgttgcgggaaggactcgcgcagaaacgcgatgaggacgaatgtgcaat

SEQ ID NO: 76029 - DNA, 632 bp, Heterodera glycines
tatagtcgtgccggaccactcatattctttccgcgccattccgatggaattcgtttataacgcacttcattacaatcacgttctgggtcgtcctccggaagaaaatgttcagcactgtttaaatcagctggttgtgcattttccgcccctgcaagcagagttgaatcagagaagtcggcaggcaaacgcacataatttgtgtaacgcacttctaaaaataaaacaaagaagagaaacaacaaaacaaactgcgctataaattacctgagagctctgtaaggtcggtatatggctttggaaaatgttttcggcatcgggttcgcccctgctcatcgacctctgtgcacgcagaattgcaatcatgcagcatcattgtagtaacataatgccatagccggcgctgctgatttgcttctattgacatgtcctccattggtggaagcggaggaattcttgcaaacacatattggtcaacactttcaggtgttaaaaccctctcccgttcttccaggataagaagcatatggatgtgtggcatgcctaaatttcaaatgctataaatattttctaaaaaattcaccacgcttttggtgttcaacgctatagcaccatcctgccacttttccaagcac

SEQ ID NO: 76030 - DNA, 2638 bp, Heterodera glycines
atggatgctgttcgtagccgtgctgactgtacggttatcgagcgtgcagatgctcccacagctaagcaagtggccgtaatatgggtgcaagaagacggccttgctccagaagttaatggtaaaacttgcactattgctttatgaattaagtttttaaggtttctggctgagtgacaaggcgggcaaaatgagggagttgaaaagcggaatgccacagctagacccctgttgcttcccactgcttcatccaaaaggcactgctgggtggcgttggttcatgaagaaggcatttttgcaagggcgcaatgtaggtttttttattaattactccaatccaactttttaattcttcctttgcctcttagataagtgctgatttaaattcaagtcaaaataatgcatcaaccgttaatgatgagtctgaacacattaacgatttcgagaccgaatttgacaacgagcctgaacctgagagtgcgcaggggcggcaagtggagaatgatgtacaaacttttttacatgttctttgattatagtacatattaaggtggtggttgctcaaaatgactctgtttttgaacctgtttttggtgtgcagacaaagaagcgagaacttggtatcaagaaaaccggttcagaggaaaatatttccgagaggcaattttaccgctatcgtttggcgttacgagaaaatagcaagggggcattccactggctatggtttgcccgtcgtttggccgaattcttcgtcattgctgttctcaaccgaattgagcgcaatgagatggaccatatcaaggcaattcagcagcgtaaaaattaccgccaaactcttgctcgagattacatcaaagccattgagcaaggactccagcagcagggacgcaatgccaaattgggaagcgtgtatttgatgccccagacctttgcgggatcaaggcagtactatcaacaaaaatatgctgatttgatgacaattgttcggagtttgggaaatccaacatggttaggtatataatgtgaaatatcggtcactctgttgcttttaggtttgtcacctttaccggaaacccaagctggccggaactcaaagaggccttgcaggggcgccaacaatatacgcatcgtgcggatattgtatgcagaatatttatggataaggctgctgaatttgtgcgcgacttggttgaaaagaatgtgcttggaaaagtggcaggatggtgctatagcgttgaacaccaaaagcgtggtgaattttttagaaaatatttatagcatttgaaatttaggcatgccacacatccatatgcttcttatcctggaagaacgggagagggttttaacacctgaaagtgttgaccaatatgtgtttgcaagaattcctccgcttccaccaatggaggacatgtcaatagaagcaaatcagcagcgccggctatggcattatgttactacaatgatgctgcatgattgcaattctgcgtgcacagaggtcgatgagcaggggcgaacccgatgccgaaaacattttccaaagccatataccgaccttacagagctctcaggtaatttatagcgcagtttgttttgttgtttctcttctttgttttatttttagaagtgcgttacacaaattatgtgcgtttgcctgccgacttctctgattcaactctgcttgcaggggcggaaaatgcacaaccagctgatttaaacagtgctgaacattttcttccggaggacgacccagaacgtgattgtaatgaagtgcgttataaacgaattccatcggaatggcgcggaaagaatatgagtggtccggcacgactatatgtaataatgtttatactttttttcaaatattataacttcaggagaagtgtggtctattctaccagaaaagaaacaaacgtggcaggggcgtcttacttcttgatgatagccgtgttataccctacaatccattcctacttttaaaatacggctgtcacattaatgtcgaatatgtatttggtcagaaggcgtgcaaatatatttttaaatatttgctaaaaggtatacctaaaagtcgggttttcgaacaatacgtgtgttgaatttaagggtttgagaaagcatacgtaaaggttatgcagccgcgcaggggcggtgcgtctacaaatgaagaagtctacgactatgacgaggttgcggcaacgttcaaagtccgttacatgacttcaatggaagcatatttacggctcaattcgtatcggattgtttccatgtctcatcaaatctatcagctttcaatacatgacgaattagggcaaacaatcgttattgaagaaggccatgaagagcaagggcgcagaaggattgcaaacaaaactcgtctaacagctttttttgcattgtgtgcgaaggaaccagctgtttccgaattaacttataatcgtgtgccctatttttattagtaagtacaattaaagcataaacttagtgtttgtatatttaagctggaaccagaaaaacagcgattggatcaaacgaaaacgtccgctgaaagagggtgcaggggcgcggatgttggtccgcgtcttcacggtttccccaaagcgtcatgaattatttgcaattaggttactataccagaaataaa

SEQ ID NO: 76031 - DNA, 305 bp, Heterodera glycines
atggaaaataatttggaaaatgggaaatgtgaattaacggtaaattcctgtttgtttagcatctggcgaaaacccccctaattttaacacagaaacattataatgtgaaagaaatataattttattatatgcacatattaagagaaaaattgccattccttgaatttattgaatggaataattgatttatattttttctcattataatgaataaattaattttatttctttttttttatattaattaatttattaagaaatttggaaatttatagattcaacattctaatgtaaagtcaaataaa

SEQ ID NO: 76032 - DNA, 71 bp, Heterodera glycines; identical to SEQ ID NO: 53617

SEQ ID NO: 76033 - DNA, 71 bp, Heterodera glycines; identical to SEQ ID NO: 53617

SEQ ID NO: 76034 - DNA, 71 bp, Heterodera glycines; identical to SEQ ID NO: 53617

SEQ ID NO: 76035 - DNA, 759 bp, Heterodera glycines
atggcggttctccactgggcaagtctaaatgaaattacgacgaaaaaggctgctggacgcattgcttctgatgcggaccgacccgatgaagagtaaggaaattcttgaaaaaaacctaaacatttaaaatcaggaataaaaacaatatttaaaaattattaaaaagtatttaaataatattatttatcatttttggctttactccacatttccagtgatgttgagctcggtgctgcaccggacggaaacaaattttcggtggcacaaaaattctcgcggagcatttcgatgatcggcggcaccatccacaggcaggacaccgccacgggacgtgccaaaaagaaggcgatgggctcgccctcagaggcggccatgctcaattacgtaaaccaactgatcgacgtggaggagacgcgcgcaaacaacaacgtaaaatggccaaatcacacaaaatggcaaaggattggtacttttcagatcgttttcgaagtgccattcaactcgaagcgcaaatggcatttggtcattttggaacagtccgaggacaatgccgacggactgaagcagtacaaaatgttgatgaagggcgcctcggagattctgtcgcacatgtgctccacctttatggacgagcatggccaccaacagaagctgggcaacgtggagctgaagcagttcgaggacgcgtacactcacttcgcggaggggggacaccgcgtgatcggattctccaccaaaacattcagtgcaccacggtaa

SEQ ID NO: 76036 - DNA, 1727 bp, Heterodera glycines
aatatttacttacatactaactgtcaaataattaaaaaaggaagtttatctataataaacccctgctaattaatgcagaattttgccaaaagtgctgaagaagtcccaaactttcgcctcgcatcagcagttggcactttgcgtgcccaaattgatgatgaaaacgctgagctcggaattgccattgagcaaagcggaaaaggatttcgaggcatggcaaattcgaaaattaaataaataaataattgtaatttaataaatttgccaaggtcattcatggtgaacgaatttcgcgtctgagtccctccgaatgggacgaactgatcgaaaaggaatcggtcgtttttgcgcgcacgacgccggagcaaaagctgatgattgtggagcagtgccaacggcggggaaaactcatcgcaatgactgtacaaatttcaaatcgaaaaaatgaattttaaatgcattttagggggacggagtgaacgacgcacccgcgcttaaaagggcggacattggcatttcaatgggttcaggtgcaaaaacggcaccgccattttgacattgatttttgcatttttgtgcttttcataggcagtgaagtggctaagcaagcggctgacattgtgctggtggacgacaacttttcctccattgtccatgccgtggaggagggccgcgtgatgttcgagaacatcaagaagttgctggcctacacaatgccgcactctttccccgaagtttggcccgtgataatcaacttttgtttcggctttccccctggcattaccgctttgcaggtgcaacactttaacaaattgcataattagctggttaattggttgtccaatttgtgtgtccagattctctccattgacttgtgcaccgaaattctgcccggcgtttcgttgtcgcgcgaactcgccgaaggcgatgtgatggcacgcccgccacgggccatgaacaaagtgctcatctccaacactttgttggcttactgtaatttggtcatttgaattcggaacggttttgtcgtcctacttttactttagcatatgcctacacgggccaaattcaatcgttgggctgttttttggcctactgttgcgtgttctggtaccacggcatcgccatctccgacttgtggatgtccgccctgacaagttggaagccggacggagtggcatttgccaggtgttctaacaaatttagcgaacattcgaatttttggcaaaatgaatttcagcaatggcaaatcgttctccgtggagcagcagctgtacattgggcgtcaggcgtgcagtgcctggcaaatgggcatcgtcttcgggcagttcttcaacatttggagcgcccgcacgcgccgagtgtcgctgttccggcacggctttctctccaacaaagcacttctgttggcattgcttgtcgaattggcactgatcaattgctttgtgtatatgcccggtttgtgagaaaagattttaatgaattcccacggagtccgccccatccgcacaactttaaaatgttttcaactctttcatatttcaattttaatctccaatgagctagcttttttaggtgtcaactcttttctcggcggtgctcccatcccttggcactgttgggccgttgtggccgcggttggcttatttatcaacgcgtacaacgagatcaggaagtattttgtgcgtaattaccctcaaaacagaattgttcgctgcttcaaatgg

SEQ ID NO: 76037 - DNA, 1175 bp, Heterodera glycines
atgtacgggcaggtcagcccaactaatcgctaattaataactagggatacgatttttcggctctaaaaactgccaaaataggtcggctttaggtcctaaaaacctcaaaaataggctctaaaaaatggaaaatggcactaaaattacctcatttctaaggtgtgtaaaatgacaaaatttattcaaaaaagtaaaaaaattaggccaaataagtaatgagctaaataaatttaaaaaaaaattttggacatgaatttttgagaaatttttcatttcttaggggtgtatttttcgttttcttacgtttttgttaacaaattttgggaaaaatgccaaataggtcaaaatagatttttttcagcattttttgatttttggaaattttttgaatttaattgaaattttttcgaattttccaaaatcccgcaatcccgcacgggatcccgcaaattttaaatgcgggatttgcgggattaatcccgcgggatcccgtcccgcaaaaaattttgagttccagtcccgcagcgggatccgcaaatttgaaatttccgtctctattaataactattaaatgctatttaaataaatatttaccaattacagatttccacaaaatttgatatttggtcagttggaataattgcctttgaaattttcattgatcaactgagtttggaggagaaaaaggcaccaatgaacggggtaagcatggatcaatgtatcatcagagacgggagccaatcccgaatcatttcaaaatcttggtatagttcggtagccctaatgaatttattaacatcattcttagtttaagaaaattccatcaaacaattaaatttcaattatttgtcgaacaaatgaatagatgaagaaaagccggacaaattttgggtggtgttggtcaattatttcgcactgacttttattagtttttttatggatatgatgcaattttttttttgaaataaacaatcaaaacaaaaaagttttttttaaagatggagcgaaggacaatgctttgcaacatcggcaatttgttcttcggatttaaacggaatcgcttcggagattaccccggcaatgtcaaagaagtgccgcttttgtactcggaagacccaaattgggtgtggcaaaacaagagacgccattcacgcggtgctgcgactttggcttaa

SEQ ID NO: 76038 - DNA, 942 bp, Heterodera glycines
gtcgaacgaactcttctgatcagaaataataaacccaaaatggtgtcaatttcagttatttggacgcgacggaaacaaaatgggcacagaattatcgaatgtattcctacattttggatgaactcgtgccactcgtgttcagcactttttcagtggagaaaaataaatgcggaatttttggacattcaatgggaggccatggcaagtggtgaacacgcggtgtaggcacggaccaatctgtccgcggttagagggagggtacacggagacacacccaaccatggaacacccccccccaccacccatgggacacccaaccccgccatcccaatccgctaccagacataatgaatccagagagcaccgtcctcggagttggcattaaaatgggacattcactcactcaaccaaaatactttcacaatgttttcattttgccagacttttgtttgagtttaaaagaattgttaaatgtctctgcacttttgccactgactttttcccaggtgctctgaccattgcgcttaagcatccggaattgttcagctccgtgtcggcctttgccccaatttgcaatccgtcgaaggcgaaaggacagaaatatttgcgtgtctttttggggaacgatgagggaaaatgggcaaattacgacgccacggaattggctaaaaaatacgaagggcccaaaagggaagtgctaattgaccaggcgagtagaaaaacaggaacaaaaagtgatcaaaaatgatggaatgttttgaagggaagtgccgacccattccttgccaacggcgaccttttgccagccaatttgttggccgttgaaaatccgaatctgacgtggaaataccgacttcatcccaattacgaccacggctacgcttttatccagacttttatcggagaccattttgaacaccacgccaattgttgggcaatttg

SEQ ID NO: 76039 - DNA, 435 bp, Heterodera glycines
gcggcgcgcccaagcactcatttacaaattataaaattcgttaattgcatatccatttctatttaaaattggctaattgttagttaaagagccgttaaaccgctgcagctgaaagcatttaaatttaaacttcgtttttgacaatgtcgctggtcgaattaagcaaatcccggtggttcaatgggtatcagaaaattttcgaacataacaggtttagtgaaatgaaaaaaagcaaattggaattattttattgttacagtgcccagttaaagtgccgaatgcgatttggggtttatttaccggacaatcagccggaaagcaaattgccagtgctcttttatctttctggtatgaagtcaatagaatttgaacggctggagagggagagactgagaaaaaacatttgagggttgaaatgcaccgaggaaaattttg

SEQ ID NO: 76040 - DNA, 414 bp, Heterodera glycines
atgtcaccaattcgctatccctcgggagttaaattgcctcccttcgcccgcttttatgataatgtgtactggaaagtgaagcgctacatgaagccccaattcttcggagttgtggccactgttacaattattggtgcggcattttgggcgattgccattcagccgatgatcagcaacgaatattatgctgagaaacaacgcgagtggtggaaacggatgcccgtgtcgagggaggaacttgcgggagggctgcccgtgtggagggacccattcgaccgcgaggaccgcaaaacgccgtcgtacgccaaatagcaaccgaaaagcgggaggtcgttgaatccctttctcattgcccacactttgactgcatttttcgtttgtcggcacttttatagatacggcagtatgtataga

SEQ ID NO: 76041 - DNA, 581 bp, Heterodera glycines
atgagtgttggggaagtgaatggacggaaagtggcgcgaatattggccacgaggtgggagtgttcacaaagataacatttggatcggttccggtttcagaagtggcattgatgtttataatgcggacaccgaaggcgcacttctcacttttgcacaacggcggaagccgcaaaaaaagtggtgagaaaagcaataacaacaaaaatattgagattatataattaggtattaatttttggacaaatcggttgtagctgtgcaaccagcaacaaatgtaatcattcgttggcggaggagcggcgcattgtcattacgtcacggaggcaatcgccacaagcggaggacgacgaactggtcgaagttctgtctgccaaaacattaaccgaagagagaagggcacacagtggaggaggacagaaaagtggcaaaaatggacaaagaaaagggcgaaatggggaggaggacgaggaacagtcaacgctggaccaagtgacaccaatcccaacaactttggaactgagcaattccacatgataaactaacaataagttattccacgttaccaattaaagtgtaataaa

SEQ ID NO: 76042 - DNA, 2200 bp, Heterodera glycines
tgatcactgcttttttggtgcaatttatttatgcttttcgtttcagcttcttcacttgtgccctcattgaatttgctgacattgtgtaagtttttaatcgcattgattagcttaattgtttttaatttgttttcattttagctcagagaacattttcggctccgtattcatgtactattttgtaaaacgttcttccgccaatccgtggcctcgttggatgggcattatgcacggctatgaaattgagtgggttttatatttgaataacaaatacagtaggatcgtttaccgtagtaatttgtcgtaaataccgttaaaattaaccattcatttaccgccaatcatcgaaagctacccaaagaaatattgatttttctaattggcaaaaaaagccggtaattgaacccttataaatttatcattacaagtcgttttcggggtttcggtgaaaaaacgattacggtaattaccgggtcgccgaaaaggtcgcattgatcgaaacgaaatttttgtcaatttttcaaatcataatcatggtaaagcatttcgatcaatgtgtccttttcaaagcgcagataacggcaggtccaaatcatctattcggcattgtcacctcccacattttcatggcttttcctcccattttcaggtatgtgttcggcatgccatttcggcacccacaagcatacgaccaaaaagagttggacatggagcgggcattttcggcaaaaatcatggacttttggggacgttttgcgcgcactgggcaagttttgggattgcataaatcatttaaacgataaatttatcattttcaaatccacatttcagtgaacccatcgagttctggcccaagtacaacaggatcacgcgaaagtgtggcatttgtttatggtttaagccattagggccggacagaccaatggcaaccaacccatgggaatcctgagactgttcctgatcgagaaaattgatcaaatatgatcataattttttatttatcggtcgagaaaactgatcgacacgaaacataatttaagtgaatattggccagtattttaaaaaatttctgattatttaattgttttttggtgcaacattttgacatctctattttgggcttttctaatttaacagatttttcatcaatgaaaacttgtagccctaattatcatcgtttttccatcttctgacaaatattttatgatttttctgcattataaaattttaattaattggggcccaattttgctccatgatcgttttggtcaattagtaaattaattgctcattaattgactgaccctaattccctcacaggtcgctggtgctcagcgatgagattgcgcgcgggaacagtcatcgcatttatgtggacgtgcacggcaaactgtgccgtctgttggaggaggcgcaggcgctggcgcggctggcgccggaccagcgccaggtgcggctcagcgcacgcggacccatctcaacagaagcggtaataggagcagtagttcaatgtggtgttgagctgattaagattctcgttctcgagaaatttctttgatttatttcgtctcggtcgtggtctcgaatttaagggctttttccaggatcgaaaatcctttggcgtattaatttttaattgttttgaaacccgaattaaattgacttttaaactcatttgggctaaattataaaaaagtaccaaccacgcggacataaactgtcattaaattttcaattagcttgcaaatttagaaaaaaaaacaactttggaaaaatgaaaaacggcccagaatcagttttaatttcatagaattaaggaactaattgaattttttggctcaaaaattattaagtcaatcgggacccggcatttttgacgacccaaaaaatgtgatcagattgatcagttaagttccaaataaatcgtcgttcattcaatcgtaaaaaacaattctggcatttaggacctcgttgctgttgctggacacagaatggcaccaggcattgacatggcatcgctgaacacgtggcatcgcgcttcttctccctcactaaactcggcaaccgctgatcagcgaaatttacaccgtccgatcacttttttgacatttggcaccctgctaacagtctcaatggcatcaccattgatcataataccgcccaacaaattttatttgttcatttccatttcacattttct

SEQ ID NO: 76043 - DNA, 1205 bp, Heterodera glycines
atgaattttgcgtttgtgccaatcgatgaggacgccaatttcttcaagggcaatctgttcgagaagttacaacgcaaggagttcaagaaggatgtgagcatcatgctcggcacggtccgggacgaaggtgttccaaaaaagggggatggcaccggcactggggcggcattttgtgccacaactgcttgatgccggcaattaccgtgcattcgattaggccttgagaatttagccagagatacgaaaccccaaaaaacgcgaaacctttcatgactcaatgtcgagcttctcgtgcagccctaatttatgccaaatctggcatttaattggttttcaaattgagaattgattgatcaaattaaatcaactaacgatcaatttgtagaagcaaaaatcgatcgaattgaaggttgaagaattttttcgggttgattgggtggtgatcaaaaaaaatcaatcaatctgggaaagttttccggtttgatcccatcattaaaaaaaaatgaatttaaattatgcaaaaataattgttaaatgaatgcgtttgccgttaggcaccggaaactcagcctctccagagagtttttttgaattttgagagccgctgaaaaaaaatcttagcacaacaaactttacaggcacttactggctaccgtactaccttcacaaatacgggttcggcttcaaccataccatatcaccggaggatcagtacaatcaggcactggtcactgagtaagttggaatttacaattaggcttattaccttgttttttgtccatatcattcctttaaaatttggtgggcttctgatcactttttttatttaatcatttttgatcaattaattgttctaaggatgggcgggacgggatttttggaaacgccgggaccggtaaagtcgggaccgagatttgtttcttccaaaataaggatcatgttcagaaaaatccgggaaaatttcagaatttcaacatttaaaaatttacataaatttattagcaattttttagaaaaattaagaattaaaaaaacttcctattctttcatttttctatttttgaaaattttcttagagctgaatacaccaaagcttttgacgccttcttgccttactttggcaactcgcagttggtacggcacgcgctgatgcacgcctatgcgcgcatcacgcctgatcacaaccatgccaaggcggtggaacg

SEQ ID NO: 76044 - DNA, 1106 bp, Heterodera glycines
atgcatccaatcaaaaaatttatatttttgtatcttatactttaccaaagtgtgaaaatcgaacaaaaaccggtacaccgtcgtgctatcctctctgtcttagcaattggaggtattgtcgctcttgttttggtaccaattgtggtcggatcggcggtagtagggtatttgatatcctacaacatacattgtgctaatggaagatgttagtttgtttatataccgtactcaaaaggcttatatcataaaaaaaatttaattcccctattaaacagatgtcgaacgattgaaagtcttttttgcttaaaatgagaatctacgaacaaaaatttagcagcttctagctgaattttagatgcaaaaagcatagttccaatttctcgatttctatagatcatccattctgtttcagtaaatgtttttcccattagtagtttgagtgatcctaattttgttagttgtaatctttcaggaacatcaaagggatcattcgaatctgtgccttgtaattggtgccgcttacggttgtaagcgcgtcgaactgatatccaagaggggtaattactcgaaatcgaattttcatctaacggatctctatctgtttttaagtcggcttctcgtgcttttcacaaaccttggcgccaaatgatattgccttctgactcaaatttataattttctcttctttgttctctatcaacctgttctgcttctagtttctctaatttttctggcttacagttagcattatgagttggctgcaacataacaagtttggttccctgtcgcagaacagctgacgcgacgttcgatttgacattaacatttttttcttgttcgcgaaaataacgacattttgaacaagaaatatatatgtcttcattattctcatttgtttgaatatattttctccaaatcttattgtcttttaaaaaattggctctaagctccaccctctcttatccaggcgtggatttttgcctaggtccagaggttcacgccatttttagcaacatgtatttttcctgaacctggatttttgtaaagaaaagctatgcttagacccgtgctgagtcgttccacaaaaaagctcagtgattgataaa

SEQ ID NO: 76045 - DNA, 2331 bp, Heterodera glycines
atggactacccaagaataaacgaaagtgaactcgcttttcccatcccttcggggataattgtcagtgggccgtcctcttcgggcaagacccagctggtccttcgtctgttacggcatgccagcttgatgtttgacccgccgcccaaggcaataggtatgtgcaaagggggtttctgtgcagtggactgttgctatttagtatgggcatacggtgagtactcgacgcagattcccgatctggagcggcagggagttgtcccccacgcaggtgccccgtctgacgagatgctgaaaaagctgccaaagccttgtctgattgtttacgatgacttgatgggtgacattgaggccaagaagttggccgatctgtacaccaaaaagtcacaccataacaatttttccgtgattttcctcacgcaaaacctgttcgataaatcaatgcgggtgccaaggtccaacgcccagtacatcttcctgatgcgggctcccaacgacatgcttagcattcgtaatttggccagccagatgttccctcgcgagcagggattcctgatggatgcctaccgacaggcatgtgccctaccgtacggctacctgttggtgactctccacgcgaacagagacaacattatacgcctaaggacaaacattttcccagacgacgaggagagaatcatttttgcccccaaaaatggttaagcgggaacagaagatcggtgagcgggttgtgcacaactacgactatttgaagaagttgggaaagacaacgtcggagaagaagcgccgtcatttgttgaacagtgccggttgtgaggaactgttaacgcttgtcgagatttgtctcaacgttttgaacgggagtttctgtctgagcaggaaacaaaagcagagacttgcgccatttgcaaaagacatcagacagttggcacgtgtgcgaagcgagaggggtgcgcgaaaactagtgcagcagtcaggcggatcactttttgcccctttgttggcccccattctgattgaggctgcccgatacctgctttcgcgcagcaataatggccaataaacttattctgctgccgtacgagcactacaaggggctggttgcagcgagggagacaaagaatgacgacgacattgctgagcggacaaacttgggctttgtcaaacgacaggtgaccgctgcagtacagaagcggaagggaaacgtcagcgaacggaacgcaatgtacaaccagcacctgcgccggtacctgaagatgcgcaaggaacataaggagcggcccgtccgagtacagctcagcaacggcgctcaactgctaaataaaacagtggagacgggtgtgcaggtacggcctggtccggacgaaccgaaggacaagtccgtgatggttaccgacgaagatgaagaggaagagattgaagtgccaaagtttttaaccccaacaagcccgacgcagggaagcagccgatcacccaggaccaataagaaagcagcaaaacagcaaaaattgatcgagaagaaggaccacctgttggccatcattatgtctgatccgcagagattcggcgcaacagaccgtggaaaaatcattaacccaaagacgggccgagagttcattgactcggacctggcctggtcaattgaacgcctggtggaccctcgcccggagaatgccccttcgccaagcggaaccaaagagttgaagaggaaactcgcacagaatccgcttgccagtagcctactcaatcgactgtttgttgggtctgggttcgtcggacaagtcaaacaaacgagaggatttattccctcaaaatggacaaaaaaataaacaaaatatacaccgacccggccaatccgggcgggtatgcgggggcgagtgctctgtacgcggcggtgaaggagaagcacccgaagttgaagcgtgccgagtttgaggactttttgcaaaggaacaccacctacacgctgttcaagccaaagagggagaagttccgacgcctacgcactgtgcctacgggtttcatgaccggtaagttgtaccggggcttattgcgcacaattcagggttcagatgttcaggcggacttggcagatttccaggcactttcgtgcaagaacagcggctaccgttacttgctgttggtggtggatgttctatcgaggcgaatgttcggcgcgcccgtaaagagtaagcgccctgtggacatgaaaagggcgtttgaagagctatttgagcaaatgccaagggtgccagacacaatgtacaccgatcgagggctggagtttgtggcaaaaccgttgaaggagttttacgcggagaagggcattcaaaa

SEQ ID NO: 76046 - DNA, 1240 bp, Heterodera glycines
tacgacaaagtgtcgggactcaaattgcccaagccgagacggttggtgtacacgcgcacgtcgttgaccatttcagtgctcctctccggtggcattggctattacatgtacaaaatattgcggggcgacgagcgcttacacagggaatgggtgagcaaaacaaaaaaacggggcatttttattcgaaaaatgactctctcggaaggaagggagtcaaaaattggggaaaaaatagttagaaaattttcaaaaaaattttgtacgcattttccggggtggcgataaacgacctgctccgtatgaatgaagatttgcatatgttttcaatataaaatatagtacaaagttttttttaacacgattattcggatttttttgaaaatttaaaaatttacgagagtttttttccctgttttttttaccctctcctccatttttttgcaggcattttttgaaaaagttttttaattcgccgtaataattttgagaagaactgctccttctgaatgaagggttcaatataaaacagcaccattttttaacacgcttattcgggattttttaaatcaaaattaagtttgctaatttttttcaacttttcccccattttttgaggttgttccgatggtccaccgttggtttgctcccgaaagtgcgcacattctcggcgtcaaggcggtcagattgggtttcctcgacgattttgtggagagtcgcaaggagtaccccgagttggcatgtcaaatgttcggcaaacagttgaacaacccaatcgggtgggcctttaataatatttatttaaaaaaaaattcattctaattttagttgtttaatggcggaaaaaaaacaaaattcgatcatcaaattcagccaataaaatccggaaaaaacacacaacaaatttgcaaatgacccctattttcattttttttttttttttacgaatttgtcgattgtggtggagggcgagaaatttattgtaaaaaaattctttttcaaaaacgattttcgatttctgtaaaactttttctgtcggaaaataattattttaaaaattccaattcaaataattaaataaataaaataaaaattcagtttggccgccggctttgacaagaatggggaggccattgacgggctgcgcaagtcgggcttcggcttcatcgaaattggcacggtgacgccaaaagcgcaaattggcaatgatcggccacgcgtttttcgcttgagagaggaccag

SEQ ID NO: 76047 - DNA, 267 bp, Heterodera glycines
atgcaaacggagttgaataagcggaacaaatttggtggttggggaacaatcagtgtcagagacaagctgagaatgaatgcatcagagtaaatgaaaattttcataattttagggttgcaaaatggaaaattttaaatcaaaaattcacatttgacaaaaatttattgcattcaaacaaaaaaaaaggttaagattttcagtgaaacctttgtggtgtagtcaaaactgcggaccaccaaatcggacattcacaaaaaatgggaaaaa

SEQ ID NO: 76048 - DNA, 264 bp, Heterodera glycines
tctccgttcaaatttgttgacgacgccatttcgctgaaagcagcgtccgacgggtcgtccgcggtggcaagcagttcaattgttgctggagtcggcgatgaccaaaagagtgtgaagtcctgctccaacaactcgtcctcatccaaccatgccaacagtagcagctgcgcactggacgcattggtgaacggcgccggtggcgatggcactgaatatcgcattaaactgatttcggtacaaaattttaagcgaatggatgcttga

SEQ ID NO: 76049 - DNA, 674 bp, Heterodera glycines
atggcatttggtactgttggcaaattaacagggacatgtaaaaagtattagcgaaaatttacaaaaaaataaaataaaataaaaatttttcggtgggttaaccccatgttaatgtttttgctaatttgtgtgcgagactaaaatatcaaaaacattggtcatatagatccgaattggaggcagtaaggctcgactaaaacgccaaaaaatttttttttttattgttagtcacgaaaaaattttttgagtctgaattcgagaaaatcttggttgggctacctatacggctagggcaataattctaacaataagcgcatagcggggggggggggggggaaatacccaatttagcagcactgaattttggcacaaaaaaagaagatcaagcatccattcgcttaaaattttgtaccgaaatcagtttaatgcgatattcagtgccatcgccaccggcgccgttcaccaatgcgtccagtgcgcagctgctactgttggcatggttggatgaggacgagttgttggagcaggacttcacactcttttggtcatcgccgactccagcaacaattgaactgcttgccaccgcggacgacccgtcggacgctgctttcagcgaaatggcgtcgtcaacaaatttgaacggagactgcagcacataaatgaatttgaaatta

SEQ ID NO: 76050 - DNA, 792 bp, Heterodera glycines; identical to SEQ ID NO: 12437

SEQ ID NO: 76051 - DNA, 488 bp, Heterodera glycines
atggcgtttgccccgcttggtccgatggctttgtccgttggcccattgttcgccgccgctccgctgatggatgaagaggacacagatttggaagatgacgaagacggggcgagagaaggcaaagcatcggcaaaggaagacggagggagacaggacgacgaattggacgagagagaacggatattggggatggaagacgcaaagtgaggaggaggaggggcagcagggaactgaaaatcaaagggacggaaattgttgacccgatggaaaaaaacaaaacaaaactcgctaaaacacaccacgggaataaacaaatcatctttttaagtttttgcccaaactcactgcccttccttttgtgctcaccgtcatgttcgcctgctgttgttcatggtgccgatggccgtcctcgccagacaaatggccaagtcgttcagcaaagtcaatgcaaatgcaatgttcgtactcccgttggcatatttgtttaa

SEQ ID NO: 76052 - DNA, 728 bp, Heterodera glycines
atgccgcctcctctctatctgtccccaataattgaagtcattcgttgccaaatctgcgcccattcccaattcgttcagagggatgctcaattggtccctcgtgaccaattgttggcgcatatcgctgcgcacattaattacggaccaacttctgtattaatccataattaaaagaagggagcaaaggcttacttattcttatttataggagaagaatgaacgtcttaaacaaatatgccaacgggagtacgaacattgcatttgcattgactttgctgaacgacttggccatttgtctggcgaggacggccatcggcaccatgaacaacagcaggcgaacatgacggtgagcacaaaaggaagggcagtgagtttgggcaaaaacttaaaaagatgatttgtttattcccgtggtgtgttttagcgagttttgttttgtttttttccatcgggtcaacaatttccgtccctttgattttcagttccctgctgcccctcctcctcctcactttgcgtcttccatccccaatatccgttctctctcgtccaattcgtcgtcctgtctccctccgtcttcctttgccgatgctttgccttctctcgccccgtcttcgtcatcttccaaatctgtgtcctcttcatccatcagcggagcggcggcgaacaatgggccaacggacaaagccatcggaccaagcggggcaaacgccatcaaattggagagagtg

SEQ ID NO: 76053 - DNA, 167 bp, Heterodera glycines
atgccaactggaagagaatggggcggaagaggtgagcaaattgggaagtcgggggaacttatggtaattagggaatggatggacaaaattttacttttcaggaagaggacgaagacattcagcagatgtattgcagttgccttatgccggacaacaaagaaacgtga

SEQ ID NO: 76054 - DNA, 544 bp, Heterodera glycines
atgaattgggctaaggcgcccgacgggcttttaccaggccgccagagcccggtgccggtaaattccgtaatcttatttattattattttgcacttgagctttagctgctaataattttcattgacgaaaaatttcaatgcaaagaaaataaaataccaaattaaaaaattattttcttatttaaataatttttttgaaatagcccccactttctgctgattttatgcttgatgtcactgagcttttgtccgtctcaaagtcaatcacttctaagcctcttcgtcgccgttggcttcgtcgccaaaagcgcttgtcacgcgaagcttcagcagaaaatgttaaaatttcaatgtttttcaatattttctggaattttccaacctctatggttgccattccgccgcttgtgcttactgtagctcattgtcaacagattactgtagaagcgttgcgcggacgacggacggtccaactgaagagcaattggcggggacgaagaacagtcgtcagaatcggaggagacaaacgaggagatgatctgtga

SEQ ID NO: 76055 - DNA, 1211 bp, Heterodera glycines
atgacaaatgtcaacactgatttggtcgaagacattgtccaaatgaggccgaacagtgcgaaaaaattggcggaggatgaggacaaaagtttgctgagagatgttgacgaattggagacggatcagcaacagcgggagaacaatcgcaggacaaaggcaccaccgccgccaatgcttcgcttccccggcgtcggattaaacggatatcagcgcaaagctgtggaaatgattatctccgaaatgagcgcaaatgcggcattgcagcaggcatttcggtactcaattggaattccgattcaaaattcgacaactttaagtgttttttttgcatgtaaaatttaaaaaacccatcaaattttggcagtttaattaattttttaaatttaaattcttgagtaattttaaatttttgagactaaaagtgaaaaatcatttaattcgggaaatacaaacaaatttgatatttgtatttgtgaatttctgaaattaatcttttctcaacgagaaaaaataattttcaaataaaaaatagaaattttggaaaaaactattagacaatcgaattttttcaaaatttttctgtctttaggagtcctttgaaattttcttttttttgtgtgagatagcacaaatatgaataaaaaatagaatatagagaaaaatatgatcaacagaaaatataaaaataaaaacccatccttgatgcttcttctaaccaagctaaaattattattcacttggtttttagactaaattaaatgtgccaaaatagaaatacaaacaaatcagtccttatttgttagcgcaaaaatgatgaaagttcggctgggaccaaactcggcaatgtttggccaaatgttgcgcaccacttgtgggccggacgaagtgtgcctaagcgattccattcccgaattgggcgagaaatacccggaccaacagttggaaattgaggcaaattagttgggagtaaatgcaaaatgccaaatttggtaattcacagattgcacctgtgcaagcgcccaacataaaatttgccaaaggtattttatcagggttgttgcaaacacgaaatgatcaacccccgggtatttactctttttgtgagaatgatttaattgaatagaaatcaattttatattaaacatgaaaagcagaggccaaaaaacagacgaaaaaagtaattaaaggaaaatgcccaaatttaatagaaa

SEQ ID NO: 76056 - DNA, 927 bp, Heterodera glycines
atgagccaaaaccgtgacgaaaactcgcagccacctgtactcgatggaccgtacccgctggcacaagagcgcaatgagtttgtggaagatgaagcaccggtgctgcttgagatgttggatcgtctgtcacaaggagtgggttttgttttgaattatttaaattttttaatttttccattttggcttatgctaattgttgattttgtttagggaatttgccaagccatgggcctgttttcgtttgcacttgccgactgtttggccacatttcatacatttgccatactgttcgactgtgagacacctgtgccatttgacgagcagcacaagcgatacgtgttcgaacacagggacaaaccgcggctaatctacgtttcggaagatggtagcgctatacaggttgacggtgtggtgaagcaaggggaatttgtgatgagcatcgagacgatgtatctcgataagcgaaacggagttgatcacttttgcacattcctgcacacttttggcatttgtttcttgatgtgccattgaatgtgtttatttgtttcctattcagagcagtaaattgtttgcataattctgtttaattattttttgtttacaaccaaaatattgatccgcatttttatgttataattttaattcatttttgaaatttttatttaaatggcaaacgaagacttccgcttgtccgaatgcatccgttttattgagcgaacagcccaagagtatgattgtgttctgccggttccacggcttgggtttgtcacggaaattttcttaataatttttaaaatagctcaaggcgcgatgagcacctggatgcctgtgttctcatggaatcagtgggctcaggccaccgcctctacattttcgaatttgaggactgccttcaggtatttttaaaatatgaggtcaattaattaa

SEQ ID NO: 76057 - DNA, 1593 bp, Heterodera glycines
atgattgccgaagtggaacggctgttgacacgaaaaaggtccgcaccggtgcatgcaagttttgggaacattgacgacgacgatgaggaggagggcgagattcttgacgtctcgtttgttgaggaggaagaagacaatacgggcgaagcgcccttaaacccactttcatatttggccaagcaatcagcggctcaacaagaaacgttgcggcatgaaaaatgggcacaagaagagagaaagcgaagggaagaggagcagagaaagcagcgagaaaatgaacgtagacggcgagaagaagaggagaggcgtcgtaagacagaagaagatagaaggaagactgcagagaaagcagccaaggaaaagaaggcaaaggaagagaaagaggcaagtgaaaagaaggcaagggaggaaaaactggcacgggaaaagaaggaagagcagagaatagcaaaggaaaagaaaggcgagaaagagaccaaggataaaaaggctgaggaggagagagtagcaaaggaaagaaaggcagaggatgagagagtggcaaaagaaagaaaggcagaggaagagagagtggcaaaagcggaagcggagagagtggcaatggtaacaaaggcagaagaggaaagagcggcaaaggcggaagcggagagagtggcaatggtaacaaacgcagaagaggaaagagcggcaaaggcggaagcggagagagcggaaaacgagaccaagaaaaagcaagaggaggaaaagcagttggaagagcttaaacgacagcaacaggccataagaaagcaaaaagagttggagctgctcaaagagttcagaccgtggcgaggcgggtacatgaggctggtgcacggcaaagacccaaccccagacgtacactatctgcacgaaacggatgattaccactttgtgaatgctgtacacaagtaccgtgtccggcactcagagctcccctgggaggcgcccgagtttaacccatccgcgcacatccaacagaatattggggagttccgtgagctgtttgagcaagaggtgtacgatgaaaactatgcggtgaaaacgcgagaggaaaaggaggagctgatcgagctggtcaaagggttccgcttttacttcaccgagcaaattggcagatttgagctcaaagttttcaacgggaaaatttcgcacattacgctgactgatcaactggcctacgtgttgggctatgaacaagagcagcagatcagaaatgaagagcttgcaaaatatgcggttgatttgggtggtggtgtgagccacctgtgcatttacctgaacagtggcgtcattgagagcatgattgtcggcaacacctttgccaatctgctccaagtgattgccgttgagggaaagtcgggtagtgtggtagagaaggacttccaggcgccgttgtttcacaaaatcatagcaagggaggtggatgtgcttgacgttgagattcgcactctgaccgggaggttaggctcttcagcagggcaattatttctaatcacttatttaagggaggtgccatttgagtttggccaagttgttttgactcttcagtttaaaaaggtgttaacgttctga

SEQ ID NO: 76058 - DNA, 744 bp, Heterodera glycines
atggatgagtcgaaacgggaaaatttttcccctcaaaatgatgatgacgtcatcacaattggagacaacaacaacactcaaacactgcttgacctgcaaccggggccctcaaaaaggggacgcaagcctcgcttggacaaaatccatgaggaaattgcttccgctatgaaaaaagcaaaagccatggaagctgaaggtttggctttttctgcaaatttctttaaattagccaaattttagtggatgaatcgcccaaaaaacaaccgaccaatgtgtttgagtacccgaccatattttggaaattggcccgcccaaaggttttggctaatatttaatttgaaaaaataggaaaatttcttaagtacggagtgttcacgttcatgtgcaaagagtgtcgtgatgacaatttccggcaggggaacagccgattcaaactcatcaatcagaatggcgagcagcaacgccttgagttcacccaatcgttttgccaagactgtgcaaagctgaactttgactgcaccgatctgatcatgaagcacctaaagaaggatgaaccggcaacgacgacgacgacgacgatggcaaagagtttccgctggatcaaagatgggggaaagtgaaccgagatggcacaccacgatataaggacgatctcattttgaagaatttatacttgttgatcaaatgacaaactctttctttgtaattttgccgagcaatacgccaggctttgttggaaataaa

SEQ ID NO: 76059 - DNA, 199 bp, Heterodera glycines
atggatgagtcgaaacgggaaaatttttcccctcaaaatgatgatgacgtcatcacaattggagacaacaacaacaacactcaaacactgcttgacctgcaaccggggccctcaaaaaggggacgcaagcctcgcttggacaaaatccatgaggaaattgcttccgcaatgaagaaagcaaaagccgggggggctgaag

SEQ ID NO: 76060 - DNA, 2948 bp, Heterodera glycines
  unsure (1)..(2948): unsure at all n locations
atggactacccaagaataaacgaaagtgaactcgcttttcccatcccttcggggataattgtcagtgggccgtcctcttcgggcaagacccagctggtccttcgtctgttacggcatgccaacttgatgtttgacccgccgcccaaggcaataggtatgtgcaaagggggtttctgtgcagtgggctgttgttatttagtatgggcatacggtgagtactcgacgcagattcccgatctggagcggcagggagttgtcccccacgcaggtgccccgtctgacgagatgctgaaaaagctgccaaagccttgtctgattgtttacgatgacttgatgggtgacattgaggccaagaagttggccgatctgtacaccaaaaagtcccaccataacaatttttccgtgattttcctcacgcaaaacctgttcgataaatcaatgcgggtgccaaggtcgaacgcccagtacatcttcctgatgcgggctcccaacgacatgcttagcattcgtaatttggccagccaaatgttccctcgcgagcagggattcctgatggatgcctaccgacaggcatgtgctctgccgtacggttacctgttggtgactctccacgcgaacagagacaacattatacgcctaaggacaaacattttcccagacgacgaggagagaatcatttttgcccccaaaaatggttaagcgggaacagaagatcggtgagcgagttgtgcacaactacgactatttgaagaagttgggaaagacaacgtcggagaagaagcgccgtcatttgttgaacagtgccggttgtgaggaactgttaacgcttgtcgagatttgtctcaacgttttgaacgggagtttctgtctgagcaggaaacaaaagcagagacttgcgccatttgccaaagacatcagacagttggcacgtgtgcgaagtgagaggggtgcgcgaaaactagtgcagcagtcaggcggatcactttttgcccctttgttggcccccattctgattgaggctgcccgatacctgctttcgcgcagcaataatggccaataaacttattctgctgccgtacgagcactacaaggggctggttgcagcgagggagacaaagaatgacgacgacgacgacattgctgagcggacaaacttgggctttgtcaaacgacaggtgaccgctgcagtacagaagcggaagggaaacgtcagcgaacggaacgcaatgtacaaccagcacctgcgccggtacctgaagatgcgcaaggaacataaggagcggcccgtccgagtacagctcagcaacggcgctcaactgctaaataaaacagtggagacgggtgtgcaggtacggcctggtccggacgaaccgaaggacaagtccgtgatggttaccgacgaagatgaagaggaagagattgaagtgccaaagtttttaaccccaacaagccagacgcagggaagcagccgatcacccaggcccaataagaaagcagcaaaacagcaaaaattgatcgagaagaaggaccacctgttggccatcattatgtctgatccgcagagattcggcgcaactgaccgtgggaaaatcattaacccaaagacgggccgagagttcatcgactcggacctggcctggtcaattgaacgcctggtggaccctcgcccggagaatgccccttcgccaagcggaacaaaagagttgaagaggaaactcgcacagagtccgctcgccagtagcctactcaatcgactgtttgttgggtctgggttcgtcggacaagtcaaacaaagcgggcgttttattccctcaaaatggacgaaaaaataaacaaaatatacaccgacccggccaatccgggcgggtttgcgggcgcgagtgctctgtacgcggcggtgaagaagaagcacccgaagttgaagcgtaccgagtttgaagactttttgcagaggaacaccacttatacgctgttcaagccaaagagagacaagttccgacgcctacgcactgtgcctgcgggtttcatgaccggtaagttgtagtgggcttattgcgcacaattcagggttcagatgttcaggcggacttggcagatttccaggcactttcgcgcaagaacagcggctaccggtacctgctgttggctgtggatgtgttgtcgaggcgaatgtttggctctcccgtaaagagtaagcgcccagtggacatgaaaagggcttttgaagagctatttgagcaaatgccaagggtgaccggacacactgtacaccgatcgagggctggagtttgtggcaaaaccgttgaaggagttttacgcggagaagggcattcaaaagtttgagaccagttcaaagaagaaggccgccgttgcggagcgtgccatacgcaccctaaagactcggctgtacaaatatttttcctccaacaacacatcggtttgggtggatgtgcttccaaagtttttgagtgccatcaacaactcggtgtgccgcgcgaccggacttagacccaacgaaatcagcgacaccaatgcgagggaggtctggaagagggtgtacggcgaagggctcgcacaattggacaagacaccaaaaatcagagcaggggaaacggtcagaattcccgagcctaagcacattttcgagaagggtactgtatttcacacattttttcggtcaatttattttaattttaggttatatacccaattactctgatcacgtttacacagtagacgaggcccgctcaaccaacccccagcactatttgctcaaagactattatggcacaaagttgaagagaaaattttatttaccagaattaacaaaagtacaagttgatgaaaacacaatgtatcggattgaaaagaaatacaaagaacgagtgagagatggaaaaagtgaaatattggtgaaatttattggctttccggaaaatattgngtga

SEQ ID NO: 76061 - DNA, 2048 bp, Heterodera glycines
atgctggaggacaacccagccatgaaggcgtatttcgacaattgtccggattctggaccaattgacttccacgatgccttctttggcggtaccttttccatttaatttttaactaattttccggcacaggtcgaactgggcccgaatacttgggcgcttcagtgatcaacccagagacgggcgactggaaaagccgcacaatcaaagtgaaggactttaacagtctttatccttcgcggtaagaaatgccggaaaaaattaataattgaaaaattttggctttttaaggaatatgtacaccaattacccggttggccacccgactgtggtgcagtttgacaaggacgtggaatggaggagtccagcggacattgttggcgacgacggcatccgcctcgaggggatcatcaagtgctacgccgtgccgccacgccactgccactacgacatcccggtccttccctatcggctcaacaaccggacgctgttccccctctgccggacgtgttcggaaatgtacccgcgcggcttgatcgaccccgagtacaactgcaaacattttgaggactctgaaaggggtgggtttagaaacttataattaagcaaatatttttcttgataggattttcgacaactgtcacgcacattgagctggaggccgccctccgctctgggtacaaggtgacgcacgtttaccgtgcctacatctggcgcctcgcgtgcgattggagcaatgggctgttccactcgtatctgctgaagttcctcaaaatgaaatttgagggtgaaaatttggaaaaaaattaataaaaaatcataacaaaaatttaagcaagcggatatccagcgtcttgtacggaggcgggcatcagcgatgaggagtcggcacggcggaaacaggaccacatcgacaaggccaaagaaaaggcccaagtccatctggaggcggaccggatcaagcacaaccccgggctccgctacctgtccaagttgtgcttgaactcgctgtggggccggttcgcacttcggtaaaatttctttaaaaaattatgaaaaaaaaaataaaacgtacaggaatcggctcacaaaaaccgaaatcgtcgagtgccatgcggaatcgccaaactgctcaacgactcgaagattgaggtcagcagcatcgatcagctgacggaaaagttttggatggtctgctacaaggccaaggatgagcatgtggtggaacacagcacgagcaacgtaagaaaaaattttaaattttgaaatttatttgcctttctcaggtggccattgccctatggaccacttctgctgcgcgaatccacctgttggaatcgttgaaaaagtgtatggacctgctcctggtgtagagcgctacgacacccgcattctctacatggtaaaactggaaataaaatgaaaataggaaataattttttataattaggacactgacagcatcttctacgactacctgacgcggctgggggacccccttccgggtggtgagcagctcggggaactcgctgatgagcacccgaaccacacgattatggaattcatttgtggtaaaactcattaaaataaaaaaaaaaaaaatggaaattttttgtttagctgggcccaaggcgtacggattgtggctgcgcaacaacgcaacgggggaggacgagtacaagctgaaggtgcgcggcatcacgctcgactcggatgcctgcgagcgcatcaccttcgagaagatgaaggacatggtgcagaacaagctgggacagccggacaacaacgtccgcttcaactacccaacgaagaactttcggatcaccaagaagggagagattttcaccgtccccttggtcaagcagttcaacccgaccgtgaataagggggtggtcagggatcacgggttgaaggtggtgccctttgggtacagcgacaaagagtggtgtaagtggaactgccctggcgcttgtacctgtctgttcaacccagacctcaatgtgaacatgttcacagaagaggagctgaacgaccccgacattatgccataa

SEQ ID NO: 76062 - DNA, 592 bp, Heterodera glycines
atgccgacagagcctgttgcagctgctttaacacaactagcagatttaccagaaaacaacttcagctttcgaatcaatccgctcccagttgtgccccgctcagtatcgattcaataccttgatgatgttgaacgttttaaagtttcattcaatgatcggttgatacgtcatttgtcattctcaccgcagttgggctatgtgctcgggtttgaaaacccgcagcacgtggtgtctaatgaggtagcaaaatatccggtggatttgcgaggcggaatctcgagttttgccgtttactcaaaaggactaactgagaatatgattgttggaaattcgctgagttcactgctccgtgttgtgtcagtcagcggtgcaacacccaatgactacaatgagaaaatttacgattcgcccatttttgcgcgagtgctgccacgggagatcaacgagattgagattgagctgcgcacaatggacaagggtcgcctcgtcccattcgcctacggcacgacgctggtcgtgttattatttaagaaagtgataaatttctgaaaccactcattttttgtattcattcattcattgaacgtaaaaa

SEQ ID NO: 76063 - DNA, 1599 bp, Heterodera glycines
atgaaacgccctaatcctttgaaccttccaatgaatgagaaaaagcccaaacttcgtcgacgcctgccggctgaattgaacagcgagctgatcagttttgtgccattagtctgcctatttgccaatgtgaagcggactccaattggtcctgtttgttaccaattcgagtgtttccgtagtcaacgccaaaagtgctttgaatatttggtattttcaccatttttattttattacataaattatttatagaagggtgttatcgcattattcgatgtgatgtttgaggagaaaaggacaccgaagaagaagaaagtggggagactgcttctacaggaagaactgccgcatgacctcagccgaaatgagctcctgcactacctgtgctacggacgactgggaacgaatttgttcgagacttattttgtgatgagccaagcaacaaatgtaagcgaaaagttttaaatttttaataacaacacaaaatttttagtcaattggcattgggaatttgtttgggcttctgctcgattttgcaatgagctcaccaactccttggcacatgaagcgacccatttgctgtggaattttcttccgacaacatttgccgtggattctgcaacaaccgatgaacgtaatgctttctcatggcttttttccggaggtccgaagtgatggttttgaatttttttggctgttcaacccacacttgaaaaagtatgctgggtatgtccgaattctccctgagcttagtcagcctgacaatttgcattttttccttagcattttctaagcattttacttgaccaatttattcatcattatcattacatacatgtcggaatttgtcggttttttccattttctcaataaattgttgaaatgaatgaccttgtgacatatgatacacaaaaacaatacaatgtggggcacacgttgacactaattgggattgataggaacgaatattttttcttaggcccattggaaacttattcaggaatgatgacacaatgacagatggtattttttgggctaagctgtcataataaatcactggttcttccattcccttcgcataaattgcacaccaatgagaccctcccttgtaatgtgggtcccggttcacaattagcgctgcgggatactgtagagtgaccggaggcggtaattgatcactggcgaagcagccccgaaagactcgtgcggtcccccggttttcgttcaagattgatgtgatttgcacgctgtccattcttcagccaaaaaatagagcaaagttgatggagaaccaggctgacaataagcatcaagtacaatgcaaacaccgcccagcaaatgacttgctgaaaaaaattttcctcttctggtcggtctttgcacaattggatgagtggcgtgagaccagctgacacttgctcttcaattaacttgtcgttttttgggggagaggaggtggtggttgttgttggtgtgcttgtagacggaattgttttagttgttgtcgatgtaagcattgcctttcttcttatatattctgaatactcaggaatttcctctcggcatgacactacgggaagagaaatccgaagaaggaataaa

SEQ ID NO: 76064 - DNA, 3990 bp, Heterodera glycines
atgaactcttgggtgtcgtgcacttccttggatcggtgcagcaaggcgaaggaacatcaaaagaggcaaaggactacgttaaaaaattcggagaacaacatcgagcacatggccaaattccactacgtcaaaatcaagtcaaaattcaccattaccgacttgccgagtacacctgaggcactgttggctgggattttccaacactgcatcgacgaagcaattgttgaaagccgtgagcgcaacatcgaacctacacacctcggctgtatgatcagcagtcctctgctggaaggcggcgacatcccaatcccgatacgacaaatgacaaacaacactctcgacaccattctcaaccagttcaaaaaagtggcgcagtcaaaacaacagaaaaatgtgtcattatggggggagccgtttaccgtcaccatcacgactctcgaccgtaatggactaccatccaaacgtcgtgtcaaagggggagctcgtcgccctgtcaaaacggccgttcaccaccgaattaatgaccaatgcctgattaaaattcgtaataacgacaaccacttctgccttttctacgcgctgcaggcaacaatggtcgacaaaacatgcaattggccacgatggaagtttttggactacttgcacgacagacacggacagcagggacaactccatcatgatactgttaagctcatgcagcaggtgaaagcaccaatggatttggttggctacgacgcggacacatttgtgcctcacgtcgttgactactggaacaacgcgcagcgacaacaccgctttgctgtgttcatctttggatcgttgggacagtataagccgctgtacaagtacattgacaacatctacgacactccgctgctgttgtacttcaatgaggaccatttcgatggtgtgcagaagcagggtggtctgttcggtcaaccgtactgtttggagtgtgaacggccatacgacaaaatgtcaacacacaacaaaacatgtaaagcgcgctgtgtgctgtgctcacgtgttggaccagcttttccatgtccatcatccaccggcttcatcaaaaagtgtaaagagtgcaacaaaaaattcaccaacaacggctgctaccagcaccatctgcagtcaggcttctgcaagcggtcgaaaaagtgcaaggattgcggtgctgtttgggatgttgtcaacaacactcagaagggcagaaaagggcatgtgtgtggtgaacgcttctgtaagatgtgcaacaactaccacaacacggaaagaggctgtttcatccaacccattgagcccaaggaacgcgacccctaccgcatcgtggcatttgacttggaaaccatgcagcacacgccatctgtaaagcctgagaagcgtgagcatttgccgaatttcatcgcagcacgagtcgcttgccccgactgcattgaaaatgagagctggcgagaggcatcgggagggtgcgaggtgtgcgggccaaacagaacagtcgccttttgtcaacgccgcttcactgaaacaacagtcgacaagcaagtggtggcggaaaacccattggaagcgtttgtcagctggctgataaacgacttgccgttggcctacgacacctacgccttctctcactttggcggccgctttgatatggtgctggtgttccgcgaactgttcaaacgcggatataacccggacatgttgcgcaaagtaataattgactattttccataacttgtgtataatttttctattttcagggaaataaaatgtacgaaatgcggattcgaaggcagaagaagcgcaaccctaacattgttttccgggattccttcaatttgatgccaatgtcccttgcctcgctggttccatcatttggcttggatgtggaggacaagccattctttccgcacatggccaaccacccagacaactacggaaagcagatccatccaacaccagacgactatttggtcaagggtatgatgccagataaacgacaaaaattcgacgactggtatgaacaacaccgtcaggaaccattcttcctcgacgaggcgttggcaagctactgcaccaacgacgtggagatactgatggcggcgctggtggcttttcgtcatgagtttttggatgtgacgaaacgaaatgaaggaatcgttgcggagcgtgcggccttctatgagcaccacgacggcattgatgtgttgcgggagtgcatgacgatcgccggcgcatgtatgaagcattttcgcaccaaccatctgccgaagaagcacttggctatcgtcccggaacgcggctacgacaacgcacaaaaccagtcgttgctggcacttcgcttctttcattggcatgcggaggagcatggtgttgtggtgcagacggcgcattcggctggcggagagaagaaaattggccaatattccgtggatggctgggtggaggaagaaagaagagcaattgaagtgaatggatgcgtgtggcacggctgcaatgaatgcttccccaataacaacatgatgatgccgaatggaaagacagctggggaggtgcgagagcgggatgagaagcggctggaattcatcgaaagtcaagtgtcacgagtggatgtgtactgggagtgccaaattaaaagaatgctgaaccgtgacccgtacatgcgcgaaagttttggtgattatgtggatgatggcccgttggacattcgcgaggcgttcatgggtggaagaactggaccactaaagctgtaccacaaagcgggagagggcgagaaaatctcgtactatgactttacgtccctctacccgtacgtaaagtgagttttgtttcgatcattattcacaatttataattttttatttccagcttctccaccacttacccgattgaacacccaaaagtgctcatcttgaatgaaaatgtggagtggacaagcgcacgcgacaacccctacaaattgtcgttgctcaaggtgtgggtgattccgccgcgaaagtgtgatgtaccagtgctacccgtcaaagtcaacaaacggctctgttttccgttgtgcatgcagtgttgtctagactacccgaagggaggcgttgattttgactaccattgtgaacacgacgaccaacaacgcggatgggtgacaacatgcacatcaattgaattggacgcagcacttgaagagggctaccgcgtgaccaaagtgttccgggtgctgaagtacaggcatggcgacgacaaacttttccaaccatacatcgccgagttcatgtcgcagaaaattgaagcttccggatttgacgccagcatcaagggaaatgaagagttggagcagcagttcatcacagaatgtgcggagaaattcggaatttcaatcgacaaggacaacatgaaagtgaacaagggcaagcggtcgttggcaaagctgtgtctcaacaacctgtgggggcgcttctctctgcgcaacttcggcctcgcccagaccctcatcaccgacgacccttcagtgttgactgaatacgtggaaaacagctcaatcgacatcatttccgttgatgagctagacgaaaaacatcaattgatcagctacgtccagaaaaaggagtgggtggaggagcacgagtgctccaatattggtgagattttaaaatgccgcctcctctacacggacaccgactcgctgattttcgtccacccgatcggcatgaatccattggagacaggaccaaacttggaacaattcaccgatgaataccccaagcatgaaattgtggagtattgtagtggaggagcgaagcaggttaatttaccgtttatttagtgcataataatttatactttatcatttcagtatggactcaaacttcggcgtaatgggcaggacgaatttgtgctgaagctgaggggcatcacactgaactacgacgtgatgcagaaccagtccctatgctacgacacattcaaagaagaagtgttgcggtatgctgaaaccggaga

SEQ ID NO: 76065 - DNA, 666 bp, Heterodera glycines
atgcagaaggtggtgagaacgcctggatgccgcctcctctacacggacaccgactcgctgatctttgtccacccgatcggcatgaatccattggagacaggaccacacttgggacaattcaccgatgaatacccaaagcatgaaattgtggagtactgtagtggcggagcgaagcaggttttcaccttttaataattcataatttatactttatcatttcagtatggactcaaactccggcgtaatgggcaggacgaatttgtactgaagctgaggggcatcagtctgaactacgacgtgatgcagaaccagtccctatgctacgacacattcaaagaagaagtgttgcgatatgcccaaaccggagagtatgagccaataaatgtgatgtaccccaactttttgagaccggacattaggggtggcggacacgtcacttcaggccccctccaaaaatgttatcgcccatatgtaggcaaagggatagtgggccctaattatgatgttctcaatttcggacacactttgtaaatttatcgttcaccattcattgtatccctctcacacacacacaccccatacacacgtacacacgcatgtaccacctttgtttttcatgttttataccaaaaattgtgtaattttgtcattttatttgcgttttta

SEQ ID NO: 76066 - DNA, 386 bp, Heterodera glycines
atgcagaaaacattttttgtcgacggaatatcggaccatggagcggctttgaccccagcatacggcagacttcgacaaccatacaacattaacattgctgcccatttctacgctcggcaccgtatcaagctgcatctcccgtacgtgccatgtgttgtggagaaatacttctggagtggcgaagacagatactacccaatggagctactcgaaattgtggatgaggactacaccaacaaagagcgatggcttggcaaattgtttatggaaattgaagatgacttcattcctgtcaaacgccttggtcgagttgaggaagtcgaagaaattgacgacaatgatggtggtggtcgctacgaatgcagtcaaccgtcttacgtttattg

SEQ ID NO: 76067 - DNA, 381 bp, Heterodera glycines
atggcaaaacaatttgtacaacatgaaactgcggaggagcaacaagtgaaagctaagaagccaaacgttgatgagcgatttctttggaaaatcacgcggggccaatttgtactagcgattcggctgtgctcaggttaatcaaaaatttttgacgaccaaattaattgacagctttcagaggactggaacaatttatttcacaacaaagacaaggcacgtcggctggaagatgggcgagtggcgattggactcgagatgtgtgaaaaatgtgcccgaatcaattgctgtgtcagtgacatgattgctgatcaaaagaaaaagccaaaaaccaccaaataattcatcaaatttttcgcattatttggataattttgactacca

SEQ ID NO: 76068 - DNA, 430 bp, Heterodera glycines
atggcttcatattgtgaagcgtcaaaacagcagcggcaccaacaaaaccatttcaatgaaatgtgcgtggcatttcagagtatggaaatgtcggaatcggcaagacccctgcctggcggatcaataaatggaccaaagtccttcggtagaacaatttttgatatgcattttcagttcttactgtaatttttaataattttaggatgtgcatttctgaaagaagaaatcgacaaacagatgacgaatctgattttcacaatcacaaaaatcgaagagcgcttaaacggactacccgacccgcaagcggcgcacctttatggaatagtcaaggagcagctcgaaagaactattcgtcaaattgagaaggactgcttgtgaatcggtattggtgaagggaattattttggtggtgatgggattattttttaaa

SEQ ID NO: 76069 - DNA, 1467 bp, Heterodera glycines
atgtcttttcgcatttggcaatgtggaggaagccttgaaattcatccatgcagcaggttggcaatccgcaaaatggggggggggcaccaatttaaatttattgtttgagcaatataatctttaattgctgtttttcattgtaaccaataaatggaatcgccaatttaatcatttcgactgcaaactacagatgccgatttttatgtcaaaatttaagattaaaaaccccataaataatttttcctgaaaatcgtggaaaatttttcaaaaattttcactcactttctttaattctcatccgattttttttcgttaattccggtttacctattttagggttggccatgtctttcgcaagcagcacccttacacgttccccgggggaagcggccgtattttccaaaagtttttgtgttttaacttttaattttcgcttttttatttttcagaaatacgcgaagagctgctgaagtttggttggatgattacaaggagttttatttccaaactgttccttctgccagatacgtaaacttcggagagtgcgtttaaaccaatgaaaatttatctccgaatttttgatttttttagcatttccgagcgcctacgcattaaagaaagattaaattgcaaaaacttttcatggtatttgaaagaagtttacccggaactcaaaccgcttaaaaattccggggagcgccgtgtacaaatcattcaacaaggaatgtgtttggacactttgggaaagttcaaatggaatcagtcgccagggctctaccaatgtcatggtatggtttttggtaataaatacgggacgaagctctcttgtttatgtgacggaggcaatcaagaatggatgtacagtccattaagtggaaaactcagacacaacgccttcaaattttgtctcacggtcaatgcttcttcgggcgtcccgttcaatggggattgtaaggtttgtgaaattatcaaatgcctgagattaatacccaatgattttaggtcgcttcggtcaattggcgtcttccaactccgttgcaaggacagaatcagcacgaggcaaatggtcttgtcaaaattggtttaaaatgtctcggcagtgcctccgaaactcacgagggaaacggcttgcaatttgttctacaaactttttcatgtgatttacgagaccctaatcaattgtggaccgtacgctacttatccatgtgaatttcgcatttttttgaaatttatcacccagtgtttctataactaatctgccatcgactttccattctttttgttaacttacttacaaatttgccatacttttctttttttttaatttaacttagaatttcacaacatttgaattatcttgccttattttatcattttttctcctttattgctttaatctcttttcttttcatttttacatactttctatgcaattgtttaattaatattttaatgattgtgaataaa

SEQ ID NO: 76070 - DNA, 152 bp, Heterodera glycines
atgccggcaacgaagaaaaaggcgcagcttgatcctttggtgaggcgatcgattgctttgttgtgggcttataatggcagtgatttggtccttttgacatttctgcctggagaatgtcgcttcgatgagtattgtcaggccaaccgaaagaa

SEQ ID NO: 76071 - DNA, 732 bp, Heterodera glycines
ttttcccatgttcttccacccacatcgattataataactttccacaacgaggcaaggtccacattgttgcgtacaatttggtccattttcattcgcactccatcgcatttacttaaagaaattattcttgtcgatgattactccttcgatggtttgcatttggaacgaaaaaatcaacatatgagtaagcattttagccactattggcagagatttatttggtattgacaaaatgcgaattatccgaaacagaaagcgagagggtgggttttgtgctcctttttggctttgttaattctgtccgttaagggcttattcgttctcgagttcatggttccattatcgccagtgctcctgtcctcacttttttgggtttgttttttctttcatatattattaattcccatttagacagtcattgtgagtgtaacgtcggatggttggaaccggtgcttcaacgtctggtcgaagtactgttaccgacccggcttttgatttccttttttacagaatgacaaagctgtcgttgcacctgtgattgacgttataagtgattagaaattgcttggttaacggttttgagttattttagacatggacaacttcaattatgtctcggccagctcagatttacgcggaggatttggttggaatttggtgttcagatgggaggcattgggaagagaaaaaaaatattccggggaaaaaaaccggaaaaaaccaataaaggaa

SEQ ID NO: 76072 - DNA, 1077 bp, Heterodera glycines
atgctttatttttttccttcaatttcttttaccatcttttgttatctgcttttagttccagtttcaagtgcaattcaatcggtgagtttaccacacaaaataattaattaggacaattattttggctaaattccaatttgataggtcgacgaaggcatgctaattgaatttatgaagggccataacgaaaacaaaatcagtgaattttcaatgcaaaaatatgaggcacacattggcattttgcactttatggaaaagaattggcaatgtgacaaaattggagagcaatttaaagcacattatgaacagacaaaatgccaaaaatatcgcaaatatttggacattttgtatgaatatttgataggagagtatgccggaattccaacagtaaagccaaaattcgtgtttaaaaatagacattttgaaatcgaagggccaataatttatgcggtgaattgtctggccataatttggcagttttatttgaactcaacaattagtaattatgatgaacttaaattaattcacttgattaactctcattttaaactaaatttgttgaatgaaaagagaataataaattttaatgccaaaaaggacgccgatgaaaaagaaaaagatgaaaaacaaatgccaattaatgaaatgattttacaattggccatagacacggattatcaataccaaataaataaaagtgtggaccgaataatacgaaaaacactggatcaaaatttggagaaaatgctgaaaaaagcggaagaaagggcaaaggatggccggccaaaagcgaaagccgatgaaataaatggggacaaaactttgataattttggattcaaaattcgacgactcaaagggatgggtgagggaggagtttttagggttggccggggtaggccgggtcccggtatttttaggaaaaaactggcccggatattgctgggtccagaaaagccgagccggacccatgtccaaatttttcaaccgggtccgggtatcgggtccaagtgggtaaaaaatccaaaaaaaaaaaaaaaaattaatttctaaaaattacttttttcacaaaaataaa

SEQ ID NO: 76073 - DNA, 1115 bp, Heterodera glycines
atgcggaatacgaagaaatacgaaacattaaacaccccaaagacacaaaaagacaaaccgctaaacatgatacacgtaatttttactaacaaattctaaaaaatatttcaatcattcttaaaattttatcaaaaaattttcaaaatcattttatagtcacaattttttaccataaattcataaaagttataaaattattatttttttaaatttgaattctcctaaaattccttaattaaggtgtgattcccgccggcacataaaaatcctttttctcttaaaaaattgagtcaaaatcgcaaaacttttgtcattttttttggtgtaaatatgttaacaagcacacacaaagcccggcggcgcctaccggcacgccgcgacccccccccccccccccccccttgtagcccaaatttttttgaaaaaattcgccgtaaaaagggttttgaaaaagcaaaaaaggccgatcggtataattctaagctaaaataaaattttcataattgatttgaaaattttaatggcaacaaattcctttgcctacatcaaatttaaaaaataggtaaatatttaaagttttaaacagtatacgggtggaccaaaattccattttaaattattaaatttcagcccaaaattctttcgtgtccaaccatggctgcacgcaattacggattacggattacggaaattacggggttttgggagttacggattacgggttacggatttttgggatttttccgtaattttgatccgtaatttgacttttggattattttttcgagacgatttcttgtacgattatttttataaaaaacaaaattttctattttttatttaaagggctacccgtatttcgatttatttaagaattaaaatagatttataattttttatttgttgttgttaaggctatttgggtagttcgcctagaaaatagaggcatcacttttttgtcacacctatttttcacgcattttatgaaaattcataaaaccttagccaggtgaggggaggaattccccccttcccccgcccgaaatgaaaaattaaaaatttttacatgaaaaattgggacttttaatttttttttgtagatttttcttaataaa

SEQ ID NO: 76074 - DNA, 792 bp, Heterodera glycines
atgagaaatttgcaaaaagaacggaaagtgttggacctcgaaagatatatgcggaaaagagagcaattcgagcagattttaaaaagcaacaaaaggcaaattgagaaaaaacttccgtttttagaagaattcctggcaaaaaagccaaattcctttgaaaaaatctatgccgacaaaggcaaaacaaagacatacacaaatgaacaatatttgaagggacttaaagcaattgaggacgaattaaacaaatttgaattcgtttggtggcataatgaggagaaaagatggacaattagtaaaaaaattaaacaaaaataataataataataatattttctatttttaaaaatatgcgacaatcaaaatatttacgagttcaaagggctcatttaaatgcctttctttttaaattttatttataaatgaaaaatttttttatcacagaaacagaagcggaaaatgtcgcctctaattattaaattatcttgtcactttttgcaggtgatcgtccggcaatccgacaaattgtgtgggtggtccgacacgcggaaaaaagaaatggcggaacggaagacgaaacgctgacagagaaaggcgaagagcaggcgaaagaactgggcaaatggtaagaaatgactatttaatttgaaaaatagaattttaatttcaaaagtttggccactttttggacatttaattttatgtggccactttcacaaaatttaaattccaacaaaagtcaagtatctcgctttttaaaaattaaagccagaagactttgctgttttcaaa

SEQ ID NO: 76075 - DNA, 925 bp, Heterodera glycines
atgcccgttcctcgcgttaggttcaaaacagtgcccatcaccaaagtgttcgcgtcgccattccaacggacaatgcaaaccgccgcttctctgctgggcgaaggccatcgcgcgttcgttcacattgagcccggacttagcgaagtgtgaaaatattttaatacatttgataaaatccgaattttcagttcgagaagccatgcgatttgaaaattggacataaaaaactgacggagctgcacaaagacaaagcctttccgcacacaaacccaaactattggcctatgtacagcgaaaagtgagcaaatcgaattaattaattattatttaaatggaaatgtttttaaatttcattgcttttctaattaattttaattatattttatttgcctttttagagcactcaagctgattaaggcggaacgagaagagagtaagcggaaggaagaaagcgactgccattttgtggtggagcaaacactgcgacgcattttgacggaaaacaaaaatggtacgaaaattaatgcatttttttgactcggataatttgtcaccggccaaaacagtactcagcagggattaacaaacattgctttaactcagccacccatttgaccaatttggcccatttaattgttttttatggaactatttgggtaataagccaattaattgccaattaggacaatcgtttaattatactttttttggactttgcttttgttcagccgaacatattgtgctggtctcccaccgtgacgtcattggccacgtcaacgaattgttgggtggcaattgggccgtcgtcgacaccgctaccgtaaacaaatatgtacagtatgcgaatgggaaggaccaacagaaggaggatgacgatattctgagcaaatttgttattgagcacacgggagtgcacgtgcactaa

SEQ ID NO: 76076 - DNA, 2126 bp, Heterodera glycines
atgagtcatgcattccgtgtgccaccgccccatcgcccacagtgagaatttctccccattcattagggaatcattttgaagattttgtttatctttttcagagcaaagaggcatatcttctgtactacaaactgaccaactcaactaactcacaggccaagtgatataatattatcattattatttatacctgtgtactgttaccaaacattttcaaataaatatttttgtattattttaaaattaaaaagataaaatatcggactaaattggaaatactgactgtaaaattgcagtaacaaaagcgagggcgaaagaaacgacgctgacgacgacgacgacgatcaaactgagatagaacagtttaacagagaactcaatgaaatttgtcaaatgttgcgtgaacattaccgtaatgaagttccgaaaattggccgactttgcgcccaaatgagcgaaggaactcgccaagcgttggccatccaacaacaagtcccaaatcccgacgaagtgcaacaacaccgggagaacaatgctagggacaacaaaaacaagaattcgtccaacaaaggcatttcttcgagcaaaggcaacaactgtgacaatgccaatgtcaagtgtgaatcggtgagcaacaccaaacaattgggatcactaatttttcttagctcggattatcaatgccataagttaaaaagctcaaaacaaaatactgggcatgaaaaattaaaaattggagaattgccccattttttagggtttgcatcagaacgcgtggtggcaacaacaatttcatgaaattgagcaagcacttgataatgatgctgatgatgaaggcatttcgtctggcgagtgcagcgacaacggaaccaatgaaaatgataacaaaagtgacgacgatatcgaaagtgatgccgaaagtgacgacaaaccctatgaatgtgattgcgaaagtgctgaccacccaatggagtgtccgttgctggccgctcgtcgtgcgcttcgtcgtctcaaattgccgaccattcttgacatttgtgccgcaaccgaagcagaagtgcgacaatacggcacaaaattaagtgacattgtcaaacaaatcgccaaattacgcgttcaaaacggcggagcactgacaagcgaattggaattgcggagcagacagaaacaagcacaaaatctgctgcaacaaattggaaatttaatgccacaattggtcgttgaagaggaggaagtggcagaaattctcaaattcgtcgaacaaagcgccgatcgcttttccattggatttcgggacagaaagcagcaaaagcaattcaaaaaagcaattcgacagccaaaaaaggtgtgcagcaatttgaaattagcgagaagtttcttccttttatctctagtcgaatatttttggtattttgttatttaaaaagttacaaaaaaaattgctgagaaatttccaatgagtgaatggttggtttgcttaagctgcaaatttatatcccttcgttcaaacaaataattattcggctaccaccaccaacaggctttcgaggttctgttaaagcacaatttggacagtttggtggagccattttataaggactgttacaaaaaactgtattctattgacgatgaaacacgggaacaatcagaattgttcgtgaggcttttggccgaaattgcttttgtgcacgtcgtgggattaaggttacagctggaaatggtcagtagagaaggcatggtttaacaaaataataataataataatgcattttggcagtgatttttggatattttttatgggatgttagactagatcagctgatagaaattataaattacatcatagaaactaaaaatatttgaaaactcattaaacaactttcttattacttataatttgtgcacttttcaattatttataaaatttaaagatatatttaatgaatttaagtcataaaaatttgacaaaacatgctttcgtaggttttctggtccctttttcaacttgggtccgttaattattcttttatgccaaaatccaacagataattaattcctcctgtattgttcaggtggaaactgaatggacgcatattgtgcacgcgatgttgcagatgcgtaaatta

SEQ ID NO: 76077 - DNA, 255 bp, Heterodera glycines
atgtttaaatgcggtgtgtgtacttattctaatgttatacagtatacgtatctcccgtcggacattttctttgatggccttggcaacaaagttcgctcaaccgttaaacaaaccttggctgaacagagtacaaaaaatgcagaagtggcggaagcatttgcgttgctcaaaaagctcaaaaaacaccgcactcaaatggacagctgcgaaagtgtcggcacaaccgacgcggaaggggcagaacaaaagcagaac

SEQ ID NO: 76078 - DNA, 1020 bp, Heterodera glycines
atgaagaaatccgttaccatctctgtccctgagcaaaaagaaattaaccagcctaattcagaagcggagccaccaaagacggacactacaaaaaagcgcaaggtggaggaccgggagctatggaaactggcaaaaggaaagttcatgctagcgacatatttgtgcgaaggtaaaaatgaaaataattttaaattttgtgaaataaaatttttaagacgactgagaccgactgttccataaccaacagaaagttgcgcgcttgggagatgaccgtttcgcggtcagctttgagctctgtgaagaatgcgcgtgggccaattgtcgcgtaaccgatctcattgcccctatgaagaaaaagctgaacaatgcatgagagatgaattttttgagtgatcaacaatcaataaaatttttgaaatatttctctttctttaaattttatttgttaataaattatttagtgagaatatccccactgtgttcatttcgcgagtctttagccggtcgaccggatatctatgattaataggcgtcactcgtacagttgaatctgaacagtgatgggagggaggggggtgtggggatgagccgctgaaacatcattaattattagagggtgatgacaggcacaagaaagaccatattgttcattttttgccgtttacttaactcgaactgaaatgttagagaaatgggcggccagtgaagtgaaaataattaaatttaattatttttagtgattatcattttagcacttttcgccttatccgttcgacacgacttcgtcgttttcgccatccgttctgcgtgaatcgttcgatttgctgaagcagcaagaaaatgtgcataacatcatggccgatccgattctgcgccacggcaatgtagagatggcagttgtgcaaactgctctcgcatcgttaaaacggactatttcgtcatcgtcatcatcatcggcatccccaccacctgaggaatgatatactgtaatgcttatttattattattatttataataaa

SEQ ID NO: 76079 - DNA, 623 bp, Heterodera glycines
agctgtgcttatatggagcgcttggcaggctgcctaatctgcgggcctcactggaccgtcgctttctgccagcgcctctttgcggacactaacgttgatcaccaaatggttgctgacaacccgctggaggctttcgcgaattggctggtgtttcaacttcaacttccaaaaaaatatgacacacgcctattcgcactttggtggccgctttgacatggtgctcgtcttccgcgagctgttcaagattgactttaatcccgagatgttgcgacgggtataaattttttaaattttaccttatattcaaaatttcagggaaacaaaatgtatgaaatgaaggtgcggaagcagaagaggcgcaacccaaatgtagtcttccgtgactcgttcaatttgatgccatgctcactggcagccctgattcaatcctacggccttaacgtcgaggacaaacccttcttcccccatttggccaatagaccggagaactacggcagtcagatctaccctacgcctgacgactatttggccaacgggatgatgcctggaaagaggcgacaatttgatgtgtggtacgaacagcaccgtgaggagccatttattttggacgaggcattagcaag

SEQ ID NO: 76080 - DNA, 452 bp, Heterodera glycines
aattattgtgatcggcgacatcagcaccggcaaaacatcgctgatccagcgattcattcacaacagcatgtcaggaaattataagcccacccttggggttgattttgccaccaagtaaaatcaatatgaaattttaaaattcaaattttcaaattttgaattatgttttttcagacttgttcagtttgaggatacgttagtccgactgcagttttgggacatttctgataagttttttgccccgaatcatgtcgaagcttaagctaaccctattaaaaaataaataaaaataccgcaatttttattccgtcacccttttaatgattaaaaattgggcagctgggtttttttttaaatattttttgatatagtatgccaatatttttcaggccaggaacgttttgcaaacatgacccgagtgtactacagggattcgcacggtgccatttgtg

SEQ ID NO: 76081 - DNA, 286 bp, Heterodera glycines
attttctaagaaaaataggagttttgggggcgcggcggtgccgataggcgcacccggggaaaaaaattggaaattttgatcatttataaacagtttttcactgaaaattagccaatttataggtaaaattttgaaaaattttatgggaatttaatccaattcttaggggtgtaaaagtcgcatttcgcgccaaaaagcgaaatgcgaaaagcgaaatgcgaaacgccaaaaaatgcgaataatgcgaaaggcgaaatgcgaaaagcgaaacctcggcccatccctg

SEQ ID NO: 76082 - DNA, 822 bp, Heterodera glycines
atggaagaaagacctggattcaaagttgatcttggacaatgggcagccaatccccgccattttggtggccaacaaagtaattgggagcgcaaattttgtattaaaattttgggaaaaaaatcgacgaattaagtgcgacttggaaaattcgctaaacacagaaatgttggacgattatgcaagacaaggcgcattcagagctgggttggtaaatgaatgaacggataaggcaaaaaagggaaattatttaaataattgcagatttaaactgagtgccaaaacgggcgaggggattgagtcggcgatggacttccttttacggtatatatttgaataaaccgtagtactgtattgtacaaaaaagaaagataggccaactgtatgattaccgtattctaagggattatgacagataaattaatttatgaaattaaattatgtctctacagaagtgttgtcagcgcggaacgtgatggcctttatttcatgccaatggtaaacaaacaaattaattttacattttttttttacaataaaatgcttttttattttaataatagagcaccgtgaggctggctctattattcaagggggaggctttaatggagggggggggggctcttcgaattaataaagtaaataattatgccaaaatatgttccaccatatttcagctacaaagggaccaaaatttgcaccgtttgtcagcccaagaattggagcagaaaaagaaacggatgagccggaaaaattatttccaaaacgcttgttgttgaataaatacataatatgtaatttatttggcttttttttgtaatataa

SEQ ID NO: 76083 - DNA, 1186 bp, Heterodera glycines
agagagaattaagacagaagaagcgaagagatttcctgcagctttacagcgaaacgctaaaaatgataatggaagaagcggacaaagtgtcgctgcttttgtaccgatggggcgccatcagctggcaaaagtgggaaagtgttaaggtgaaaaggaaattcagtaaaaattgtcaaaaattaaattaaatttaaaataatgtaagattttttaaaaatataccatgtttctcgattctcgattaaaaaatgtcgtaattcctcgccctacttataaattaagtttgaaacaatagcacaaccaaaatcttcaaataaaattaaagcataaattttgtaaaaaccgagaataggatttttaagaattattatttttaattttttttagtgtaaaaacaattttcaaaatattccgaatatttagaaaaatataaataaaatcttcgacttgtccttcgaaaattgaatttgcaaaaaaatatttaatgatactttgaatttcagatcacttcttaaagtaattaaagataataaaatattaatattattttatttatttgttataatataaaaccctggaatgtttgcgtctttaaatattttaattgtgaatttaattttatttctcagttttttgtttttggtttcagaatgaatcccaagcagcgatcaaagtggaaaaagtggtgacgattttgttggatgatccgtcagcatttgatcatttttgcgtggcattattgttgtcacagcaattcaaactgttcaagtaattaactatttttttttatttttcatttttttattttagcattttttacgaatgcgccgacttcaaacagtaagccgatttcaacaaactgcaattgttgacagataaattcaataattttttaaataataaataaataatttaccgtaatatccaaccatattcctttgtgttaccgtatgcaattgattttttattttcaatgcttttgaaattaaatttattatttttttaattttcaaattacagaatgcaatttctactgcacaattttgttgccgcacttcaccaacacaacaaacagcagcagaaacaattggcggcgacaaatgggtcaaataattcggcaccgaatgtttgcccggcgccgcccattgatgaaactgagcaaataatggcaccgtttccgccgcca

SEQ ID NO: 76084 - DNA, 1107 bp, Heterodera glycines
atggatcacaataccttttggaatagaaaaaaattaattcaatatatgggaacagaagaaaaagttgtgaaatggggttcagaccatgggtttataccaaaaactgctttttgttatgggaaatggcctaaccaacatgcaaaacaagaaatggttttcgagaatgagggcaaagtagggaatttccgatgcccaaaatgtcgtaaaaagcaatcactcttaattaatacatggtttgaaaattgccacatgcccctttctaaaattatgaggtattttaaattttttttaaaaatagattttgccaattttctatttagtataatgtactcctatgcgcacgaggagtcttacgaaaaatgcacaagggaagcagttgaaaacgaaaacggcaccttgttaggatcagatactattacagcatggttattttttacgaattcatttttattaaattggaatattaggtacaaatattgtcgtgaaatgattgtcgaccattacattgttagggagggtgagcgtgatcaaattggcggcgtaaataaactagcacaattggacgagagcaaattcgggaagcgcaagtataatcggggccgttgctctcgccccactacttgctccgtcttcgaatgctcccttttgcgaagttaaaaataaggttaccattatttctaaaactaaaataatggttttcatgttaaggaatgatcgaatacggatctgaggattttggccttgtggcttgcccggaaaagattgattcgagtgcggatgttctgattccaataattcaacaacacatcgcgcttgggaccgaaattcacattgattgttggcgcgcctatgctcgactgactgagtttggctacttgaacaaagtcgtgaatcattcagatccggaaaatcgtttcgttggtatttaaataaaaatgttaaattaggatttatttttgtaaattttatctgcggatggcacacatacacaacgtatcgaggcgagttggaggcccgcgaaggactggtttcgtgagatacgactacctgggttccattttgcagaaactttggtcgagtatcaatggcgccgggagctcaaaaata

SEQ ID NO: 76085 - DNA, 528 bp, Heterodera glycines
gtggaatttctggaccgcaaaaacgagggccaatgcttccttttcgatttggctgtagtttttctgcgcgtcgttgagggtgcatgacgcgtgctcaatgactttttctgatttgtccggaaaaatagggctgattgtggcgccaattccgtcttatgatgcgtcagcagctacgacgattggaagagacgggtcgaaatggatgagcagtagatccgacagcatgatttctttggccttttggaaggcgttttgctgttcgtcggtccattcccatttcacgtcttttcggagaagttggtccagtggttcgcggatttcgcgcatggacttaataaatcttccataataattcaatacgcctaggaatgagcgaagtgtgctcaagttatgtggtggcggcatttggcgaattgcttctgatcgtccggggtcggggccaattctttcgcagagatgacgtggccgagaaatagcaattcgggctggaggaatttgcacttttccaattggatttgaggccaaatt

SEQ ID NO: 76086 - DNA, 4159 bp, Heterodera glycines
tgttaactcaccccattctgtacgcgtgctcgtaaagtgaccacaatacgtcgggtgtcccagtttattcggtgtgaaaaattaatcaagcaaagatcttcgctccaaaattctgaactggaacggtggtgtgaaagccgcgggacaattgggcggaaggtatgcggaaacatttgcagataatgtgccactgcttgccgaggaacattgaaccgtcgcggagacacaaaatggtggagaaattgaagcggcgggcggaggggccgtggaacacgcaaagcaggacggaacagacggtaactctgaagttgttgttgcacatgcggtggcagctgatcagcaacaacactgtacatagtgttgatctcggcgttgtcgattacctaaacgtatgtttaaaaagcattatcaggctttgttggagtgttaaagaatttgaatttggcgcccatcgattattgattaatgttgtgacgtgtcaatccctccccttattcattttgtttatttaagcactccttccttccccactttgttccttctccattcatttgctattttacattttatattttgtactgcatttctcctccgacataaattgtgtttattattttattgtgtgtccaaagttgagacacaacaattggcgcagtcagcagccgtgcttcacccattcgaagacacaccgaactgcaacccaacctcaacaaaaccaatagtcccaagacgggtgaggtccgctaaatttagcggttaaattcgacaaaaaccaatagaccctaggcgggtgaggttccgcaagacgcggttttcttcaatttcgacatccaatagtccctaggcgggtgaggagccactctgcgtggttaagtgcgatcgtcggacgagtcaaagccaatggacgccacccaactgcagcaagtgcttgatgcagtttttgcacgatttgccagaaatgcggcacctgcaaacgcggcctcatcttcattggcacacgcgactttggcaagttcattggacaaccggatcgccaaattccattacgacacggaatgcggcaacacatttgaccggtggtttaatcgatttggagtgcttatcgaagaggacggaaaggaacttcccgaagcgaccaaagttcggcttctccttggaaagttgggcgacgacgaatacagcaaatacagagacagcattagcccgacccaaccggaccaggttaaatggggcgaatcgctgacaaagctcaaggatttgttcgccgaaacccgctcacttttcgtccgccgcttcgaatgctttcaaattcgacaaaagccgagccaagacatcacatccttggtggcacacatcaacgccgcttgtgaaaatgccgacctcagcttgacgaaggagcaacttaagtgcatcatcctcgtgattgcacttcgcgacgagcaccacgatttgcgccaaaagtgcctaaaaatgctcgaagaagcacagaaaaacggcacgcaaatcacgctcaagcaaatcgaagaggagttaaggaccattcagctggtgaaggacagcgcactcactttggcaaatcctcctgttgcaacccatgccattcacacccggccacaacagtggagggacccgaaaggcaaaacaccgcaacaacccaagagggccaacaatgccaaggagcaacgcgcacgtccaccaaacaccaattacggcaaggcaagccgcggatcaccaactcatccgtgcggctcatgtggagaatcggatcattggcgtacggattgccgattcaaggacgccacatgccataaatgccaaggacaagggcacattgcaaaggcatgccgacgcagctccaaccaagcgaaaaatcgcagagagcgatccgtccacactgtcgttgtcaaatcccactgcatgggaattggaaccgcagcaggccgctggtggcgactcacgttcatcatcaatggaattaagattttgataaacatcgacactggtgctcaggccaccattctcacactcaaaacgtggaaaaagctgggttctccaaaactcgacaaagccgacattgaaacgcggaattgtaatgaagttccattcaacgtcgaaggaaaatttgtctgcaccgtttgccaaccaaatcaagcacacaaaaatttggcctcaaatccaattggaaaagtgcaaattcctccagcccgaattgctatttctcggccacgtcatctctgcgaaagaattggccccgaccccggacgatcagaagcaattcgccaaatgccgccaccacataacttgagcacacttcgctcattcctaggcgtattgaattattatggaagatttattaagtccatgcgcgaaatccgcgaaccactggaccaacttctccgaaaagacgtgaaatgggaatggaccgacgaacagcaaaacgccttccaaaaggccaaagaaatcatgctgtcggatctactgctcatccatttcgacccgtctcttccaatcgtcgtagctgctgacgcatcataagacggaattggcgccacaatcagccctatttttccggacaaatcagaaaaagtcattgagcacgcgtcatgcaccctcaacgacgcgcagaaaaactacagccaaatcgaaaaggaagcattggccctcgtttttgcggtccagaaattccaccgaatgttatttggtaggaaattcacgcttctcacggaccacaagccattgctggctatatttggctccaaaaagggaataccgatttatgcggcgagtcgtcttcaacgctgggcactgatcatgtccaattacgaattcgacataaagtacatcaacacgtcatcctttggacaagccgatgtactgtcacgcttaatcgccaattatccccggccggaagaagacattttgatagcaaatatctgcacagagacagattgctacatcaacaccatcctccaaactgcaactgatcaattgccgaccacgaaagcagaaatttcagaatggacaccaaaagatgaagtcctccgaaaaatttctgatcacaccaaaaacggctggcctcaaaagtgcaccgaccccgatctctcaccttattttcctaagcgaaaggaaatttaagagattgatggagttttgctctacggaaagcgagtgatcgttccgacccaacttcgtgaacgcatcatcaaggctctacacatggcacaccccggaattgtgcgcatgaaagccctcgcccgtcagcacgtgtactggcccggattggacttggaaatcgagcgtatggtcaggcaatgcgaagattgccagagcgcccaaaagagtccacccaaagcaccgctcgctccatggacgtcttgctcacgaccattccaacgcattcacattgatttcgccggtccatgttcagatggccactcctatttgattttgattgactcattttcaaaatggcctgaagtataccgaatggaccgaatttcgacaccagcaacgctccaagtcctccgatccattgtctaccgcctcggatttccagaagaaatcgtgtcagacaatggcactcaattccatgccgcagaatttaaggaattttgtgacgaatttggcatcaagcataccttcaccccgccgtatcatccgcaatcgaatggccaagctgagcgattcgtcgatgcgttcaaaagggccatgaagaaatgcgccaaagatggaaaattttcggcagaaaagaagcttctcgcctacaggacgacgccgaattcggcactcaacggactttcccccgatcaattgttcttcggtcgaagactttgcactcagttgtctctcgtccacccaaaggaagaacaagccgaagtcattgacccagccaaaatccgcaaatcgcaagctgattatgcgcgaaaaatggcccgtcaatttgatcaacaccacggagcaaaaccggtcgaatttctgccaaaagaccccgttttactgttgaacttcaaccgtggaaaacgattttggcttaatggaacgatcatcgaaagattggaaaaatccccgacgtatcgcgtccacgttccggcactcggaagagccgtccatcggcacgtaaaccaattgcgccaccgttatcctcttgaagagaacggta

SEQ ID NO: 76087 - DNA, 81 bp, Heterodera glycines
gcgcaatgattggacttgcgaccaaagaaatgccattgtacggaagggttggcacttatcctaacagttacggacaccgaa

SEQ ID NO: 76088 - DNA, 392 bp, Heterodera glycines
atgactccattctttgcagttgttccaattgctcaattctggccttcaacagtcgcaattcttcacagtgagtcaaatttggaaaagttgctaaaaaattttaaaattaaaattaatttttataatgtatttcaccgtttaccatgatcagtgtaaagacagcattttgttgaacacctcgaataaatgacatgattatgaaatttaagaaaaattttaattgaaatttatatgaaataaatctgaaaatattttataatttttgagaaaaaaaggcttcggtgtccgtaactgttaggataagtgccaacccttccgtacaatggcatttctttggtcgcaagtccaatcattgcgcatgttgtgtctcaatgtcggacacaataaaataa

SEQ ID NO: 76089 - DNA, 998 bp, Heterodera glycines
atgcgatcggaaaatggagaacaaaatgaaggagttgctccactatcagcagctgatcagcagcaactgaaggcgcgtgaaaaacggagaagggcaattaattgttaaaataaataaaaatgaaaatcgaaattttattttatttattttaatttttttaggaatttcgtcaaaactttggcaaaatgcaaatggaattgcgggaaacaatcgaaaaacttgtggctaaagttggcgaattggagaagcaacaacagcgccaaaaggtcaattaaatgggagggaggggacaaagtccacaatattctaaaaatttaatttaatttgaaattttcaattttttcaatttaatatataaataaataagaatttttccattaaatattttaaaaaaaatgttatttcattcgacagaacaacgcgggagtgttcacaaaagtgaccgttgcaatggttggaaataattttaaattataataaattttaaattcagcagcaaaattgttgggatggcaccgcttgccccagagaattggaaatcattggtgccaaacgtttgatggtccaatacaaaggaaatcgcttaaaaggtaattgtcacaaattaacaaaaaaattattaaagaaatttaataattaaaattaaaatcactttaaatacgattattttaattgaaaggaagtcgctcaatgttcacaaaacgctgcattctgagcacaaattcgtccatttcttacgtcgaagtgaaaatcatcagtatgaaaatgtaaataaatcttagaaaaataaaaatataatttaaagtttataatttataataatttttaggtgcgcaatgattggacttgcgaccaaagaaatgccattgtacggaagggttggcacttatcctaacggttacggacaccgaagcgatggccttttttgggtcaacggttcctgccaaattggcagtcaaagtgccaaatttggcatcggagatgtcatcggcagtggc

SEQ ID NO: 76090 - DNA, 1816 bp, Heterodera glycines
atgatcagagccgttggaaatgtcattacagcaaaaatatctgagcaaatttcgcagtcgggtgtatttggagtgattgcggatgaaacaatggatatttccggttatgagcaattgtcaataagtgctcgaattgtgaacgagtctaatcaaattgaggaaatttttttgggatttgtcgaactcgaagatcaaacggcagttacaatttcaaagaaaataatttttcttttgcgcggtagttttagttaaaatataaaaatttaaaaaaattaattaaaggtaaatatgggcttgatttgtcaaaaattgtgggccaagcctatgatggagccagtgtgatgagcggtggtcataatggcgttcaggctattgtcagacgtgaatcagggtgggtattgtgtttatttcccctttcaaatcaacccaaattcaaaaaggcctgcggcattttatgtccattgcagtgcgcatcttttgaacttaaaactttgcgccgcattgaccgctaatcactatcacaatgtttttgactttcttggaaaattgacaaacttttttcactgctcggcaaaaagaacgaaaattctcgagcggtcaattgacgcaatttcttgttcaaaaaaacatcgcattccgactttttcggacactagttggaccgccaggcacactgtaattgaggcagtgaaagagcttttgccagcagtcattgcagcattgtgtcaaattcgcaatgaagatgcagccatgagatcggaggctgcttatttgctcgatttttttgcgcaaaatgagtttcaattttgttttatcatgattgacaaagtgatgtcagcaatgaaacccttgacacttctgttccaatccaaagaagttgatattgaaaaggtaaaatctctttttggcaaaaaaaaaaattacaaaaaatcatggccaacgcgcaatttgtctgtttaccgattcattaaacaattggattgatggtgttgggttcgggacctttgagaattgcaagaaagatgcattgctgattcggtcccaaattgtggaatcaaattatgaacgaagaaggagcggccgttttcatgtggccgagtcagattttgatgaatttgaggaaccattttttaattttttaaattcactaaggtagcaaaaaagagcttaaaaataaacaaaaaaaattttcagggaatcttttgccgaaatgttcaatgattcaacaatggaaattttaaaaagcctccagactttgcttccctggaaaatcacaaaatcaaattatggtctcttttcagccgctgccaaattttaccatgaagcaaatattttggaatgttcagaatatcaaattcaggtcatgcagtgaattgttcaaaagtgttaaatttatttagtctgaatttgaacaatggaaaaactattgctatggatttaatggaatggaaatgaatgtggccttggaacattgcgactcttcgttttttccgaatgttaaaaaactcttattagttttggctagcattccaattacttctggtaataccaaaaaaaggaaaaattaaaacaaaaactgtttagttactgctgagagatctttttcatcgctacgtcttctaaaaaattatcttcgcaataggatcaaaatagagcgtttgagttccctagcgctcgcttatattaatcgcgacatcgatttttcggttgatgatgttataaatgaatttgcaaaaaagaatcgaaaaattgattttgcacttggcaaagaacattcagcggaagagatggatgaagacgaaaacatttcgttata

SEQ ID NO: 76091 - DNA, 59 bp, Heterodera glycines
aggcaatgacggtcgacggaatgccaaggcatcgagtgcaccagggcagatgggacatg

SEQ ID NO: 76092 - DNA, 2243 bp, Heterodera glycines
  unsure (1)..(2243): unsure at all n locations
atggtggaggaagcggcacttttggcactcagcgtactgcccgaggcgaattcgctgttgccaacggaaagccaaaaggcgctcaatcagtgcaaggagcgtggcaccaaactgttggaagaagcatgtttggcggtggagaaagcggccgagcggggcggcgtttaccccgaggcaagaggagggagcaaatttgagtgtgggaagctaacaatgaagaagggcggtcaattatgaattaaatagtctttattggtcaacgtcccttcgttgtgcaggttttgtttcgagttgcccaccattggtacgacgacctgtacttggcccatttggagaacacccagcagcagcaggcgacaacgacggcgcttccgcccccggcccatccccagccgacccaacgcattgccccgcagcagtgcgtcgtccgtctgatgatgcactccccgctgcaccactcccaccagtcgcagcagcaacagcagcacttcttccccgtccattctgccgccgcttcgacttctgctgccgttgttttttccccttccgttcccccgccgccgacgcccccgcagcaatttgttgggcccaacgttgtcatccatcctcagcagcacaacctcagcaccggcaacaacttcatacagtacagccaccatctgcagcttacgcccacagccgtcccgctgttccacggccaaacggctgccgtctcaatggcaccaatgcttcacaacggtcaggcgccatcggtttcatcctgttgttttctctcgcttccccctcctcaactacaagcagtacagccaccaacagttgtggatcataaacaaacatctcagcctcacctgcagcagtctgttgcccaatttggttcgaccattggctaccctcaccatcatcatgtcactgctcaccagccaccgctttccacgccacctcccccactgatgctgatggcattgcccggggcaaatgcagccgccagcgctttccccccgaggcacattttgcaaccgacaccagcacaacatcagcttccgaactacacacaacagcaacaacagacggcaaaccaacaatggacactgcaaaagggaatcggcaaacacagcatcggattgaatggcgagcattgcaactgtgaaagaatgcgcatcggtgcggtattgcggcaatgaacggactgcgcagcacggaaagcgcgtccgccaaattcgccaaggtctgccgaaccgttaatttggatgccncctccctcaattttctatttttctttaacagaatccgccctcttccgacgagatttgttggctgctcgacgtgtccctggagattggcgatcccgactacgtgcggctgtttctcgagaaggtgttcgcctgtgtgtactcacccttcgtcctcctccaattgctccgcggcgttttcaaagtctgccgttccgtcccctcctctttttttccaatatttgtccccgtttctcagtttttccaacatttgcccggtgctttgcgtctgctcgcctcgagcgacgtttgtcttttggcctcgcaaatggccaacagcggacaggcgaagacgtgcattcagcaggcgaagtcggccatggaattgcatccgatggccggccccgtggaggagttgctgctccacgccattctctgctgcttcaacgccgcctcccacaagtgaacgccggatgcattttctttggggtgaccaatctcattttcagactgagctacccaaacttcagtgcttccgaccaggaatatgtgagtgagaaggaaggcagaaatactattcaaattgagagatgcacccaaaaacctcgccgcaggaatttaaaatttttttaaatagaaaaaaattttcaaaaaaaaaaacttcgtaatagattaggccctaatcgttcattccccctcaaatgtggcgggtggtggaacctctcctatctctgatctgtttactttgccctttgccacgcttttgtttctcagatttgtgaattggcactggtggtgcgcgacattttccgccacattccgccgtaccatcatcctccacaccatcagcagcagcaggagaacggaaggagaaagtacatggatttgttcttggagcatttgcaggagcaaaaggcattcaaaaaccgaaagaacggagggatggcggcagtgagaaacactttgtcacaacagcagcagcagagacagctgacggacagatccgacgattaa

SEQ ID NO: 76093 - DNA, 462 bp, Heterodera glycines
gttcggtgtctcctccccctcctccgtcttcaaatgaatgccctcctccgcttgtgccatgtcagtatgaatatttggaccacacggccgacgttcagctccacgcgtggggccaatcgctgggcgaagcgttggagcaactgacaattgcgctttacggtgatcgcttttcgttgcttttgcgtttcattccattgtcaagggtatatgaccatcgaaattgaccgagttgagcccatttacacgatggacttctccgcttccggccacgacctttccgcattggttttggcattttttgaatttattttcgttttttaatttaatttcgcttgtaaggtttataatttgttggacaattgcctctacagtttttgtgctgagccttttttcattggacggttcgccaaatttctgaatttgaaaaaaccatcgggaaacactggcgaagaattgtcggtg

SEQ ID NO: 76094 - DNA, 725 bp, Heterodera glycines
atgaagcgaaccaacgcatcaaacatcactccacctcgcgccaaacgtgcaatgccacctgcactggacctggaccaaaacactgccacactcgaagagcaagaacgccaacgcaccctggtcttcattggcctcccggaaagcaacgccatccgcccatcggagcgtgttcaggaagacagggaagccgccacaaaaatcctggaccatcttgaagttgaggccgaaccaaccgccgtctttcgactcggccggttcgacccccagcgaacaacacctcgcccgctcaaggtggtcatgccgacgcccacacaccaacatgtggcactcggaggatggaagcacgagcgtgctcggctccgttcccaacagaacctgacccgtctgttcgtccgtccggcgctgtccaaagaacaactcaaagaggaatacgaagcgcgtctccgaaaacgccaacaaaacccagctccgatggcaccggcaactcagctcccacagacaaatgccccgactcccgttgtcgaagatggaccaaaccagaagaagaccagtgatgacattcccaaacaaccggaggtttttgacgaaacaatcctcgtctgttatgaagcactaaactcatttccacccaccgacaaaattgttcaccaaattcaatcgctcaaaaaacaataccctcatcttttcaacaaatagttctaccagacctccaacaatttcttcaa

SEQ ID NO: 76095 - DNA, 1388 bp, Heterodera glycines
  unsure (1)..(1388): unsure at all n locations
atgtacgccttgaaaaagttggagaagaagcgggtgaagaaaaggcacgccgagtcactgacactgaacgaaaagcaaattctgcagcggatcaactcgccctttgtggtcagtttggcgtacgcctacgaaacgaaggacgccctttgtttggtactcactttgatgaacggaggtcggtcaactgagtcccgcggacgatggacgccttttctgatcgaattcgctttaaaggcgacctcaaatttcacctttacactttgtcccccgggggctttgatgagagaagggcccaattctacgcggcagagatcactctcggactgcagcatctgcaccgggagagaatcctgtacagagacttaaagccggaaaatattctgctggacgattacggtacccccaaattcggatactgtattgcattcattgtacagcaaatacacttcactattcttaggccatgttcgaatatccgatttgggtttagccgtcgaactgaaggacaacgagcccataaagggacgagtgggcacagtgggatatatgggtgagagggggaggagaggggggaagctaatccggagctaaaattggcatttgtagtggcaataagccaaatgggggggggtaggaaaaacaaagtaatggcacgcaagggaaaagggaaaaatgccattgaaagcaaaggaatgggagagtttttgaatgcaatgggaatttttattttttgcagcgccggaaattgtgaagaatgaacgttattcgtacggcgtggactggtggggattgggctgtttgatttacgaaatgatcgaaggaaaggtaaaaacggaaattataaaatatgtaattaataaagtgccgacattagtcatttggtgattgtttttgccttttgaggcgccgtttcgccaacgtaaagaaaaagtgaagcgggacgaagtggagcggagagtgcgcgaagacacggaaaagtacagcgacaaattcacggaggcggcacgcactttgtgtcggggattgctgcacaaagagccgactttgcggttgggctgccgccgcgtgggacggccagaggacggcgcggaggagctgaaggcacacgcgttcttcacgcagccggaccaaaagacgggcagagagccggtcccatggaggaaaatggaagccgtaaaggtgggagaagcccagggaatggtagttttggcatggcataatttgaatggttggcatttcattgtccatttgttcagctgccgcctcccttccaccccgacccccactcggtgtatgccaaagatgtnttnnacatcgaccanttcancaccntcaaagganttcntccanttanaccantccttttccatccacagaccattcctcag

SEQ ID NO: 76096 - DNA, 2439 bp, Heterodera glycines
gaaacgcggtgaaacaacgcaaatgccttattatgtgccggaacaaatgatcgcttttgtggacatggactacggtggatcatcggtcggtggcatggcaaattaattcattatccaaatgggcatttatttaacgaacattttgatttattaattggttttatgacggtgaaagtgcaaaaataaaaattgacatttaaatttaaatcaaatgaatattttagaacatttcaatccacagctttcaccagcacttggccaaacgcgaaaaggaggaggagagaacggacgaagttcctgaagaaatttacagtcgcaaaattgcgaccattgaacagaagtgagaataattaaaattaattatttaattgaccgttttgttttcccttttagttttgtcattgtcgaaagttttcgcttacgcgagaaattgtccttcaacaaaagggacactcagcttctttttatggtcccttaacagatcaattaattagtttgttcggttttactaattaagatgaagcaggctgtccatgacaacataaacgctttcattggcttatgcgtcgaacggccgaccgacgtttgggtcatttggaggcattgcttccgcgggacgctggccgatttgctattcgtcaactgccagcacaagtggccaaaccctgcaaattctgtcgcaccttttcaaaagacaaaatttgctttagccgtcccccaccccacaattagtgctaatgatgcgattagtaaagtaatcgcagtgattaaggtcgattgagtcgcgggtgaacgacatccgtgccagtgtggcatccattgtcagcgcacaccaacagcagaggggggcggagggcgacggagcggtgccacgcagggacattttggacaacaatttcaaaagtgccttcgtcagagacattgtcaaggcaaactggggcggggtttctcattcggtttaatgtccgctttgtcccaatttgatattccagggtctcgactttctccactcgtcccccatcggttaccacggcgcgctgacttcgacgcgatgtctaattgacagtcattggattttgaaattggcaggtgcaaactgagcaaacggagaagcattggccagacgcatattcattttcaggctttggaacttctcgtcttttgtacaaatggcgacacaacggcattttgagcaatggcaatggcacagtcattcagccactgatcccaaacgaaggtcggacaacgaaaggggggagggcaaatttaaattgtcgggagggcattttgggggagtgtttttttaaacaataaataatttaaaatattttcggccttcctttagaattgcattattatgcccccgaattgcgcttaacaattcgttcagccgttgtgcggaataaacctgaagaaatggtaaatgagtgaaagggcaaaagtttatgacttttggaaaaacaattaaggaatttaccaacgaagaaggccaatcgcacgatatgtacgcattcggcgccattctctacgaaattctctaccggcggaggtttcgtttttggtttttggaatttcttcaaattttcaaccgtttttcagaattaacgatgtaacggagtccggcgacggttagcccatttggcaaatgtctgtcaatccgttaattatttatttgcccaggcgccggccctttggaaccgatggaagacgacgtcggcattttcagtgcccaagctgaagagcgcctgccgattgtgcccgaatttccgggcgaagagactgtcgccccgggcgccaacactccccggtcgatggtcagctcaattgaccgagtacaccccgatttggtggcactgatgcggcgatgttttggcacccccgagcaaaggtgccaaaaggaataatggaggaccaattgctcaacccatttttgaataatttccccaattagacccgatgcgaacatggcacggaaaatcactgacgcaactctgaaaatgtgatttggaagacattttaaaatacacaaattttcgttataggtccggaagtttggtggaccaaatgatcaaaaacatggagcagtacacgggtcggttgggcggcgaaattcgattgaattatttaattattgcgcattttctgggggattttaggcaatttggagaatttggtgaaagaacagacgggcaaattggagttggagcagcagaagattgagcagattcttctcgagttgttgccaaagtgggcaggcatttgctattccctccttttgcttttaaatccctaaacattttaaggtctgtggtcgatgagcttcgaatgggtcggcgggtggagccccaattctacgcctccgttacgataatgtacagtgatatcgttgggttcacttcgctgtgcagcgaatcgcagccgatggaagtggtcgaattg

SEQ ID NO: 76097 - DNA, 1334 bp, Heterodera glycines
atggcacccgaaaatttggtcaccaatgttttggcattgctccaattgaccaactggcggaaagtgagtgatcaccccaaatggttccttgacccatcacgtttttctcaggtcgctttggtcacttgtccgcaatgctttaaccccactgatcagacccaagacttagctgatacggtgggccaaatgctaagtgacaaaggcatcaaattggtgggaattgttcggcttgagctgaccaatgggacgctgaacatgacgacggtgatggaacggatgggcccactcaaagacgaagcgcgaagtaacaaacaaaaacaatggcattttgacaaattgagccattaccgtacccctccggatggaatggaatttgctcaccaatgatgccccctttgttttaagctttgtgtttttcagttttgctcaccattctcggcaattccttaagtgactatgtaccgtttcttcgggcactctttgccctgggaatgcgtacggtaaaagattttgatttaatagtttaatgcatctgaatataaatgtttcagactgaatttgtgaacattgtttgcatcagtgattactcgccttctccgttggctcttccgtggctttccaatggcactatggactcggccatgttgaatttgttccatggcacaattttggcatgttttgcaaatgtatccattaattaattcatccgatggatctcaagttggtcaacgaattctacccgattagccaattggcttcatttggcactcaaattggcattgaaataagcgcaaatggagaaaatatggcacaaacggaagtgagtgttgcgaagggaactcattttggaatataaattcttttttccctttcagtctcttctgatgctttccgtccaactttacgaatgcttttgggcttatgcccttttgctgtggcggaccttccaaaaaacgggcactgtccggggcaatcgcaacggcactttgctacgggcgaacattcacacggcaccgatccaaggcaagcaaagggggaaggagaagaaaatggccaaatttggcaaagaacgaggcttttctgtttggtcaatcgatgaacggttgctttttgtaggacccttcggtccgatcagtgtggacgcccaactgaatcgggtggcgccgttcagcgcctatttggtccaatccaatacgactgatcaaccgcggccggggcttctccaatttgcgaacatttcgttgagctgttcaagtgggacaaattccaactgccaaacattggtaaaacataaaattaaaatgaaataatttattattttccaattaaataaa

SEQ ID NO: 76098 - DNA, 375 bp, Heterodera glycines
atgacctggactttgaacttgggggaaatcttggcctggatccagtcgaactcgagtataattggcaccgttgtttatatcgcctcactctttgagtttttcactaatgcacggcgtctgttggaaatcactcggatgggccgtgccggcgttgtgttgagcagtggagctgaagacatgctgcagcttcgtggaccatttgatgtctcaaatttgtgctctctctttgggttgacaccaaagtgcggacgtcgctttgtctcgagttggttcaactaccgctttttacatgggatggccatttgtcttcccctttttcaggcaatgccctctccgttcttttgcgttcccaaacgcgtcgtcacacagtcaaag

SEQ ID NO: 76099 - DNA, 498 bp, Heterodera glycines
atgggatacgaatctgttgcaattaatgttgacataggaaaattcggcaaggaatcggacataatttgggtaattttgttgaattactgaaacaccaataagacaaattacttaattaagtcagacgaagaggacgaagtcgtatcgaagaagagaaaacgtaagaaacagaaaaagttgcacgatcgaaagagtggcgatggcaacgaaaggaccagcgaaagtgaaattgtgcctgatccgtttcttgtagacgagtccaagttggatctatcggcttttgcagttaatgggaagcgatttcgtcagtttaggcatttttcacagaattcttcaatatttatttttgtatttaatattttcagtcgtttgacggtttcaattgatgcggattctattcaccatctccaacacaataaaaaagtaaagctttacgatattattgcggttcgtgtccccgatgaacagattttgatgacattgcaaaggtactcctag

SEQ ID NO: 76100 - DNA, 773 bp, Heterodera glycines
atgacgcttccttcttgctcaaaagatggtgctgccagtctcagtccaatgtcattcaaagaaccaaatgcttgtccaatgttggaacggatgcattaccagcgaatcactggaaggttttcgttttggacaacacagcttcatttgttagttttttagattttgtgatgcatgtattttcgttaaagaccgccagttcagtgctcacagaatggttttggctgcccatagtccgtattttgattcaattttgcgtcacaacaaaattgcgaaagagaaggtaaagagcgtttgttaattggaatcctttgttatttgttattcccttcagattatagtcaattgtcaagatccgactgtgttcgatcgcattctcaattatatgtatagcggctcagtgacaattgacagagccattgttgtggaattgttaaaattggcgaataatttgctagtgggttttgcaaaattagattcccattttaaagtttttttagatgatccgcttgaaaaattactgtgctgattatctgatgcgttacattgatgttgcaaattgcttggcaattcgtgatttggcctcccgttacaatttgccgcgcttgcaaaagcatgccaacgaattcttcgactcaaatataaatgggttgttcggtctattgtgtgttaagagcaaaagccgtttcagatgtcttttggaaaatgctgatgtgcttggctgggaacccatcaaattggtcgaattgcttgaaatgacgcggcatgcgagcaac

SEQ ID NO: 76101 - DNA, 1141 bp, Heterodera glycines
  unsure (1)..(1141): unsure at all n locations
atgtgccaaacgaacggncgaaatattgaggaaagaacccgtccntatgcagcaaaacttttcaagatttgcgcaacaattcaaccccaacaaaagcaaaatttttcacaaagttttcaaccgcgtgaaaacactgtttgttacaattgtaatgaaccagggcacttttctcgcgaatgtcgacgaccaaagcaatattttgatggaagggctaaccaaagccatgcagtgccggccactggggccaatagttttcagatgcggccaaatggtcctgaaaagcgagcacttccacagacttcgacaaaagagtctgatcaacgtcggtcacaaaactttttgaagcaaaattgcattgttgtgcaagaagaagcaccaccggaagctttttgccgtggtgttcagctttcatcagaaatcgctgaatttttcgccaacgagttcaaagaaaggaaagacggaaacaatcagcgagaaatgagttccgacagagttggaaaaattttggtcatcaaaatcgaaacatttggtgcaaaaacggaagcgatgatcgatggtggagcgcaaatttcgttggttggcgcctcatttctgtatatgctgatcagagaaaaaggattggatttgcaaaaaacaaattttgcacgcacaaatgacagaattgccgacgtcaatgggaaggaactccgatgttttggcacactcacattgccaattctccgtaaaggctgtgaacaagtggccatacatttttacgtaaccagtgcaccgttcggattcgacatgcttttcggaacgaaggccgatcagttttggaattatggcgcttcggcaccggttacaacaccgatcacgtgaccagcgacgggaagatgacggaaaagggcctcttgatcctaagggcttgggtcatgtctcaagtgaagggaatgccaaaagaggaggctaacgagccggaaaagaaggacgaagagaggccaaaggcgggcgtgagtcaagaagaaagaggaagtgggcactttttagaatatatttctttcgtaaaagtttccataactgagcattagcggtgtcgctttggttgttgttgctggtggtgatgttgttgttgttctgctctgctggcgcgttttgttgatta

SEQ ID NO: 76102 - DNA, 993 bp, Heterodera glycines
atggattggtacgccaaaaggaacggagtgagcattcagacggcacactcgcccggcggagagaaaaaaattggccagtacactgtggacggatacatcgcggcgaccgacaccgtgattgaggtcaacggctgccactggcacgctcacgaccacccgcgtcaccgttttcagccccaaacagtgatggcgaatgggaaaacggcgcagcggatacgggaggacgatgcgcgacggctgtccttcatcacatcccaggtgcaacaagtgctcgtattttgggagtgtgaaatcaacgcggagaagcgcgacaacgacgaaatgaagcgcacctttgcgcagtacaaggacagcggccctatccgtttgaaggactgctaccatggaggacgtgtgggtccacaacgactacactacgaggtgccggaggggtggaggatgaaatattacgacgttcgttcgctctacccccacacgaatgctgtgacagcataccccgtgggtcacccaacacgagtgaacgtcattggtgaagcagagcaggcggttgactggcgacgcgccgaccaagtgccggtccgaggcattctcaaagtgttcgttgtgccgccccatcacattgatgtgcctgttctgccagtgaaatttgatcagcggcttcttttcccgctgtgccgtacgtgcgctctgcagcacccgcatggagcggtcaatgaggactacgaatgcacgcatcgcgaagatgatgagcgggggtgggtgtccactgtgacgtcaattgagttggaggaggcgcttcacaacgggtaccggtgtacggcctattatcgctccgttgagtgggacgacacgcaatggagcgaccgcgtttttcgaggctatgtcgccgagttcatggccatgaaaacgcatgccagcggcttcccggacgaaattggccaaaccgaggaagatcagcagcaattcatagaggaatgtgaggaaaaattctga

SEQ ID NO: 76103 - DNA, 2728 bp, Heterodera glycines
atgcctcgtgtggtatcaactcgcacggggaaaggcgccgtgactggtaaaccaccaaacaccaccaccgtcaaaaacaaaaatagcagcagcaaaacaacaaccaccactcctacaagaaaaactgcaaaattggttgcggatgagcagttgccagtcgcaacactcctcccaacattgattcatcaaatgtgcaaggatcgccccggcgaagaaaacttttatcagcaagcagtttgctgggctctttttgcgctctatttaatggtgattgtcagcctgatccttcatcagctttgttctatctgttggttaaagaagaagaaggaggtaactgctcagtatggacagcgcgcagatttcgactattttgaggcaaagtcgggaaaccgaacgagttttccggggctgtttcccaagtgaccagctcccagcgccggacacgctacggtacccagcggcgctagttgtgaacaatgacccacactacaaacaaggatcccattggtgcgcgatttatgccccttcgaagacggaggaagcggtcatttactttgatagtctcacaaaaacaattcctactattgtaaaaacatcatttctggataaatttcaaaaaggttttgttacaaataagcacccgtaccagtccccactgactaccacatgtgcaattcactgtattgtgttcatttatcacatgtccttaggtcacccatttgacacatttctgcgtatattagacgctagtgaaagccccgacatgtattcattgtgcattctgaataaaatgattaatccgtatgtgtgtgcctgccaatttttatctccctagggcaaagcgcataagggaaatgattgattagtttattacaaaacggcgcacggtgcgcgctgttggtgccgccgcatatatatagcgaactcacgcgggaaaggctcacttttttcacaaaaataaattatcaaaataaaaataataataataaatgtcgctggaagaccacaattattgcggtgagttgggcggcaacgaaacgcccacaaagagaagaaggagaaatgacgatgatgacggggaacagaaatttcaaaaaaattgcatccgcactctgagcgccgacaaacaatacaaccaaaaattcaaagtgcagagcgtaaagtcgacttttgtcatcgaaaatttgcccgccaaccccgagtcaatgctgcgcgcattgttcgctcactgcatgtcaactgccttggacgagtcacaacagaacggcatcacaccggatcaattggttgctacaatctcttcagatcttctaaatccgagcatatggattcccatacgccgcatttccgacaacaccgccgattcaatcatgaaccgctttcttgaagtggcacagtcaaaatcgcgggagggctctctgtggggctcgccgttcactgtgaccatcacaacgctggatgttgcacagttaccgcaacgacaacaggtgcgtggcagtgggaaaaggacaccgtattcagtacaacatatcgtaaaagagagtgctcttctgagaatcaacaacagcgatgatgcatattgtcttttttacgctttggaggcaagcagaaaataccacagcaaagagatgcccagaagaaatttctgctattatattaactgtcagaacgggcaacgactggaagacgtgttcggactgatgagcggtgcaaacattcgcaccgatttgagagaatatgacgcggttgtctatgtgccgattgtcgtggactattggaatcggaaatacgccaccgcaaatcagcgatttaaggtgtacatctttggcgctacaggcacctatcggccaaaatttcaatatgggccggacaacttcaacattgaaatcccgctctaccatcacaacgaccatttcgacggaattcgatgtggggtgggcaaagcggtgtttgggcgtgactactactgtttttcgtgcgaatgcccatatgataacgccaatgatcacacgctacaatgtaagcaaagtgcataaactgcggtcgcataggagtggggcgaccgtgccgagcggatgacaacaattattacagagaatgtacagcatgcggcaaggatttcatgagccaagactgcttcaatcatcatttgtcgagcaatgtgtgtcgacaattcaacaaatgcaaacagtgcggaattgtgtggaatatcagacaaaaccgacgaaaaggacgcagcggacatgtttgcggtgagaaattctgctacacctgtaaatgctaccataagccggagcggggctgcttcatacaacagttaaaggcgcgccgccccaaaaagtacagactgatcgcctttgactgtgaaacaacacagaatacacgaattgagggcagcggcgaccgccgacttcattccgtcaacttcatctcatgccacgtcgcctgcaccaagtgcataactgaaaattcgtggcgaaattctctacaagtgccatgcagcatttgtggtcggcagcgcaccgtcaccttctcccaaagcggctacgaacggactcaaaccgatgcccaattcatcactccttgtccaatggcggcctttgctcaatggctgctcagcgaattcgatccgcgctatcccacaatgctcttcgcccatttcagggtcgttttgacaacatcatgctgtttcggcagttcttcctcaacgggttttgcccgcaaatga

SEQ ID NO: 76104 - DNA, 1086 bp, Heterodera glycines
atggagcaatggcggaaaaggcgatacgatatacaacaacagcaacggcagccgccgccgctagtggtgcgggacctccttgcggaagcagctgcggcgccactgcccgaaagtgatgatgatgatgatgatgatgatgagtatatgctagagaatggattcgcgctacctgcaccatcgcaatactatggcgatttgcctgtgctgcccgacaatgcggaagaaattgaggaaatggacacagctcagcgcaggattgccatcagaagaaaattgaaaaaggacgaggcttacgatgatgatgatcaacgcaaaaaatataggatttatcaaccaccaccactgcctcgcgcaaaagtaaaagttgagcagccgaggcctcctacaccccggccgcgtcctaacgtcaagagagaacaacaacaaaagccaaagccagaattcaaaccgccggcgacatcaaagaaaaccggtcaccccactccggcaaaaagagtgccagagtttgttgatctcgatccacgaccatccacatcaaggcaggccgggtataacccgcctcccccgacgcccaaaataaaacatgagccgacaacaaagagacctatgccataccgtatcccaaaaagagaaccaaaagtcgaggaagcgccacaacagcaacagcctcttcctgctgccgctgttgtcgtcgaagaaatgccctatgttcctccgcctaggaggggggccaaacgtcgctaccccgtatatgaagatgatgaggtgcagataagaaaacgagtgaggcagccgagaagagtaagagtacagtactcacccgagccaggcccttcaacatctgcacaaagtgatgaacaacaacaacgacaacaacaacgcgaactgtttgccattccatcaaatcagctgaccatgactcagcgggttgaacggctatacatcaaatgcaaccattacgctgatcgtatgggcgttcgtggaaatacaattaacaccgcaaacggcaagccgttggtgcataccaatttgcgaatggccatccgctatataatagacggaaagagcgggccgccccaccattag

SEQ ID NO: 76105 - DNA, 880 bp, Heterodera glycines
atgtttggtcttagggaatatgctctggctacttttttggatgtgcggttcaaagacaaagtgctgactgaaaattccgcaacttttcgcgccagagtcactgtctggatcaaaaatgaattgaaagaattggacattgataatgacttcgaggaactacaacaaaatgaatttgtccgtcctgtaatttcaccccagcccgaaaatctgccagccaaacgacgaatgtcattttttgaacgtcttaaaaatattacaggcgcgaacacaagtgaacagggtgatttttcgtctcttaaaattaattttataatgaatttaaggtctccaaacatcgcaagacgatgacattgaaaaagaaattaaagaatttctctcagtggaaattgcgaacccagaagcaaacccgcttgatgaatggaagaaaatagctccccgattttcaatccttgccaaatttgcagaaaaatatctttcagcacccgccaccagtgtcccaagtgaacaaacattcaaagtcgcccgtgatgtttttgattatcgccgttccaaattatcacccgaaacggcagaacaacttatttttttgaacaagtctcttccccagatgaactacaattattgaaactattttttgtgcattttattaaacttgttatataatttctatatagttgatgaaatttgtgggtttttttcccaaattaacatgtaaaaattaaaatttataccaacccggacccgggcccggcaatttgaaaacccgggttgaccgggctaaccgggttgaccgggttttgagaggccgggcccggaacccggttgattctggaaaaatcagcccggcccggcccggcatttttggaaattccggtctcta

SEQ ID NO: 76106 - DNA, 1613 bp, Heterodera glycines
  unsure (1)..(1613): unsure at all n locations
atgaatgagcaggcgaacgtgctgaaggacctgcagtttctgatcacattgatcaatccctttctgtacgggtttggacggagcggcggcagcggcgccaaactgcgcggaaaagcggcggttggacagcatcggcaaaagggacggaatgcctgcggcggtgcggacggctaattaccagctgataattactgcaggcagaaagcgttcaaatgaataagcacaactttatttttgcctttatttttttagacggataaatatttaaaaatatgtctttcacagagagacaatttttcacaaattaacacaatgatgactatatgtacaacaccttggttccaaaacatcataacctattgattaattagctaattagcgcacatttccatggtcaaaccagcgcatttacaatcatgtgaatgagtttaaatatgaagacattcacaatgagaaaatgcactagtccaaacaaaggagattattanagaataaaagaggtaaataaatacataaattattcagggagcaaaagagaattttgtgctaattttgatttttgcaaagaatggctttggcatctatcatttgtgcttttatatgccatgatgtctctgcccatctctgctgttgccattttgtttctcttctctcagattaattgccattcatctgtccatttgattttacttgggttaatttgagcggctaaatgccctcctgctagtgaatggggacgggcggcattttctttgctcgcacaatggcactttgggaaaggtaacttaatcttcaaccaaaaaatgaaaaacaaaaatgaatgggtttgatttattttctctttaggccgaaagtgatcatttaaaagtgaatttttataaaaattaagcatatgtctaaataaatgaaccggataaaataattggcaattccttagaataagaatcagctaagcttataaaatctattgagaaatatttttttatattataaaattggtaatttaggcaaaatctgttaataaatctcacaaaatttttctcaattttatttacctttcttcttaatcactttttcacatttaaacgccacttttgttcatattgttctcataaatgcaaagaaagaaattttagtcaagtagacaaaatgaaaacatttaaagttaacctttttattttttcattaaaaatttctttattaaaaactaggtacctacctaaaattatctctttctaacaaattcaattaggtaatccagaaatgtttttatattccataaacaaaatgcataaatgaccttacctaattggttccgcgattgggtggtaattaattcttccatcgtatgtttgtatttgttcgtcttttacttttcttcttttggccatcccttcccttttaatttcgtccttttaaccatttcaattgaaatcccattcgtctttcatatcagctgctgaccgaagaatggagttcaaaacgctcgagaaattttctcattcagggattttgagcagtatttgtttcgggatcatttaatggacaaattgcacattttgaaatggcattcatgccgtcgtccatctgctgctgaatacctctgctgctga

SEQ ID NO: 76107 - DNA, 1331 bp, Heterodera glycines
atggtttggcttctctcataccggtggctgttcggcgacttcggctgtcgtctgtatcagtttctgtccgcatttgcctactattccaattcgaatgtcatcgtcgcaattggactggacaggcttaaggtaggatttatcggagtaaaattccttgctattttcaagaaattcacccattgcttttcctaaatttgccatttttctaactgttaaaaatcattgaaaaattgaattttttaaaccactaggccaatttgtacaaattgcttttcctttccaggttgtctattctgaccaaatgcaatgcgtttcctcctgcactcgccgcgtgcgcatttttctgctcatcgcgtggcttttggccgcactctgtgcactgccccagctgtttttctggaccaattttgagctgggcctcggctggtcccaatgcaccaccatttggcaggtccaaacttcgtcagcccgttcattttcattgctttttctaagcgggcatccgaccactaattcagtcgggactaatgcaacattttggtcctgacttggcttgtcccaacagtgccgtcagtccagtctctaatgttcctccgtttttccacgaacttgtgccttgagacattaattcctgagattaccaaaaggcatgagggataatgccagtctcgaactgatgccaatctcgagtggtcgtccatgtcaattcccagtctttcattttccatgtttggcattccattcttactcaatcattttttacagattgctgagtacactcagacgaccaatttaatttcgagaatgaattcacaacgacaatctcggacattcaacagcagaaggaagaccattcgtggagtgcccatgccaacactcagctcctctacgaattgttgcaccaggtagacggacggacaaatggtaaattaagtgaaaaattaaagcatcgaacagagcgttgaaatgaccatagaaacattggcattggcatttactacaattttgtagtagtcccattttttaatgttaagagattaggctaatctactcctctctcctcattttttatgttcaatttcaattggcggggcggggggggggggaaaatgcggcgaattggaaaaatgcgcagttgtcgattagcaactattcgatgtgggatcaatgcatcgattcgcatactttcctatcggcccgcacttttctgtccggtcgatggaatcaattagtgcggggcattagcagaggcaaatcgatgcatcggattaatggattggctgtgaacggaaaattgagcgtattggaaaattgggaatggacgcggctta

SEQ ID NO: 76108 - DNA, 301 bp, Heterodera glycines
caaaaaggaattaattggcaaaagaatttccttcacctgtcactttggtgacaggtggatgattgatgaccttcccgcggcgctgcgcggcgcgggaaaaaaacacccgcaacaatttgggaaatcggatttggtcaggcggcaacttcaaagtggtccataggttttggttttgaaacacccccccatcgtggattttttatggggcggcaaattcaaagggctgcgccttcccataggcacgggctcgtgcgggaaacacccgcaaccaacccgcaaccttttgggactatatactact

SEQ ID NO: 76109 - DNA, 641 bp, Heterodera glycines
tttttggttgctatttatagaaggggtatataaagaagtgaaaggaccatttgattggtacattgtatcaaaaaatgcaaaaaccgataatcgtaaatataattgctctcgctaatctcggtaccggaattaaactaaactctctgacgatcaccgaatgcgaatttaagtataaccctagaaaattcaatgccgcagttataaaatgcacagctcccatcaaagccacggcattattatgggaatccgggaaaatgatatgtctggggacgaaaagtctgatagactgtgaaaatgctattaaaaattttatagaaataattaagggctcggggtgtccgggggcttcttacaccggacacacggttgaaaatattgtttcgacctttaaattcggacgtgaaattgaactgaacgagtttcgaaaaaatcgtcgtgcattttatgaaccggaaatattttgcggtttaaatttcaagcggggtaaaagcatgacagcgttaattttctggaccggtaaagtcgtaattacgggaactaaaaacaattctgaaattgaggaaatgtatcatcatattctcccctatttgaaaatggctcaaaagaatttaatgagacgataaaaatgtttatttattgag

SEQ ID NO: 76110 - DNA, 190 bp, Heterodera glycines
aaccgttcggcttatcaccgacgagttggacgacggcacggtcactttgctggcggaacgacccgcgcgccggcactacgcgcatacattgggtcaacgaccaacaaaaccatgcagtggcagtgaacaggatctgacggttttttatttatcttggggcgggggtctcttcggaaatgattcaccataa

SEQ ID NO: 76111 - DNA, 2900 bp, Heterodera glycines
tagacaaatgtggtgaccaatttcatcgctggcggcgtcggtggctcatgcgccgtcatcaccggccatccgttcgacacggtcaaagtgcgactgcagacaatgccaaagccggcgcccggacagccgccactgttcaccggtgcgctcgactgtgtgcgccaaaccgtggcacgggagggattttttgtgaggttttttcaaaattaaaaaatttgattttcatgtccgcttcatgcgcaaatggacagtgattcggagtgggttttttcactatatcatatcaaacccttaaaatcaagcccttttaatctggaaacaggcgcaatttggtcaaaaagtccactcttcaaattgttgtgaggtttaaacaactgacgggctgtgaaaattcggatttggtggaaatttcacgaaaaaaaatcaggaaaaattcggagagcatagttttaatggttttagggatccaaattacgaatttgacacctcattttcagcaattcatagctcaaaacgccaattaaaggcttaatataaagaatttcctttttttttggcatttcattagtgaagtttgcacaccctttaatttgccaaaaaatttatccaaatttcaaaatcatgtccctttcctcaggcactttacaaaggcatggccgccccgctcgtcggcgtttcaccactctttgccgttttctttggcggcactgcactgggcaaatggctgctgcagaacgagccgggccagcagttggacttcaagcagaatttcacggccggtgccattgccgtcgtggtcaccactgctgtgatggtgccaggttgatcattgccatttttggatcaaattttcaaaaaattaatggtaaaaatgatgatccggcggtgcagataggcgccgctggcgctgttgaaattttcatgaagcataataaaaatatgcaaaattgacaagaatttttccgcttttttctttggcgtttttcgggttataaaataaaattttataataaaattaataccggcttaaggcccagagccctgggaaatttatggttctttatcagtacatttttggaaaaaatgccattaatttccattccaaaattaatgccaattcatcatttttaggcgagcgaatcaaatgcattctccaagtgcagtccatggacggcagtgccggcacaacgcccaaatacaccgggccggtggacgtggtgcgcaagctgtacagagagggtggcattcgcagcatttaccggggcacggccgccacactgctcaggggttggtgtggggtaaagggagtaaaattcacacccaaaattggtcaaaattcattttttggcggatttggcattgctttatggcccataaatttacggaaatttcaaaaaaaaattttttgcatatattccggccagcggcgcctacattgctgtgtacgaattgcttaaagacaaattttcgggcggaaaacggcacgagctgacgcccatggcaacgttagtccgggaaattggggagggggtgtttgtaattcaatttcaatttgcccggaggcatttttgcaaatccaaagcaaaaaatacatgaacacaccgagtcaaaaaacgagacatgtgtcaataaagagagagtgcagagaaaaaaacatctctctttttggcgtactatttctttatctgtgttaatagagaaaaactgaatttacttcatgctgtttaaaattttttctacttgttaaatctgcttcaaattttgcatagagacagagaaaaaaattctgcatcgttttctctgtttgtttatagcttaaatgttgttctaaaaagttattaaaaaaataaaatttcgaagccatatatcttttttcgaactcttctaattgtttagcatttgcttacaaaaagcttctcctcatcaagggctttcgaatgatatcaagtttttccaatttggttgggaaaaaccttcaaaaataattcccaaaattcgtcattttaaaaaaaaaacaaaaaaaaaaaactcatgttgcacaacggactcgaaccaccaccctttgtccctttactatcttacaaaaaccacttcgccacacatgcaaatctttttagaactgagaggccaaaattgaaacggtgtgtgaaaaaaggggaggaaaccaactcgtacaccgtcccgacttacactgtgtcagcctaacttttatcaaagttgacctttcacaatttttttgatgaggggcacgatgatgatgacgacatccaaatttgttgcccttttcagtctgctggcggacggttttgccggcatcgccaattggtccgtgtgcattccggccgacgtgatgaagtccagcaggttggagacggcgcccgagggcaaatacccaagaaagtttttaattttttttcttttttctggcacggcattaattttcatttaaaattttttaaaaattgatcaaattgtcataattaaagtcacgccagggtaaaaactgtaggacacgtcgtcgcaaaatgcccgccgcgagagggcccctcctccctcacattttcctggccgggctttaatcatagcgaaggacatcgcaaaagtgcaacgaggaaaagaaaaatttaaagccgatctataagggcttgcttccttggcattctgtttcaattttccacctctctcacagaagtcatccgtgatgtgtgttccgcgaaatgttgcgcgaggaggggcaccgtgcgctgttccgcggcttcgtgcccgtcatgttgtgcgtgttccacgccaacgcggcctgcttctccgggcttgagcagacgctgtgggcgtttcgccaagcgggcgtttgaaaaaaacaaacaatctctttgtgtttactgtatttttcgatattaatt

SEQ ID NO: 76112 - DNA, 1498 bp, Heterodera glycines
atggtacgcaagcggaaaaaagtgtcaccgccggtgccaaccgcaggagcgggcactgctggcggcgcctccgacgccggagggtaccgtttcagcgcaccgtacgtagctcggaccgcgtcacgatgcttgaaagtaagtaaaatggataagcattgtcctttatgacacaaatcagccttggtgagcccgcatttccactaatgatataattaattagcattaattgtctcaccttccgccgatcgggcgcacttttgacaatgatcagcacagagttgtgccggctgagaatgttgtgccgacagtttggctcaattaacggacgggggaatagtgttggccagggattgatcggcaccagcggttgcagatcagtggccaacaaatttgcgacggacgaatgggacgagcccaagagttcacggacgacccaaaacaacaaagaaaaaattggtgcaaatgccataaaaaaaatttgtagcccatttattccggtaaatttggcactttttgagtccatttacccctaccgttccttgcctttctaccgtatattacactcgctaccgtacactcttcctttgctacctgtgcccgcacgtccgcttccgaccaacggaactgtgcaaagggcgtctcgaagaaatggtcggcgagtccggtgaggaacaacgccagcacaaaggagggcaacgcgagcagtgcggacaccacaaagaggccaaaaatggtagtggtggtggtgcaacttctgctgcttatgtcagctgttaaatttttttcaaattttgccggagggaattagcaaattaattagttggagtccgaattagcatatatttaatcggcccttttgcggcgtaaaatcgatatgtaaatccatactattaaccctaaacctcagttttttagatattcaattttttttttctaataacaccatcaatacaggggtaaagcagcggcggcattttgttgtggtcgccattcgccgggagccggcacagccacgagagtgggatcatcgagtgccaacggcgagcgcactgtcgccgcacgcgacggaacatggcacgcagcatcggcgccgatcactggtcacatgggtcaatatgaccctgactggacgagaccaatttttgcttctccaaaaattcaatatattccgtatgattgagtctgaaagtgcgggacaacagaacttatcatgaccagtatagaaaaatttggggaaagattttattgttttcttaattatttgttttttatctgggcgaaagctgtttttgatgtccttccccccaattcgcatggtcgatggagttgaaaatatttgttaattaaatgaaaataataacggtcattttatccgtcattaaatgaatacatatacaacacgcgtttagcataattaagtgattatttttattaggtatagtaaacacaatattaccacaaagtcaattaatataataacaataataataataataaa

SEQ ID NO: 76113 - DNA, 1484 bp, Heterodera glycines
atgaacgcgttggaaagcgaggcggccgcgcatggtgacttattggtcggcgactttatggacacctatttcaacaacacgttgaaggtggttttagactggcgcgaaagaccggcgaatgcgacgccaatttaggcgctaaattcaaattgtctctctttctcatcccacctctctattcggcccactatctctttttactaatccaatctcaaaagcacttttaaatattttttctaaatttataaaaaattcctccctaaaaagtttgtccattctgtgcgctttgctcgtcactattgtgcgctgcccaattcggtgccttttgtgcttttgttggacgacgactttctgttgttcccgtggaatttaatcaccgaattgcaaaagtgccacaaaaataaataaacaattattttggcatttttatttttttaaattgtttttggcatgtcccaaatgaacgcctttacatgggctggcgctttgacacttcgccattccgttcacgactgttcaaatggagggtcggagtcaataatcaactaacttattaaaataatttgaatacagtataccaaaaaattgaaccctaaaaaacgtttgaaatttcaatttaattacaaagataaaataaagcaggctcgtcaccagtagaagccggaatcttgaaaaatacagaaaaaggatttgaaaaagctggattgaaaagcagcggaaaaaagtcctaaatttctgagaaaaactgaaatttaaataaattcgggctctaattaattaattaatcttcaattaaggtgtcgctggacgagtttccattcgccgcctttcccccgtacatcgccgctggcgcagtgctcttaacgggccaaacaattgccgaattttacgcagccattccgcacgtgcgactgtttcgcctcgacgacatttttgcgggtgggaaatttttcgtcaatagtttttgaaaacaattttttaaaattttacccattttattccgtttttatttttttgatttattatttcgacatcccatacaattgttctattgctgatttccctttccttttaggcattctctcccatttgttggccattacgcctcaacacaatgccaattttgccttctatcgccaatcatttgccgacgattcattggcattggcatcttcagaaacactcaccacattgatcgctgtgcatgactatttgcccgaagaaatgcgcgagacgtacggaaaggcagtgaaacagcaaaatcagcagaaattgaagctgctctgaccatttatttaggtgttagggcaactcgtacaatttttaatggatttggccataacttttttaggtaaacaaaattattcaaacttgatatcattcgaatgctctccaagtttagaagcgatcattaagtagaagctgagagatttcctttgtacgagtttccattgacccatttattatgattattacatacaata

SEQ ID NO: 76114 - DNA, 1215 bp, Heterodera glycines
aatttctgcggatcgttgtggaaacaaattggacaaatcgatgcaattgacgggcgcaaagtgaaatggtgaaaaaaaatttgttttttttattttgtgaaaaatttccaggtttcttggcggtgacctgtgttttctgtgggcgatcattggccattgcggttcggcaatgacagcattcccatccccagtgtgtgactgccgcagagaacgtctgatcagttcagcaaaatgccaacttcgctctgtgcaagaactggagagacaggccggtcaattcgaacagctgacccaaggcggcgacaaagcaacggcagaggctcgggctctgacgatgggcattgtttgtgcacctcttctgccgtccatcaattttgagcagatgctgttggccccattccacgtcttccaaggcctcggaaatgctctgatcaaggagttggaagcgggagaaaatgccgaaatagctcagcaattcttcagacgaatagggacaaggagggaagcgttcagaaagcgcgacttgacggggaacagcatccgcaaaatcctcgtccatgccgatcaaatggaggcccttttcgaaacggaatgggcgaaaacaatttgccaaacaatggtacatttggggaaaatccaaattttcaccaaagtaattggttttatttttttgtggaaataatttttttaatttaaggcccagccattgtctccaggtgatttggatggactggagacggcagtttaccagttcaaggcatttctcgacgaacaaccaatggtgcgaacgcttctttcaaaaaagacaaaagcccatttgctgcttcaccactttgttccgtttgcgcaccaacacggatttttgggccttttggatgagcagggtgggaccatatcatttttgggggttcaattttaaaacttgtgatttttcaggagatgaggcactgcattccgtgtgggggcgacttgagcaactttggaagacgatgccggactctgaacaaatgcgacaacagctggagcatcatttcgtcttgaattggctgctggacaccggcagactcgacgaattgaagctggtgagttgatggaaggggatttaaaattttaatccaactaattaagcgggaggaggaacaacgggagcaagcggaggaagacaaaacgaatgaagaaagtgatcaagatgccgacgtcgatatcgttgactga

SEQ ID NO: 76115 - DNA, 2075 bp, Heterodera glycines
atgcctcaaccgttgccgctgagagacatgccgcaaattcaccatccaccgcgaaatgtgacatcaatttggatcaaattgtggttgctttttctcagtctctgggtgtttcttcaaggaattcatgttcggcaaattcaacgtgaatacgccgtaccacaatttgccgatccgccgccaaacgtgccgtatcatccaccagaaaacgttccggtaatgttgggtcttgtttttcgtgcgtttctcatatttccggatgctttttcaggcaattcaaccaatgcaacgaccgcggcagctgagagacgtgagtagtatatggccgcaaatctcggtgtaaatttatctgcgataacccctttccttcctctttagaccccgtggcactaaccatttcccttcatttttcccttctagccgtatatttgtgatgtttaaattgattgaaaaggagggaatcataattgttttttactaataaactaattgtaaaatgattgaaatgagtgaaaaaattatgaccacatatgatcaaaaataataacaggtaaaatttagtggcaaggggaatcggcaaaatagggaaaaatcataagaaaaaaaggtcatacccgggaaaagagccataagaagttcaaaaataagtcaaaattgtgtgaaaaacattgtcatagcaggtgaaaaaaggcatcagaacaggtgaaaaaatgtcataacatgtgttaaacaggtgaaaaaaatgtcataataaagttaaaaaagtgaaaaaataagaaaaatgaggaaaccgtgaaaattttgtgacatcatatggtcgaacaatgatggtttgggaagaaaacatatgaaaggtgaagagtctgaaagttgattataaataccaataaacaatttcttacaaccaaaataatggatcaaatattatcaaaagtttatttcaatctaaaatccctagctagctatgcgggaattttgaaggttttagaagaagcaagaaaagtagaccaaaatataacattagaggacgttaatacgtttcttgaaaaacaaagaacctatacaattcataaaccaatcaagaaaatatttccaagactcaagacgatacccagcgggcttcatacagattggcaatgtgatttgtgcatatttgaccagttgaaaaagcataacgtaaaaatatatagcgacagcggcttagagtttcaagcgggaaaaatgaaaaaatattttgaagaaaaacaaatacttaagcatgtaatgtatagtccagatttacatgcaggggtagtagagagggcgaatcgtacaataaaagaacgactttataaatattttacacaaaagaacactctccgatgggtcgatgtaatagacaaaataataacaaatataaacaatagtgtgaataggacactaggggtcaagccatcatttgttaattttacaaatgctagtgaaattttgaacaacatatatggcaataaaaaagagaaaataataaaacctaaatttaaaatcgggaatattgtacggatcacaaaagacaaaggaaagtttggaaaagggtattatccaaatttcacggaagaactttttgcaatttcaaacgtactatcatcaaatccgccatcttatcgcattgtagacatggagggtgatcagattaaaggtatattttacgatcaagaattagtcaagacaagtgtctgatcgaaaagccgacgcaatcgttctcgcccccataaaaaggaggtcaccaacgctcccaaattaattttttttacaatttgagttgcctttttttttgttttagaaatgtccagaccaacaaatgcgaaccttgcccgaaagaacaacctcaaaaaggcgcgaaaaattttgtttgccaaaaggagacaacgagaaattattattagaaaaataattcgaaaaaatataccgaatggaaatgaaattttttttaaattctgcaaaatgatctttataacaatcaacatcttattttttaacggtactacaaagcgaagaaacatttctaattattttgtaaatgatacatttatttcaataaa

SEQ ID NO: 76116 - DNA, 570 bp, Heterodera glycines
atggaccaaaaatcgcgaaatatggacaaaaaatggccaaaatatggacataaattttccaaattgagggtgtaagttttcaaaatttcttcgtattctctattgtaaagaataactttcaaaactgtctaaatatggtattaaaaattattttggaacaaaaaatacgataaagctaaaatttattaattccgacccccctgggcagagagatgcgcattcacataggagagaggagagaattagagaaaaagagtaaaaaaatatgcacgaaaaaacaaagaaaagcgacacccgtgctcagttggaacacgagggcttggcgaatgggcatgcgtggcacccgtgagcagttcgaatgtccctgaaaaattccgcaccaaattgggcgccccaaatccccacacccctcatcccctctcctcccccttccgcatccgttatttcagatttttcatattcaatttcaattcccctacgctaccacttttcatcctttcttctatgcagttgaaaacggcgttagttgctgccccctcccccaaattccgctcagtaattggccactaa

SEQ ID NO: 76117 - DNA, 643 bp, Heterodera glycines
atgcacgtccacaacatcgacggcatcctcaacatcaactacaccggcaccgacgacgacgacaacggcaaagccaaacgaagaacaccgattggaggcgatgcggattcgacgtcgctgttcaagctggctctggccatcgctgcagccattttttattcgctgctgagtcgccgaccatccaaagactattggctgcagccgacggcaaaagaggtgtgttttaaattttaaaataaattgattattgctgtaaatgtaaacattttttgacaaattctgttagcaaatctcactcaaaattttttccggcggcgcctatcggcaccgcggggacccgccctctcccaatgtttcaaaaaagttttttgaaaaaacattgccataaaaacagcgatttaaaagcaaaaaatttaaaatacagaattttgggactcagaaaattccaagaatcccccttgaaatgaaaatttttaaaaatttcctcgaattcgacctccaaaacgaaaatacaaaattttatgggtacatagtttttgcctttttcatatattgtcatttacagacactcatccgatttggagtgcaatcgacgacatttccgattccccattgtgttgaaaaggataaattctaccaatga

SEQ ID NO: 76118 - DNA, 49 bp, Heterodera glycines
  unsure (1)..(49): unsure at all n locations
atgaaaactttttttanaaatactcggcccgccattcaaccctgccaat

SEQ ID NO: 76119 - DNA, 598 bp, Heterodera glycines
atgacggagtcagcaaaaggcgtcggaaagcgaatgatggcgatgaaattgacaggagatgaagcattggtaaatgcctaaaatgaaggaaaaaatgtgaaaagcattcccgaattgaaatgatcaaaaaaaacattaaaacttcacaatttgaatgccttccaaaatatttttgtcagaaaatcccaaagcccgtaaaagtgccaaatcagtcaaacaataagcaccgctttgaagtcttcaatccttgaagcgaaatgcccgccatcccaatgcaaccagcatttgaacacctttggcacatttttttaagcggagtgaaaagccatttggccaacgcttgtccatccgatgcggcggcactgtcatcgcatggaaattcggtgaagaaaccatagtcatagacattgataagccgaagcgatggacagtcgttgagaaatgacggcacgaaatgtcgcaaacggtggaaaagctaaagaacattggtcccgaaattttttttttaaattttgagtaaattattttaagggtcatccgggtcgctttggctcaatttcgaaacctgtcccagattagaacgttttagaaaaataaa

SEQ ID NO: 76120 - DNA, 525 bp, Heterodera glycines
atggcagcggtaataaaggctggaaaaggccccagaccgtttttgccagagatgtgctgggcgacatggtgggaacgtttcgaattcttcatccagcttaaaggcgtgaccgatgtcgcaacaaagcgtctgctcctgttcaccgaaatgggtcaggtgtacgaagagcttcggcgaatggcacagcctgaggatgtccgaaccatggaccttgccgaaattgaacaactgatggtggaacgatttggcgaagcaaaatcgattgccgcgtgcaggcatgaattgttttcagccaagcagcagacagggcaatcgataagggactattcggtgctattgcgcagtttgatcgccaaggcagaatggagccgcgacagcattgacatgtgtctttgtgccttgtttatcaatggcatttcaagtgatgaaattcgggtcgaattgatcaaaaaaggtgacaacaacctgaagttcaaagacgcctgtcgcgacaacgcgaaatcctaagataaaacccaaaataaa

SEQ ID NO: 76121 - DNA, 217 bp, Heterodera glycines
ccaagtttgaggtcgacacaataaacatactcttattaaaattgtgcccaacttggtctatttgcctggacgaacaccggcacgactcatcgctctccgatcggtcccgaccccctacgttcccccgaccggctactctgcgcgcctcgcccatttcatccccttcccgtccccttcaccccgcagagttcgacgcaaattttttgtcgccacgaca

SEQ ID NO: 76122 - DNA, 1887 bp, Heterodera glycines
atgcaatgccggagttgcgaaagttggcaatcagcaaagaggaccaaggaagccgaggaaaagcacgggatgttgctttgggtgcggtgaaccgggacattttgcaaatgtgtgcccgaatcagaattcgacatgcagcaaatgcggaaaatgggggcattgggctgtgggttgcaaaagcaaaagcagtgatggaaatgccaaccctggtcaaaaaccaaagacagtcagcgtcattcacgaagtcaacggagtatctgccgacactggttttattcaactcttaattcaaaatggaaagctgaattttgagcttgacagctgtgcagatgtcacggtgattgacgagattgattggaaaagcatcggtaagccaaaactggaaccatccaatggattggtggcctatggcggaaaatccatcggtggcattttgggaaaggcaacgctgaatgtgaggcacaaaggaagatcgattgagtccaatattcatgtcataagtggtaagcacaaaaatatatgtggccgcgatttgatcatgggattgaaaatcgatttgaaccgagcctttggaatttcgacaatttgtgccgtgaaaaccaaaaaggacgaattcggaagaagcaagccgagaccgatgccattttcacttcgcaatgaagttgaaagcaaaatttgccaagaagaggcgccggatgagcggaaagtgccattgcacccgtgggaatcaccggaaagaccgtggcaaagaatacacattgatttttgcggaccgttttggggatcaatgtggttgatcatcattgatgccaaaagcaaatggccagaagtggtcagaatgcgcaaaacaacggcactggcaacgattgaggcgctcagaattgtgtttacagcgcatggacttcccgggcaaattgtctccgataacggacaatttagctcgaaagaattcggtgattattgcaaatcacggggaattgtccacacgacgatcgcgccatacaattcaaagtcgaatggagctgctgaaagattttttcaaactttcaagcaaggaatgaacaagctccaaaaggaggggatgaagcaggacattgcgttatctcaatttctccttaaataccgtgtcacaccgcatcctgcaacagaattggcaccttcggaaattctcttcggccgcaggcttcgaaccttgttggatttggttaaaccaacagcggcgaatgattttgaagcggccaaagtgccaaaagagtcatatgcggaacgaatgaaaaggaatttcgatcgcggggccaattcaaggaaaaaattcgaggtgaaccaacgagtgtacgcgagaaattatcgcgatggatccaaatggatccaaggacaaatcacccgacaaattggcacggccatgttcctcgttcgaacagcgagaggaatttggaaaagacatttcgatcagttgaaagagaatttgactgatcagaattcggacaattcgagttcagaaagtgaggaaaattcggactcagaggatgaagtgccgatcgaagcgatggacgatgaacagctgcaaccaccgccggaagagccgcaaccggagcagccacaacagcatgccaacgctgaacctcgacgttcaacgcggaagcgcaagaagccgaagatcttcgatccctcggcctgatcacggctttaagaaggagggacgaatgtggtgttgagagaccaatcaataagtggagtgaactttgttcactcctttcccttaggcacattccttcccacatataagcgatgccttccctccctccctcgttcattctgtcatttattccttccattgcacttcccttcgcttgaccatttatttattatatttgtgctccaaataaa

SEQ ID NO: 76123 - DNA, 182 bp, Heterodera glycines
gcacagacagagagcagcgaaagccgggtgcagtgaaaggcggtgagcgggtgccgggaaacttcggagggaaccgtttgtctcgaatctgaaatttccggaaaagtccacccctttaaatacgattttttttgcatcaaagtacgctacaatttctcattttaattaaaatatgtttttgt

SEQ ID NO: 76124 - DNA, 393 bp, Heterodera glycines
atggcaccgatggcattggacctgcggtatgtggcactgcacgagattggccatgcacttggccttcggcattcgacctaccggcactcggtgatgaacagttattacaggtaagcagaaaagggggggggcaagagatagagtgagaaagatagagagagagaaaagagaaaaagagagagagaccagagacaaagagagagagagagagagggagagagagagtctcattagggattagctaacattaccatttatacagacaaaatttggcacttttggatgaacaaacggaagagttcaaactgagcaaagatgataaagcggcgatttgggaattatttggggagaaatgccaccagaagaaaaagaggaggaaaagctgacaataaa

SEQ ID NO: 76125 - DNA, 402 bp, Heterodera glycines
atgctcaatcgagccaatgatcaattccttttgtggtaagtcgaaatgacagaaccccccccccccccctatcaacgtaaattaataattacttgacaatttttaaaattcaaatttaagtttcatattaaaaattaaagatgaagaggaataccaaagaaataaaatgagaccacatgaaattgaccagacacgtccagtagctgaagtaccccgcaccaaaaaatatttggaaaatgatcgagccatcaaaaatctgattgaacaatttgatcagtttggtcctgatcagcgtgatgatcaaagatggattacacatttacacgcactgtcatttcgacttaccacaaaaggaattgatcattggctcgattgagcatctttttaaaaaaacaagaaata

SEQ ID NO: 76126 - DNA, 1261 bp, Heterodera glycines
atgatcagggacgtgctgcttgggcagcgttggaagctgtccaatggaccaatggcactggggtaggaaaatttttataaagctaagctttcaaaataatttttgctcaaattttttggaatttttttctatctttcctaagcatgccaaattttacaggaggtcattctgagaaaatgactattacactcatccaaaaaagtcttattccaaacattaaaaatttattcgtttgtttgacgattttcgcaaaaaataaaaaataaacaaacagcttttccttattattagcttaattaagccatatttcttcaaaagtgaacattatttctcattttgtgttttattgcattttctaaattctcattgataaatcaaaaatgtaattatacaaattaaagtaattaaaattatttaaaaatgaatgataacatatcaaaagttgtaataaaatatttggattggtaattaattggttcatttttggccaattaagttggacgttgcttttgggcccgcctgcgattatgtgttggccactgtcacgcgcattctcagtttctatcgagtgccaattttcactaatgccggcttcaggtcgcttcttcttttatttttgactttaatgaaccaccgttttttcagtgaatttttcattgaacagaagagtacagtactgctgaccagggttggaccacttcaggtgcaatcaaaatgtgattactgtatgaaaatcataaactttaattatatcacctaaatcacctactgctaaagtatgtatatgcaaaaagatgacgataaatttaaataataataataagaaaataaccctgctttttgtcatgttgttaggctggcattcatgaaaaatcacctgccaagaatattttttcgacaaatgcataaatataattggtaacacttgtaattcaaaaattttttgtttttttaccatttttcaattttaacacttttttattcaatccatatattttatacaatacatatttttaatatgtaaatttgtcatggttatttatttttttaatttttataatttttatgggaaaacctttttatttattttgtaaaataaaataaaattcaatatgtttaatttttcttccaggatcacatcagcgaattgttggaacggttgttccgtcagtttggttggctccgttcgcgcatgttctacgaaaaacagttttgggagacggaactgcacgaggccggtttctgcaaactgttgatgaat

SEQ ID NO: 76127 - DNA, 857 bp, Heterodera glycines
ggggtcggaaacacaatttttaattttttgaagcttaaggaatacgaagttgacaaaaatgagcgtccaatttacccacataaaattacgagcgccaaagttttggtgaatccatttgatgacattaatccgaggaaagcgacaaaggacgatgagagaaaaaggtccaaaagggagaaaaacgcaacaaatgtcgcaatggcagcgaccaaacggaacacttcgcttttgtcatttggagacgaaattgaggaggaggacgaacaaagtgaacatctgaccaaggtaattcagagctgacaataatatttgtagcccaaacgtgagcgccaaaccgtgagcgccaaaccgtgcgcgcccaactgaggtagaccggaatttttttgatttacaattaatttgccgactcagtaccaaggaaacagcaaaaaaatttcttcaaatccctgataaatgtaacaattttgagacgccccaatcgaatttaatttaattattttataatttaaaaacacttttatttgaaataatttgaaatttgattatttttcaaacacattattttgaaattgtctccagtaaattttcgagatttatgaactagaaattattccaaaatttattaacttaaaaaaattaaatatttttagtgttacatcaaccaaacacttcgtctgttgcgccgacgactgtaacgaatgcacaaaattatgcggcacaattagcagcgcaagcgcaactcgctgctgcgcaggcggctgctgcgggcgcaaacggtgattattgaagtattatttgtgaattattaatttaattgattaattaattagttgaagggtttccaaccaattaataaa

SEQ ID NO: 76128 - DNA, 2643 bp, Heterodera glycines
atgaaggatcgttgtgacgcggaaaaagcatgcaggtcagagccaaaaaatatttttttaattattaaaaaaaatttttatttaatttttttattttttaaagagtttttatttattaaaattttttttttaattttttttagagacccaaacccgatcatcgatggacgtaaagcaaatgtgaatttggcatatttgggagcaaagccgcgaaacaatgcgcacctggccgccttgtccaccacgataaaccaactcccacaactgcaggtcacactttgataattttaaattcaataattttttaaaaatttttttattttcctattttatttttatatttaaatttccatagaaattattaaagtttcaggattttttttattggacacatccaggctatttttttggcaacctggatttttcctgagtccaggtcaagaggtctagacaattttttggcaacctgagttttttctgggtcaggcccaatccatttggacaacctggatttttcctggacctgcctgcaattttcctgaatttttgtgcacagaaaatcctggctctgatcaaaatggaacccatgtccttgttacaagttttttcaaatgtcggactctaaaaagtgttaagaaattttttattttctttctcgaaatttatataagtattaattcggacgtccttggccgtccatatccctttaaaatccgatttaattttaattgatcaattaattaattaattaatttttctttgtaaattttaggccgcccaaatccaagcgatcattcaacttcagcagcaacaacaacaacagcaacagcttagtggacgttttgggtaggttgtcgcgcatttttggttgatttgttgtgataaaaaaattttttggaaaattttaaaaaatatattttcttcagaatttgatgggctatcaaatcaaaaaatgctattgatggaggtagtttaaagtggcgtgaatgaattttttggcatgaatgtttgagtggcgttgggcttgctggcctagagaaattttaaatgcacaaaatttttctcgaggctcatcaaatccacaaatctttcataaaatttttctcgaggctcatcaaatccacaatctttcataagattttcctcggaggctgatcacgattttaattgccaaaaaatttttaaactttttctttctcttaaaatttttagctacatatataacactaaaagtttttttgttcaatttcataatcatgaattcgtcacttattttatgttcaagatcttcttaaaccacaaatttaaataattaaaacctagtcttggatccagggcgaggtagagagagctctagtatttatgagcactttttttgtttaaaattatttttaaattcaatttttaaattcaatttctagtatttttttttaatttttagactttttttttctttatttggccccgaaatgccagcaatcccacgcatttctgtgcatggcctggtctagaatatttatcacaatatatgttgaaatttgaaaattatgaggatgttgttatgagctgaaaaatcatttgccgtgtgccactcactgactgaattcatttttatgcgcttttttcaatttttagtaatttattttaaatatttttattgaattcattagaccataaaattagttgttgttttttgacacttacacccaaaggcgcgtgtcatgtcgttttctattgttcaaacaaaagtggttgtgaatggtgatggtttctgctactgtagtattacaattactgatcaaattgatattgtaacgcattgggctaaaagtgaatgttcgaattttcaacttcagttcagaaatttttgtgtgtcttttggaaaacacatttaaattggattttttctttcataaattctataaaattggtaaaaaaaaaattgtttgtgaacttctgcaggctaaaaacagcaaattcggggttaccgaacaataaataccaagaattgaaaatttaaagaattaaaaaaaattcttggaaatttttacatcctatggccaaacagtttatacttgttggccttcactctttttgtacaagaccatttttttttaaatttttccatgttaatagagattttttcatgagcttatgtacgaacaataccaagaatatttaattttgttgaaaattaaaaagggttttggtccaaaaattcgttcggcggcattttgtccgtcgacgttttgtcctattccgcgatcgaaaatgccaagggtcgaaataccaagagttcgaaattttttctcccgcatttgcctagtgcgcgaaactttgctgggtgtgtgcctaattgtgtgcacccttttttgagggctgaagcgcttttgtggcacaaaaaaaaatgccaaatttcaaaattcgaaaaaatcgattgccgaatttttaaggcttgggtctcatctgtacctgcagaacagcccacttggaccacagtttgcagccgctgcaacaatgaacccattggctgctgtacagcttgcggccgtcgtgtcccaggctcagccgaacacgctggctgcagttgcggcacaacaagtggaacaaagacatcaatttttattatttgatttaaaatga

SEQ ID NO: 76129 - DNA, 413 bp, Heterodera glycines
atgacaaaatatttatgtggttttaataaaattaataatataaatattttaagggtatttaaactattaaaatcaattaaattatttttagatttatacactccaaccttttcatctgctcgactgactcctgaagcatttaaaaagtccacaagttgctcaagtgcaaaaggaatttgcaatggatttaatgcgtaaaattttataaatttttcttaatttaacgcatttttattatgaatttgtaatttatatatttatttgcatacgagaagttatgtttttttattcaaaaaaaaaaaaattaaaacaaaattgaaaaattgaaaaaacaaaaggttgtcaaaatttaatatttttaaatacaaagcttttattttattaaaaaaggcataaaaattaattttcaaaaa

SEQ ID NO: 76130 - DNA, 237 bp, Heterodera glycines
atgtcgcatgaagtgttgacggaaagtgagtcgtacatggtgagaaaattaattaggtaaattaatttaaacaaaaaataatttgcatataattaatttaattaattaaatttaatattttatatgtcttcagcttgtcaattttgtgtctgatgttggtggacaggctggactttggctgggcgcaagcattttaactctttttgaggtcttttaaggataattatttgctattaa

SEQ ID NO: 76131 - DNA, 454 bp, Heterodera glycines
atggtggcacaatttggaggcctttctctgaaatatgtatgcctaaggtaaattaaattaaaagctttcaaaaatatatatattttttattcccatattttcaaatttaaaaatagaagaaaaatttgaaaatttcagaaaatcatcgaaattccccataatccaataatataactttcgaaaaagctcgctctactaattatataataatttttggtttttaccatatccttcattgtcggaggtgaacctacagtaaccgcgccaaccgatggaattgaggaaactttgcgcaaacgttgttttgccgctttcttcaaacgctgactgagtgtctttgaacctgtaaaatgtcttaattttttaaaagttcgttaattagacttttaaacgaaattaaaatttaaaaaatcactctaaatgataagtgcatagtttaattgaattaaataaa

SEQ ID NO: 76132 - DNA, 1169 bp, Heterodera glycines
atggatttctgggcatcaagcgcgggaattccgacatttttgggttcggaccgcccaaatttttccgggtctctgaacttccatccctgctggtatgtgtgtgtatgtcatcaatgtttactccctagacatacaatataacagatcagatatactgtacatccattacacacagtatataaataaatacaatcaataacaattaaaaaaaaacatattttgaacaacaatgtaattaagcattattgtaaatgatcaattgatcaaattatggtgcaattggaatcggggacggtgtactgttgctgttgtttgaggatgggtttactgtaggtgtcgatgttggcgcggtggtgccaaagttcactgctcctcctccgcctccatttgccaatgccctcgttgttgttgttgttgcggcactttcggtgccattgtttctccgccgcgcgttggctcagcgattcggcttttcgggtccgcaccacggacgggccagcaaggctaaatgcggggaaagagagggatttttagacaaaattttttttattttaattcaattcaaaaagagagcagttaagatagagcatttattttattcataattggagatggattattatattttttgaaataattcttgatggatttggttttgactatgaaaatgtgccaaaaataattttttgtccaagcaatgtgtcagtagtcaaaaaaccgactatttttgcctttttggggtcaaattttcaaaaaaaaaaaaagataaacagagggtccgatgatgccattaagctcccatggaaattttaaaaaataataattttaatgcaatttgttaagaaaattgtttgtttaaatttccaaaaaagtttccttacagagtttgggtttttcagagattcatcatgacaccattttatgagtgaatatttttagggcgaaaaaatttaattaaattttttgtgtcaattgaaaattaaaaacaaaatcacctcaccatctgaatgttgttgttgttgtgccaaatagcacgtgagcacctgaaattttgccaatttattgcaaaaaattttacacggaaactcatcaaattattagggaccaaaaaaaaatgttttcaatttaaatttaaattttgccaatgctggaaggaatttcctaaaaaa

SEQ ID NO: 76133 - DNA, 1035 bp, Heterodera glycines
atggcccttatttgggatttctgcgccaattttctgtgttagtcaatcaaaaaggttggcatagccaagacgatttgaaactgatcccgtctcgtttaccattgccaaactttgccataaaaaggggtaaaaatgaaataaataaatcttaaatttccgttttcccaactcctgaaaaattccgggtttttcattatatattcctatgaattttgcattcttgctggcttgagttcattacagaaaaccaaaacgaagcttattaaaaaaaaaaatatttaggtaaaggaggagaaaaacggaaaaattatccctaatactatgaaaattttaattttatttttttattagatgaaaatttgcttttacgactcataaacggaggctttgagcaatgtatttttgaaaaattattatgtaaaataaaaaaataaaaacaattttatagcattttatgtgtggattgaagaacatgaattttgggttgttgcagttgatggttcgtatgtcaagccaaaacgggtaaattattataaaaataacaaataagatttaaatttattgtaatttatttaaaattttaaaaattaaatattttataaaatttacgtgcatttttatttttttatttttttaaaattaaattcctttaaaaatttaacatttattttagtttgattcagtgctaattcatccgggtgaacgatatgatttgttaattgtttctcaacaaaatccaacgcacaatttttttcgaataattttcgaatcatttgaccgatttatgggaaatttcagcactggagaagatcggataaatgttggccttgcgaatttgatttatgaggaccaaattgttggaaatgagtcccaaaaattgggcaatttttcaaatgaaggtgtatttaaatttgaaaataaagaaaatttaaaaaaaaaattgttttttattttaaccgacactttttttccattttaaaattttaattcgtatttaaattttatattaaaggaaattctcaaatttctttttaa

SEQ ID NO: 76134 - DNA, 743 bp, Heterodera glycines
atggaggaaaaatcggcggaaattccaaaatggtttttgaatgctattttcgctgcgttggttgtgttcgccggcgtattttcgaaggaaaagtcaaagtgtggacaaatttggaaaagtaaaggctcaatgagtcgcaccgacgaattgaaaggacggaaagcattcggaaaattggggacaattttttcgccgaaggccggggaggaattggcggatgtcgcagccgccaatcttgaaaatttgttgaaaatcggtaaaagcctgaattttccaaatggccatcgcaggtgtgcgcaagaagctaccgctgatgaatttataaggccagatgaaaagtcggaattccgttttgtccgttgtttttacaggtctgaccctgcaacgcgactttatgccgaaccggtccactgctgacacccttgccgcccctttcaacgcccgaatgcactaccgatgagcccaaagcgctgaggacatcgcttcttagagggcgaggatgtgctaatattgtgattttaaaatatatttggcgttttgttatttaatttgtttcatttttgtttgtgatttttgtggagtgttggttgttagtttatgctgtcgcagttttcctattgattgtcctcgccctaattttatttggaattaaacgataatcatcttcggcattgggctgtattgttttgtgtttgctttgggctgttgtcttttgccgtgggcagtgcaacaacattaataaa

SEQ ID NO: 76135 - DNA, 1496 bp, Heterodera glycines
atgaacaataataataatgttaatgatggtgaaggcggtgttgaagccaatgctggcggcggtgctgttggcggcggtgctgttgccattgttggcggcggtgctgttgctgatgttgccaatgctggagacggtgctgttgctgatgttgccaatgctggagacggtgctgttgctgatggtgccaatgctggaggcggtgctgttgctgatggtgcaaatgctggaggcggtgctgttgctgatggtgccaatgctggagccggtggaggtggagaaatttttaatttactaattttaaattagcatttaatcggggtggtcaaattttctgattaaacatattgatttttaatcaaatctgatttttttacctttttgaatacattttgtcattttacacccctaaaaatgaggttttttggtacctatttttggggtttttttagagcctagagactacctatttttgcagttttagagcctaaaatgtaatccctactgattaggtgatttaggcagcttttttgaaaaattttgccgatttatactgtttttggaaaaatactctacatatttaaaatagagaaatttgcaggtattaacattaaaaggcatgttaataatcccttaatcttaggatgtgactgcataattaaaaaatttaaaagtgcgtttttataccccgaatgaaagtttttatttaaatatgactggtgattgttaggtggtgatgctggtggacgcggtggaggacgcggtggtggtggtggcggccgcggtggtggcggtggcggctgcggtggtggcggccgcggtgctggcggtggcggccgcggtggtggcggtggtggccgcggtggtggcggtggcggccgcggtggtggccgcggtggtggcggtggcggccacggcgatggcggccgcggtggtggcggtcgcggtcgcggtggtggaagtgctgtacgtggtggaggccgtggtggcggtggtcacgccgaccacagtggcaaaagaaaagcctcagcgggtgcaaaaaagggctggaagaaggccgcaaatggacgtggaagggatgagcagaaacagggaggacttagaggcggtggagggcgaggagggggcaatgattgcggtggtgcgggcagatctgtgacaatcaattttttttgaattgttgcatttttgttaaattgttgcgatatttggtgggagttgatgatatgctgccggttaaaggctttttggcaatttttgccctaaaattatcaaaaaagtttacttttaatttcttttttaagtttagtttttaatgaaaaaaattatatttggaaaaggttttcattattttggcaaaattatgaattttgcccaaatttatttttgagttttttttgcacgtatttttgaaactaaaaaattgttcggatgcgtctcataatctaattccgaaccctctgtttaaatctgaatttccaagccaaaaattaattaaa

SEQ ID NO: 76136 - DNA, 1229 bp, Heterodera glycines
attgccaaaaagcctttaaccggcagcatatcatcaactcccaccaaatatcgcaacaatttaacaaaaatgcaacaattcaaaaaaaattgattgtcacagatctgcccgcaccaccgcaatcattgccccctcctcgccctccaccgcctctaagtcctccctgtttctgctcatcccttccacgtccatttgcggccttcttccagcccttttttgcacccgctgaggcttttcttttgccactgtggtcggcgtgaccaccgccaccacggcctccaccacgtacagcacttccaccaccgcgaccgcgaccgccaccaccgcggccgccatcgccgtggccgccaccgccaccaccgcggccaccaccgcggccgccaccgccaccaccgcggccaccaccgccaccaccgcggccgccaccgccagcaccgcggccgccaccaccgcagccgccaccgccaccaccgcggccgccaccaccaccaccgcgtcctccaccgcgtccaccagcatcaccacctaacaatcaccagtcatatttaaataaaaactttcattcggggtataaaaacgcacttttaaattttttaattatgcagtcacatcctaagattaagggattattaacatgccttttaatgttaatacctgcaaatttctctattttaaatatgtagagtatttttccaaaaacagtataaatcggcaaaatttttcaaaaaagctgcctaaatcacctaatcagtagggattacattttaggctctaaaactgcaaaaataggtagtctctaggctctaaaaaaaccccaaaaataggtaccaaaaaacctcatttttaggggtgtaaaatgacaaaatgtattcaaaaaggtaaaaaaatcagatttgattaaaaatcaatatgtttaatcagaaaatttgaccaccccgattaaatgctaatttaaaattagtaaattaaaaatttctccacctccaccggctccagcattggcaccatcagcaacagcaccgcctccagcatttgcaccatcagcaacagcaccgcctccagcattggcaccatcagcaacagcaccgtctccagcattggcaacatcagcaacagcaccgtctccagcattggcaacatcagcaacagcaccgccgccaacaatggcaacagcaccgccgccaacagcaccgccgccagcattggcttcaacaccgccttcaccatca

SEQ ID NO: 76137 - DNA, 1036 bp, Heterodera glycines
atgacgtcatcatggaaagtaaaaaatactccgccccttttcttgttggtcacgcccattggtttttgttttgctttgctaagaatacgactccgccttttggctttttagtttctttttttccgcctccatttttttttgctatttaaccacagtttttctaaataaaaatcattcgtgttccattttttaaaaaattccatcctccttcgttttttccgatcttcctgcaatgaattctcttaaacgctttcaactcccggagcaaggaacacgccagcaagaagagttggattccgttgaaccgaaaaacatcagcgatgtggtcaacttcaattcggccggcgttttttatgttttgggaaaagtgacaaatatgcagtaccgtgtttacaaagtccaaattaattaattaattaaattattaatttttctgtttttaggcatgcccattccgttccaaggggctcatttgtcgccgaaaattgtccgatgataacatgtgtgaggcttgcggccaaaaagcgattgcccccatccacacggtgtttgtccgtcttctgctacaggatgttgaacaagcagacattgctcaacgtgtcaccatgttttcgagtgttgccgaagagtttttgggaatgaaagctgctgaattgctcgccaaggagaaggagccggagagccttgcgaaacatttggacgatttgattgctgtgaagataattgcgaaagtcaacattaaggttgtttttttttgcaatttattacatatttgacaaaccacaacataggcgaacagtcagacttacactggatttgattggattgtcaatttgttcaagaagtgccctggaaaaaatgacagtgatgtgccaaaagaaaaagatgatgatgatggtgacgttgatgagattgctaccaaaaaaacaaagaaaaattgagagagagagagagagagagagagagataacggattcattttgttgtgagcttcaaaaaaaggatttaatgtgtcctttactttttaaaaaatcca

SEQ ID NO: 76138 - DNA, 777 bp, Heterodera glycines
atggttgctgcttttgaacgcttgtttaaacgctccaaatacataccatggacattgttgaccgaccaagggctcgaatttaaggcaaaagaggttcaggaatatttcaaaaataagaacgtgaaaaacttttttatgtacacctcgccgcgaattcacgcagggatggcagagcgggccaaccgaaccatcaaagaacgccgttatcgctatttcacggaacggggtacccaaaaatgggttgatgtgatacagcaaattgtgcatggaataaaccactcgtacaactcaagcataaaaatgcgcccagttgatgtgaattttgagaatgcagaaaagctcagaaaaaaactcaagcagaacgctgttggtgggacagcggaattaaagcggaaacaaccactaccacgtttccaggtgggtgaccgtgtgcgcattgagaagtacaaacacgtgttccaaaagggctacaccggacgcttcaccaacgaagtgttcactgttgccgaagtgcacactgaccgctttcccgtcacgtaccgaatacgtgatgacgacggttccctgatcaagggccgtttctatgccaacgatctctgtcgtgtgctagtgcgcaaaaatgatgatgatgatgatgataccctatatgacattgaaaaggtcgtccgaaagaggaaaaagcaaggtgttgaatacgttttggtgaaatggaaaggctacagtcaacggcacaacagctggattcctgcaagctccatgacatggaaaaatatataa

SEQ ID NO: 76139 - DNA, 899 bp, Heterodera glycines
atgccgcaatttgtaatgttagagccaacggatcaagtaattttatacatagtattggtttgtaaagaaataattaaaaatttgctttatgtcagggctcgggattcgggatttgttctcattttgggcttttttggagggataaaagtggaatttttgttctaaaaagaattggcgggtttttgggatttttgtggtttataaaatcattaaaagacaattgattcggcttcaagaatttaaaaaatgaggttttttatgctaatgaagactttgagaatatttaaaggctgatgcttattcctacaattttgagcaccgagctctgatagttgtaataataaaaaaccaatttttaggggcttttgcctaacacatttttgcttgcctgattttcctttttcgcagccgggcgaaatttacaagatttggaccgaactattaaaaaatttcaagaaactacaaatttttcagaattttttgggcggcgaggagtaaccgaaatagaaaaagcataatgttagcaagaaaaatcataatgttagcaagaaaaagctagttttagcaaattttattaggtaaatgatttttttagaaaaaaaagtttacaatttttaattaaatttaataaaattttatttatattttaggcaaattttactgctgtcctattgagtgagttccctgtcagttttggcgcatcaaatatcaactcacaaatcgtcacaaacattcaaaacaattcatttagtcctttattcatttattatcaaaataataatccgttgtatgtccggtgataaaatttaaataattttaattttttatttaggttccaattttaggaagaagaatttctaatggtcagcgcattggtagcatcaaattcaggcaataaa

SEQ ID NO: 76140 - DNA, 2789 bp, Heterodera glycines
atgaccgaaaatttcaatgaacaacggtccactgctctcatacaaaatggtgatatttgttttgaatatttaaatatttttaacataatattatttttgaaatttttaatattattaataacttatttagagaatttgccggattatcaacaaaatgagcaacgctctttttccattcccaatgatcgttaaaaataaatcttatttatgtttatttaaaaattacattgtatttagacttgactaatgagttgcccgaagattttaatgaacaacgttccgctttgtcagaaaatggttataatgaatttcggatttaatttttttttaattatttgtttttagataatttacaatatgatcaaaatgagcaacaacctgctgatgtcaacagacgtgcggatggtgaactaatagttgtttattattttaaatatttccttaattattataaaaaataattaaagttaattatcattaaaatttaaatgagttttttaaaattttcttataaatattgttttttttgaattgcaggaacagccacaaaatgaacaacaagcaactgtgttttttttgcaaaatggtgaaaatttaaaaaaaatgcaaatttttttaattataaaaaattcgaaaagttaaaccttagcaagaaattttgggtaaaatgtttttttgtttgagttcaattaactaattttgggtgtcatgaactgtaatttttttttcatgttccaacagaattgaaatttttatttttttattaaaaaaggcaataaatgtgaagaagctaaaatgaataatttctcggcgtttcggcaattagcaaaaatttcgaaaattaaggaaacttcatctgcgtttgcttttttgtatctttttaacatattatattcctttgttttctcgtattaaaagcttcttcagacttacaaattgcatttttcaataatacaaaaattgtacggtctgttgcaacaacaaaaaaacagttacggtaggtactataaactaaggatggtcagttggttggactcaaaacatccacccaaatagaaataattttgtcaaaattttgaaataaaaaaaaattctttttttgcaggccaaaaacaaacagatggatgaattgaagaactctcggaaataaaaaggattacactatttaaatcatgaatgtataaacataaaaccaataaaaccttgttaagcaattcgtctaaattaaattaataattgaatccttgtttacattattaaattaataaaaaaaacaattgcagaaaagttagtttttcttggcaaaacgtggccaaattccgctgaaaagctcccgagggaagcagcaaaatgagccaaaagcaattttaattgagctaattgacatttataatgagttgcaattggacgatggaattggggaaaaaaaagttgccgaaaatgtggcaaaaaggggaaagaagaaaatgggaaaatgaagaagaaaagaatgggcaaaaagaacaagaaaggaaaaggaaaaatggagaaaaaagaaaggaaaaaatggagaaaaaagaataggaaaaaatggagaaaaaagaaaggaaaaaatggacaaaagaacggcgatttttgcaattttttgagcggtcattggaaacgaaatgggacgtaaatatattttctgctacggatggacaaaatgaagatgacgattgatggtaattggaaaaagcattagctattttaaaataagtgcttttaataccaaaatatatacaaaaattcagtattttaaattaatttataaatttaaaaattgatatttggtaaattattaggtctaaaattgcctagaaagcgattattcttagtctaaatttgacctacatcccattgaaaaaaagtacgaatggcactcactccctgttttagtcaacaatcacaattttagtacatattttcatattcccatattttcagattttttgagaatttgagtttttttatttaatcttttgttttggtatatagaaaagaccaaattgtcattttaaggtggaaaatgaccatttttggcttaaaaaatatttcataaatttataacgaaaagatttttcattttgaaaacagctgagaatccattttttcatctttttgaggccgtaaatcggaagacctcacttttttgtgagaaatataagcaaatattgattttcctgcattacttattcattttaaatacataaatcattttgtgatgcaattggtcgtcgccgtcggaggcgtcgcaaacgaatgaatgcgcctgcttcaacaaattccaaccacaattcatctgatctgtttttatggatctttttaggtgtgctgttcatcgttgttgtgatttttctcaacttcaactgtcgttgttctcgtccatccgtagtcccaggcttaccacgtccaaatgttatggctttgatgccgccgcaaaatttggcttcaatgccgtcgcaaaatgttgctttgatgccgtcgcaaaaatgttgctttgatgccgccgcaaaatgttgcattgatgccaccgcaaaatgttgctttgatgccgccgcaaaatgttgcattgatgccaccgcaaaatgttgctttgatgccgccgcaaaatgttgcattgatgccaccgcaaaatgttgctttgatgccgccgcaaaatgttgctttgatgccgccgcaaaatgtggctttaatgccgtggcaaaatgtggctttaatgcggccacaaaatgtgactttaatgctgccgcttcctcaggaaattcaaa

SEQ ID NO: 76141 - DNA, 864 bp, Heterodera glycines
atgagcgattggattttttggggtcgtaaaatgtgctataaaattaacttttcatcatcctaattttattaatgctttaaaaccatcgtgaattggactgcctataaatttagaaaaaattcataagaaattcataaaattttacgtttttttaataaaattctgtaaatccaatagaaaagccgatttaaattctaaatgattgctaatctttatctcttaatttccgaaccttagataaaattcaaattttagtaaaaaaaaataaaatttactgttcttttttacggatgattttcgattgttaaatttaaggcacaatttttgtttgtttgaggaagatttggtaatataatttttaaaaaattaatctcatggcgattaaattcatttgttcggcttttaaaatttttcgtagacttgaccatttccaaatttatatttttcatttttcagatcactcaattggaatgccgtctttctcaaaaatggtcacgatcacttggatcgcttttctccttccggtgccattttcaatttttgatcagtccagatcacaattttgttcattgcttttaggcaattttagcaattgagtttgatctgggcggcgccggccaacctaaaatcattcgattgaatattcttctgaaaaccgacccagccaagcgtcacgaaaccgaagtgaatgtcaacaatttttcgaaccaaaaggtacaatataaatagtatgtataaatacaggattccgtttgaatccctaaatggtaaactgggatttcatggtattttgatccagttaatctttgttttaaaaacattttcaaaacacggctttgaagaagattggcgaaattcaataaa

SEQ ID NO: 76142 - DNA, 1721 bp, Heterodera glycines
ttttttaatttccaacacatttattcagggtcgaatttgccaaatggtggccaattcgctgccgttggaatggtgccgaacgaggcatttcagtcgcgaagctgcgcaaacactgctcgacaagatgaaagtatcggtttttttttttattcaattaaatgcttatcccactattttaaattttggcggggggggggggagacggactaaattaccccacatttgcgcctatgtccaaattcgggttcaacttaaattttttcaatcgctgatagcctaagcagttttatataagtgatagaaagttttgtgtctgctaatttgatgaaatttaaaaaataaacctttaaacagcagaattaatgctcctaatagactagaagattgggttttcttaatccccaggcgcaaatgtctaaacacggacggacgacgccccaataaaattagggaaaaaatgggttttagccctatctcgatttttttgttgcaatttaactgcttcacattcatttgcagaagtgcaccgctgccactctgtcatacgttttggccaatttgcacaacgtgaaaaagccggaggcattgcgcaccgtcgaaatgctcaaaatggcgtccattcggttgggcatgtccccggcgaggacaatggccgtggccgagaaattgtacacccggggaaacaccaggtttgggttgatagttttttttttgaaattgcccttcgaaaataggagcaataaaagcagtttttttaaattttgccaatccggcggaacccacgccgccgccaccgattatcccacactttgcgccgatgctcaaaatcgttttaaaaattttagttttttcgaaccagaatagcacaaataacactaaaaaattttttaaactcatttgttagtaattcatcatagaaattttcgaaattatttttttttgaaaaatttataaatttgtaaattttaaaaaaaaattcttgagggggtgggggaaacgtgctgccccttaaaaataaacagtttccctctcaacttgtgtaccgcaacaatttccccagttacccccgcacggagacgtccgcctaccatgacgagtttgagtttgagcgtgttttgtccgcgttggaacggtcgccaacatttgcccgcattgttcggcagattcgctccgatggcaaattgctgcccgaaaatgggacaaacaaaggcgaccatccgccaatcactccgctacgttcattttgtctagatggaggtgcgaaaaatcaagtcaagtcggccgttaaccgaaaaaatggtaaaaaacagttttcacattataataggaagcgaaaaaaaaaattttttttaagtaaattaaattctcgagtcagtccaaaaatgggcgaatagggaaaaaagggcgggtgtaaaaaaagggggggggtccgccggcgaagaggggaaagaggtaaaaaattttgaaattgtacaaattttcttacaaattagaaaattcattaaaaattccaacattttcttgacctcgcaaaatttgccgctgacccccccccccccctccttttcatgcgttttttgcatattattgttaataaatgaatgcttcgtagaagtggacaaatgcttgtacgaagatgcgcatgcgctttacgaacaaattgcgtaccattttctcgccacgcttatgcgcccgtgcaaatacatgctcaaaagtgtgat

SEQ ID NO: 76143 - DNA, 2354 bp, Heterodera glycines
atgatttttccaaaagtatgtctcaaaattacctaaatattctgcttttttctacggcgccgaaaatttaagtcaatttttctaacttccaaattttagaaaatattagtgtaattcagaataaaattttgaaaaatcaaaaattttaccgtttaattgcaatataatccataattttgtttgttttgctatgctttgatttttatatgttaattttgaaacacaattcagctgaaagaagaaacgctcgcgttctacctgaacaaattttgcaatttcgaacaacgaattgacgacgttgaggaacaagtcagagcaggtgtccagcccatcacattagtgaactaatgagctcttaattaggacccggggtagtaggcaatttcgggttcatacatgaaaaagggggtgagatcgacagaatgtttttttggatgggagggggtccagctgccggggagaattttgtgaaattttatgctcggcttttttttggtcttgattctcggaacttttggttttcttttcatcataattatgaaactgaaaaaagctcaaaagattttctgacatccttttttgcggcgtgatttttcgaattttttttttaaatagcggtgctatttgtaaccaatttttgtccaaaaaacgaccgatttttacgatttcatgaatttttattaacaattttcactaaaacaatgtaaaaaatcgaaaaacgaatttcgattttggccaaaattttacgaaattgcctcgcaattccgtacgatttacgaaattgacccgccctcgctttgcccacctaaggagacttcccctttttgaataatattttaaaaattattttgcagaaatttttgacccggccaatccgcgccgtcaatgtttcaaatgtcgtcgtgttatgctaacggttcgagcggtgtttaatcaacagatgcagcaacacatttgtccgagctgtcaggtgtggtgaacgatagccaaaaaacaaacaaataattaaaaaaaaaattgtaattatttataaaatttgaattttttcgagaattacacaggaaattcctttaataatattaaattgaaatatacaccattcgatagcccttttaaagctctacaatttcgctcacagtgactgtttttcgctaaaaataaaccccaaatgaattaaaggcccgcgagactctttctaaatctcaaatttagtattttttggatagaatctgttatcaaacttcactcaaataagctcgccgcaaaaaaatgagaagcaaaaaagagcgtcgattgggtaaaaattgaaaattccgtccaaaaatttcttattttttagtttttcagtgggaaagaaagactttcttgttttttcagattgcccacgagttttcccgaatctcccgccattgaacagatgcaacgatttctcggcgtaaatccagcaaattgcctgatctgatcatttttcgttttactttcattggccctttcactcaatcaaataatttgtccaacaaattccacaattctttcttctttttctgttcgcttgccttcaattacttttttttactcaaattttacgatcacttattatttcactgatcactttctcagttctttttgttcaacaaaatcccaatttttgaaatcattcgcaaatcccagaagaatacacacaaaatattattaatatgtataacttttttctttgttcaccaactttatcaaatatggtatcattcgaaagctttaaatgtttagaagatatttctaagctattcgaagtgattaagcagctcaacaaaaagttgtcgcttgaaaacataaaaaggcagaattttcgaagttttttatctctatctttttttcagttcgatattctctgtaattatttataggcgaatagagcctgtgaagagctttcgaataataccaagattattggattatatcaacaatttaaaaggttatattgatttaaagttggctcagacggagttggcccgttccccccccccccccccccccgctggacgtccttcgtatggaatcgggtcgaccccgcctttgattgcatgtatctgccgacattctgacattttatggggggtggcggcataacggaaaataccgcaaatagacttatattatcttatcattacgtgatgcgacttttagttacaaaaaatcacgaaatagttaattaaaatagtgaggaaaaatacaaaaataatgacaaaatagtaaccaaaagttcgaaataatagtgatataattctcagcctttaggacacgtaaaataagaaaattttattcaaaaagcaacaaaattaagccaaaccaatgaa

SEQ ID NO: 76144 - DNA, 2697 bp, Heterodera glycines
  unsure (1)..(2697): unsure at all n locations
atgtgttttatggggtcccaaattcattcagatgccactgcaattgacggcgtcgctgttggctgcctttgccatcagtgccgtgtctttagccgtccgggcactttggctaatctatgtgatgcgaagcgacgacctgaggcatttggcaatccaagccattttggtgcttgccatgaatatcaacggcattttcattgtgggtttaagtgaatttacgaaatgcgaattaccaaaaaaaaaaaaaaaatggaaatgagtaaattaatcttagacagttgatctgattattaagaacggttctttttgatacttaaaattgcgcaaaatatatacttaaataggtgttaaaaattgccaaaatattgtccaaaatatagaattttgttaaaaaaattgtaatctaaattaatttctttcgaattctagtgaattagttttttgatttctgggaaacgatttttattatccggttttcctatcagatttttatttaagtgctattttgttaaaaaaataattagttgatatccaaatttttaatttattaaaattgaaaaattttgggttgctttggtatcaaaagtgaaattaatcatgaaaaatatcctcaaacttattgttaattagaaatgcgatttccatgcttcttaactggaaagtgcaaaaaaaaaagatcatatacttcaaaatccggtctctcttaataagggattgggatgtttggcttgagaaattccaagggattctgtataatttattntaatttatttatntaatgataaatttttatttcttccttcattaattttggccaatgaatgccccgtcgtccatttcagtacattcccaccgaattggttcaacgacggacattccgcgagacgcgcaaaagcgtggagaatcggctccatttgcaccgggacaaccaaaagcaggagaacattttgctgtccgtgctgcccaaattcattgcgttggacgtgcgcaaaaacatcgaccggacggagccggcgttgcaattccgaaaaatttacatccagaagtacagcgagatctccattctgttcgccgacatttgcggcttcaccaatttggcatcgcattgcacggccgaggatttggtgggtgtgccaaaagtgggcggcacttatcactagggatgggatttttagtgataaaaaatcccaaaataattaactaaatagtgagaaaaaaatgccaaaatagtggcaaaaatagtggcgaaaaagttccaaatttaggggtgtaattttttaaatagctgttttttaatttgaaaataatttaaaattaaggcaaacaattttattcactgattccagttacaaaatattttttagcaaatattgaacaagaaaaaaaaaatttggggaagaatttttgtgaaatttttccaattcttaggggtttatttttgaaaattttttaggtcgattcttatttgttaggggtgtatttttcgtccgcagaaaaaatagttaaaaaactaaaaatcccatccctacttatcacaaaggaaaagcggtgccatttccttcaaaaatcatacaaaatgccattgataagcaattttaaatttgaaataacaaacaaatgggcaatgtaataaattgataaatttttttaaaatcaaattctaaggtgctaacgcttaatgaactgttcgcgcgttttgacaaattggcgcatgaaaaccattgcatgcgcatcaaaattctcggcgattgctactattgcgtcagcggttagttggataagaattttaattaataacaaattttaaataattaaatattttctttaaaatgtatgtttaattttattttttgtttaaggctttcctgaggcgcgtcctgaccacgcggtctgtgcagttgccatgggattggacatgattcacaccatcaagtaaaccatttttaatattgctaatttaaattaaaaaataattcaatagattttagtcactttcttaacagattgtgtccaaaaaatgacttaatgcggaatttttcagcaaaatttttatagaattaataagatggaggctattccgacgggccgaaagcagcgccgggaattttcacaaattttggatgaaatttgcgatgaaaatcacttaacgttcataagaatttattgtaaaattttcagaaatatttgcattctgtcttttaaaattttcaaaaaaatcaatgcctgtccgcggaattcaacacaaaaaatcaaatttgcgaattccgctacgggattggaactcaatttttgcgggacgagatcctgctagattaatcctgcaaaatcccagcaatttccaaaagatgcgaaattgcggactgcgattccgtgcaggatctcgtccccgcgccgggtctaattttgaagaaccatgtactactcacccgtgcttttaggttggtccgcgagctgtacggcgtcaacgtgaacatgcgcgtcggcattcacagtggcaaagcgcactgcggggtgttggggctgaagaagtggcaattcgacataatgagcaatgacgtcacgctggccaaccacatggaaagctcaggggtgccggggtaagaaacaacaaatgaaatgctgatcgcaattgattagggcttctctgagagatggcatttaaatatttggagttttggaaattcaagagtgattaaa

SEQ ID NO: 76145 - DNA, 945 bp, Heterodera glycines
atggctgaaaatgaagccgacgacggaatattgcgcgaattcatctgtgaattggatgagcaattttcacttattattgcagtgttttcaactcacaattataagccatcattgaatttaatcaatgttgatgaggttaaaaaaataattttttttaatgaagtttacattaaaaagggtatgaatatgcatttttggtcgaaattcgccgaaaaatttcagtttgggcatcgcgaaattgggcatgttataagtttcaaaaataaaaatattttaaattgtaaaaaatgcttaacgtataatttaataattaattttaatcaatgtaaagtatttatgaattgcccattcacttacaatggcattaaaaatccttgtattatttgaaaattcattatgttgaaaactcaaaattttatacttttagatagaatatacggactcccgatattttggtgtccttataagctggggggttcgactctaaacccaagcaaaaactaatacacgtttagccctacttttaattgccaagaattgattaaatatataataagattgacaggtgtccatttatttaaaaaatatttaaatttccatttaaaagtgataatttttaagcgcagctttgataatttaaggattaaatcacatcgtaagttatttattttttttatttttaattaatgtcaaaatgaccaaatttccagctgccaaaacttcctgtcatcaaatagtctatattattttaaaaatttttaaaaatgatatcattttttacattttatttctaaatatactttttgtgttcttttgccatttcatacaaaatgggaagcataaataggggggctatttaaagaaagaattttttagaattacgcaaaaattttcgaagatagaactaaaagttatgggagaaaaaatgagccgattttaaataaa

SEQ ID NO: 76146 - DNA, 86 bp, Heterodera glycines
tagggctgtgcgagaagtgatttttacctggaaccgagaaacgagaccgagaccgagaaatgaccccgagaaacgatacgagaacc

SEQ ID NO: 76147 - DNA, 1980 bp, Heterodera glycines
atgccctctggaagtgcgatttggcaaatcgggctttataaaaaaagcaacaacaatgaatttgagtacgaatgtgctgaatgcagtaagaatattaagtgcaagcaaggcaacacctccaatgcgataaaccaccttaaatcaaaacacaaaaacagcgaatatgaggcgaagtatgaagatttgttgaagcagaagcgaggtgagaaagggacaatcgaaacacacttggtcttaggaagtggtacgttatattaaatgtgcatatgtattggttttttaaaatttttaagagggtctttcatcattcgacaaaaaagtaattcattggatcgcatgcacccaatcatctttctccgatatcaacaacccgacaacaatcgcacttttcatgggaaacaatccgttgcacaaattgaaggatgagtcaatttatcgtaaaaaaaaattttgacgatatatgggaaaacctaaaaccatcgacgtcaaagaacttcaaaaaacaaaaataatgccataaaggttaaacaaatttaatttgatgaaaaaggaattgcgaaaagaaagtgtttataaaacgatgacaaatgttcaatttgaatgcgaaattgggaaaaaaaattagacacaaatcgtactgaaattttcgtcttcctactgacatttttttctttaattaaatcatcacttgcttcaaaacttttagttttctatcacatctatttgaatctctttcctccgaccgtattatattttttaatttcaaatgtttttgcaaattattcagtttcgcgtcgcccgcccgcgattccgctgacaatgcgttggcagtggctagggttgtgcgagagtctcggttttcttaacaaaattcattaaaaatcccaaaaaaattttccccgttcaaaatttgacctaaaaattgccattttttcaatgaagtctgaagaaaaatatcaaaattttccaatatttctcacgcggcgcctatcgcggtatggggcgaactccgtctagccaactccgtttaagtagatttcaaaaattgttttctttgttgataaaactcagcaaactcgaaagctttaaatggttagaagattcgacattctctataacaaaaaaatatattgattcatttgtttagacggagttggtccgttccggtctatcggtaccgccggaccccaaaaacttaatatttttttcataaaaaattggcctttttgggtaaaatctgttactaaatcgcacaaaaaatccaattttaccggcgccgcctgtcgggtccgccggtgaagtggaagcccatcgcaaaattggctgctccccccccccccccccccctcaagactccttcgcaaaaattctggttgattgacctacccctttttaatgtgtttttgatttaaaaaagtatttttgaatcaatttcatttaaatttctcggttctcgtatcgtttctcggggtcatttctcggtctcggtctcgtttctcggttccaggtaaaaatcacttctcgcacagccctagcagcggcggcgccccttgcgcaattgacgacttgaaggagatggagctgagtttgtccggcatcagctcgaccatcatccagcagtactgtaaagccatactcaactgctacttccactacgagtcagccccaattttcattttcttattgaatatttttaattaaaaataacaaataaaaattgatttcctcccatttttgtgatggatttagtccgctttcagtgaggttgtccgtgtcaactcagcccaagtgatccggcaaacgctcgagcagggccttgtcaatgcctggcacctcggtgcccacactgatcgccatatccaccgacccgttgaccaacattcgggcacaggccgttcaaatgccctcccccgcttcttaggtctatccgctgggttggctcgtcaggccacgtataccaccactcggctgggcatttaa

SEQ ID NO: 76148 - DNA, 193 bp, Heterodera glycines
atgtgcaacaatttggtttaatgaataatttttcccattaaaattataaatccaggtcggtcgttatgctcatctcggcactccagagaaggttgttgagaagttggtgaaacacgtgacactgctgaatgcccttcacgatcgaggtgtcgaaaacaatcaagaaaatggaaataaatacccaaacttttga

SEQ ID NO: 76149 - DNA, 263 bp, Heterodera glycines
atggcctggacctggctggatcaggaaaaatccaagcctggatccaggtattggttgaactagtaataacatttttgaataaaaatttattagaagaaaatttttttagaagccttcaaaattcttaataattaaatatttttataatttttaccaattttccataaaatgattacaagtctttcctatgcctaattttcagataggcaatctgagaatttaaaatttggattttttttgagggttggaaaaattttttgaaa

SEQ ID NO: 76150 - DNA, 1903 bp, Heterodera glycines
atgggtacgcccaactgtgcagagaaaagcctagtactatctcgtcgtttctctttttctttataatttctctcactttggcgtactatctctttatttttaacaatgtaaaaaacaacttttacttttctccgtctaactttttttctatacgttaaacctacaccaaaatttgcatatcgatagagaaaaaaattctgcattattctatgctcaattattattgtctgtgctcaaactcaaaagttaagaagttcctaataaaaaatattttttaattagattttatggccaaaagaaatttaataagtaaactacagcgcaaaaaaggggcccaggaacgttggaaaaagtgggaggacaagcgggaggagagacgcgcgcgaacggccaaagcgacagaagcccgttgggccacgaaattgagtttttacattcatttttcataaaatatgcaattttcccaaatttaagccgctccccagcccaacaccgatgcagaaacaccacaaccatccgaagatgagccgccgacatcagaggcaccggcgcgggacaacgacggacgaccaccatcaactccaacaccgatgacaccgcaggaaatggacgtgccgtcggtggagatggtggacaccgatgtgcaaatcccttcaacgcctgccgatgaagaccaacaaattcaaccaatgccgtcaacatccacggcacgctgtgacctcatgtcgacaccatcgacttcaaagtgcgccggtgcctttggtctcgatgatggtgagagaaattcaaacaaaaatttagttttttttaattcatttcatttttattatttttaagtccacatgtttgacgagctgcgacggcgccacgtttggaccgaggaggaactgcagcgacagcgccggtcgaatgcctttctacggaaacagctcaaggcccagcgcgaccggtcaacaagccttgagcgatcggcttcggcatgtcgccagcgcaaggcactttccgacgtgaccaacaaccagcagggggacaacaggctgagcgcggcgaatgatctgctcatcacattggacgcgggcatctcgttcaaggcccgtgaagcgttgaagcggtctttcgccggccaaggacatgatgtttgggcaccgacgagagcagtgaagcgtctgaaggcggaactgtgcgaggcggtcaatttccattggacgggcaatggtgagacgcgtgcgctcgtttccgttgacgttcgtgcaatgatcgagggccgtcttcaggatttggtgaacagtggtgagagagagaaaaataatcgaattttaaaatgttaaatgaaggccgactgaaactccaccagcaatttgtctctcaaattgtgttggtgctgacgggtgacaaagggggcgatggagtggcggcaacgacaaagttgggactggtgatcggcaacgttgatcacccgaattcccccaaaaatctctccattttgggtatttattttgggaatgatgaccggaaaaatttggagaacaaatttggctcaatttttgcgcaattgaaccagctgaagaccgtttcagtggaaattgccgggaggaagcggaccattccagtccaaatgtaaagaaataataaatatcaggaatgttagttttaaatttcaggcttctctgtgcagacctcaaattcacttcggcactgatggggcaccagggatctgcggcaaccttcccttgtccactgtgcacagctcgaagagaccaattgtcgaacaacattgtcggtgctcgcccgtcgcctcccccactccaaaattgtacattggccctccccttgtcaacattgctttgacgaatgttgtaccgccgagtttccatcttttgcatggtgaagaaagcgaattaaa

SEQ ID NO: 76151 - DNA, 748 bp, Heterodera glycines
  unsure (1)..(748): unsure at all n locations
atggaaaaaggacggagaagttttccttctccggagccgctcgggaattttccgggggtgagtcgacntgactgaaaaggaggggatggagaaggaaagggacgggaggagagtaagtgggaatctcgggatgaatggggctctcctccgctttagctgtgttacccttggcttttaaagggaacggcgggatccgatagcgagaggcggggtataatgcgattgcctaatcgaagaagaggattattggaaaatcgcgggaaagtgaaggaaaaggaaagggaaaggaatttgtaaaaggtaagggacctaagaattagaaaatgcctgtgggttacataaagaatgagctatcttcttgaaaaatgaacgtattttttgaatattttttttcagtttttgtgacatattttttccatttttgggggtttaggacatattttggttttttggcacatatatatgtgcatatttggaattttttaggacataaaatccagctctgatatgaataacaacagtaactcatcttcgtccgttaatgcatttggagagtccgaccaaatttacgtgtacaccgtatgggtgaccatcattcagcaaattttgtcactttttggcattgccctaaacagtgcactcgtctatatcaccatcaagcacaagtcagtcactagaattgtgttagcattgttttgaaatttcgttttgaattgacgacgttatttttaattctaaactttaatta

SEQ ID NO: 76152 - DNA, 316 bp, Heterodera glycines
atgaaattaggaaactccaccgaagtttcggctttctgttggccatctgttctttttgtgatgcactcactgaattggccactccattggctaccggtaaaataattaaataattttatttttattattattttttaaatttttagttctcgtttttcttcgtgtgcggattcctctgttgacttgtgtttatgcccaattttttgctttcactggaagtattaattcatttataaatctgttttggataagcgttgatcgatttgtggcattggcatttcccgttttgtaattatatcaattattattaagaaaa

SEQ ID NO: 76153 - DNA, 473 bp, Heterodera glycines
atggtctattgtgagcctggtgatatgattcaaggcgaagtatttttggttgcttctcttatcatggttatttttactttggctacaattgtcatttatattataatggggattatgttaaaaggtaattaaaattaaatgacttacggtggttgttaaaaaatgcattttgatttcccagtgatcagaagtgatcagaacaacagcaacaattcgtcccagtcccaaattgaaatcactcgtcgcattttcaaatcattggctgtgatcatggcagtgatcttttgcttttggtttttgtttgcactgatcaccaacattttggcacgaggactgatcaccattgagccatcactgcaatttcttatcattcgattagcagcgcaaatggtcacaattgctggagcgatcaatgcaccaatcctatatatttgcaggcaaatttagaattaatattaaaaaaaactttttta

SEQ ID NO: 76154 - DNA, 873 bp, Heterodera glycines
atgatacaaggggaagtttatttgctcgttactcttatcgtggttatttttacgttggctacaactgtaatttatattatcatggcaattatgctgaagggtaaatttaattacttaatttctaaaataaattttaaaatagtttttaattgtcacattagtaaaacaaatgaatctttgttgctcaattttcagtgatcagaagtgatcaaaacaacagcaacaattcatcccagtcccatattgaaatcactcgtcgaattttcaagtcgttggctgtgattatggcagtgaccttctgcctttggtttttgtttgcactgatcaccaacattttggcacgaggactgatcacgagtgatccgtcactgcaatttcttatcattcgattagtgatgcaattaaccacaatagctggggcgatcaacgcacctgtgctttacttttgcaggtcaataaaataaataattaaattgaattaaaaatacccaaaataataaaatgagattaaaaaataaaataattaaattgaattaaaaatattcaactataacattcattaattgcttttcgagtgaataaaaaaacttttattttttctacgaaaaattttgttgccagaaaactgaattagtaaaaaaaatgaaaatacattaatatcactaacaaatattcaatattatttcatttttagctctgaatatcatgaaataatgaaaaatgaatttccattggccaaatttttactgtgctcaaataatcataattcgccagtcgttgttgtagctgtcgggcaacaaattctcggttctcccaacatacaagcaaatgcatcataatagaagaaattttgaaaaattttaatttgtcata

SEQ ID NO: 76155 - DNA, 1845 bp, Heterodera glycines
gtcagtcctcgtgcacccacccgattcgagacgggcattcgcctgttcagcacggtgccggcctccaaagtggtggacttttttattgcattgttgcgccatgcgcggattgctgattctcgggaagacgagccaacgacggcgtattttggggatggactcggtgcggaacacgtgcttgttcaagttggtcataaaatgagcgaaagcgaaatcatcttttattttgcagagtttctttgtatggttagaaaatacggagaagcgaaaccgcaaggggttgccatcgtcaacgacggcgacaccaaatgccccagcgacaacggcagcgagtccgagcagtactgctgcagcagcgaaggtgcgactagcgaccagcgattgtgacgggttcagaccgtcgcagcgaacaccgacgccaccacggaaaggtggcggacgagcgaagcaacaacgacaccgagccgtaactgaagagcaacaacaccaaacacagttgcggtgggagaaggggacgatggtggatcagcaacagcaaaccgaatttgctaataatgatgaagacgggaaacagcacaagaggaacgagcaacaacagtccacccatttggaagcgatgagcgacaaacttcggaagattttgtgcgagaatgaacagcagcacgacgaagacggacaaaaacagggagatgaacaaacgcaattacagaagcagattgaggacgacactggggcgaacgatgctgggaatggggaggaggtaacgagaaggaactaatcagcagtactgatggagcttctggtttcaagttaggggaaaacctgacatattttactgcatagcgagtcgtcgcgaatcgaatggtatcgcctgaaactgttgatccatttcagcttagttttaaattgaaaacaaaaatttggtgtataattgaaaaaagggggagagagagggtggcccgatcgcctgacagcttacgaataaaaacgctagggccggttcggtccaacaaaaaattgtgtgggccaaattggagtttgtcgacctttgttttctcaattggtgaccttccccacccctcctctttaatctatgaattacactgtttcttcatcctgtaaaattcatgtaatccacagggcactgttcacactgctgccgctgctggcaattccatcaccaccctttcccctcaacttccctgtctgaatcgcgttctgatcacctctttccatcgcgatcagcttgtgacactgctcgccccactcagttttccgccacggacccactcaaacatttggaagacggtggtcagcgtgttggagctgaagcacgcaaaatacttgaccacttttgtcaccattgtcaaagagatggttcaccaagggcaaattgggtgagattttgtcagtttttattcatttgcacgtgtacattggcataaaatacaattaattgggcaatttgtagttttttttttttgatttcagtttcgatttactcaacttttgcctccagcatttcgctgataaaatgcatttcaacgttcaccatttggtccatgcgttgttgttgggtccattgtgcgcagcaacagttgaacaatttgcggccaatcagagcgacgactttcgggcacaatcacgtgccttactgcttgaagttgacggggcgagaaaatggcatacaaaaaaaaaatctttttgaaggctgagtcttggaaatacgatgagaacaaatggcgggctgcctccttagcttacgcacatcgaactcatgaacagttgcccgacttcaaggtgttttgctacaacgttaacacactgatgaacgagctcaacatg

SEQ ID NO: 76156 - DNA, 492 bp, Heterodera glycines
atgaccgcttctaccgcagtgaatccgtcgacccttttgccgttggaactgatcgacaaatgtgttggttcgaaaatatgggtgatcatgaagaacgagaaagaaattggtcagtggtcaaattttttcgaattttggctaggcttagaattggttgaagttggtgtccgcttcgtattcagtggcaaaaaagccaggggattttttgccaaatattagtttaatccattgcaaattaaaattaatgaaaatgatgctttttcagttggcactttggtgggctttgatgactacgtgaatatggtgatggaggatgttgtcgaagtgagaggcgtagaataattcatgaaaatcgatttaattgctgttaatttattcttttagtacgaacgaactcccgagggaaaacgggtgacaaaattggacacaattttgctgaatggcaatcacatcacaatgctcgtgccgggcggagaagggcccgaaatttga

SEQ ID NO: 76157 - DNA, 580 bp, Heterodera glycines
atgcgctacccggacacgggagatgaggaggcagaaaacgcagcgcaaggtgaaaaaaccaaaatgaaaatgaaatttaaatttgaaaaatggaaaattatttaaaaatctaatcaaattttgcgtagaagatttgctgatcagcaagaaaaagaagagcaaggaggatcaggaacaacagcaacagcagaagggcggaaatgcctggctaaagagtcatgacccggacttgcccgcctcgctgtcggaggtggaaaacagttcatcgtcagtgatcggagcgagacgaaaagcggaagacgacacggcagagagtggggagatgggagagagtggacagcaggaggagaagaagcagagcagcagaggggaagagagtgggaaaaagcgagagggcggcaggaggaaaaagacaaaatcgaccaccacggaggaggaggaaagtgaggaagaggaggaggaggaagagagtgccacgccgttccggccacgcccttcgaccatcatcgggttccgcaccattcagccgatgggcaccggtcagtgccccgagcaaacggtgttggcgccaacatactag

SEQ ID NO: 76158 - DNA, 1315 bp, Heterodera glycines
atggcgccccacgcgacgacgacgccgcacgctgacgcgccatcgcccgccccaccgccggaccccgccgcgtcgccaccgcaaccgcagcgcttcgagacggcagccgcgtacatccggcgcaaaaaccgcgagcgacgaacgcggaacctcacagtggcggtgacggagttgtgcccggtgcggcaggacgagtggacgacgaggtgcacaagcaaaacgactggcagagaacagcatttggcacccaattaagggctaatgtgccacgttttagagctttctatagcgaattgcaatccccggcattaactgtaaaaggaattcgttgtgaaaatttattttcgtttggcatttttttaattttggtgtgccattttttctcagtttttgtgccattttctgttttccttttttttcttatgtgagaattaaaactggaggaatggggaaaacattttcaattttgaagcataaatttttcattttgattactcagatttccatctgttgaccagcccgactatcagccgacttcgccgggcggcggcggattggccaaccgacggaagggaagcgtaggaggacaaagtgaggaagggaggtaattagggacagacagattcaagacagattcattatagagcaattcattagggagggaggggaggggagtgattaattaaggaggtgtaattaggaggtggtcaattaattattaataatgtaggggataattaggaggtagtcggtcaattaattagctttatttcgtcatttaaagaattggatgctcagacatcgcccggcttgggctatcagcgtccgggttatttggacgaacgcaaatacggcggcggcgagtcgaactttccacgacaggcaaagccgacactttatcttaattgcctcaattaatgatattaaaatcatttcagaattacgtcgatcgacgaaagtctttccacgaaatgtcgccgccctcgggcgacgagccgccgtacgaccggtacgcaattgccggcggttatttcaactcattggtcggcaacacgcacgtgccaaacaacatcaggcaattaattctatttgaaaattaaaatatgagaggattttttctcccttagccgcttcgaggacgaagtgtacaacgcgttcaagcagttcggcggtggtcatggcgcatggaaccgagggcaggagaaagagcgattcgaagtgtacaaaacgatggcggaacgatcggccgaatttggacgcagcgagtaagccaatcacagcattatattccactaatagcattgcagggtcacca

SEQ ID NO: 76159 - DNA, 1438 bp, Heterodera glycines
atgattggtgttcgcgcattgccagagcttcgttttagtcgtaaccgtgtgttgcgtcccgacgcgcaaaaagttagtcggattatttaaaaaaaattaatcttacaattagctataatcgtttaaattgcgcttttaaagggtgactggcgccgtgacgcgggccgtgcggaatatttgaagacggaagaattggccaactggctggtgctttgtgcacgcaaccgttttgacactgcccaacagtttgtggaacgtttgggtcgcatgggcaacgaaaagggcattccgattgcggagccggagattgtggctttcaacagcccggatgtgagtaacaaattgggaacaaaactactaaaaatggcatactgttgcccagtatatcttttaacttgggatgggatatagaactcgatcccaggagtggtttatttgaatcttacaagcaaagatttcaattttttcaagccttttctggatcatcagcagatttttacaattcattacaaaacgctaatacaattgtaattttgtcttttcaccaactacattgatgctgctgtaattctgacataaaaaaagaaaaaaccgcttttcgaatttagcaatttcaactcaaatatttgtctgtctggtgattgaaaaaaggcaaccattaatttgcatgacatgttttaatgtttgttttccttgtcaagaactcggaccgagaatggatgacgatgttcgagcgatgcgtcaacaagcacatccaattcatcatgctggtggatgaaaagcgcaaggacacccacggactgctcaagctgtcggaggcaatgcacaaagtcaccacgcagcatgtgacgctggagaaagcgaatgtacggcggtttaaaaaaacgatggatttcgcaaaaactgaccgacgacaaaatggcactccctttttaaggacgttgtgcggaagaaccagcgccaaacgctggagaacatcctgaacaagctgaacatgaagaactttggcctcaactacgtgccggtgatggagccgtcggcgtgccgtcgcttttcgctcgaaagcggaaatgtgcttgtggtaagataaaagacagaacaaatatacgcaattactaaaatgggtttaacattaaaaagactccacacacactttgaatttgcggttaatttgataaattttcatgataattattctataaatcctaattaattagttactaatttttcccctttacagatcggctacgatgtcaaccatcctggtatgtgttacattattttctcaaaagaattaattgaaattctatatgatcatgtttttctaaccaaccatttgttcttcccgtacgtagctcccatgccgcaacagacccgtcgtttgttggcatcgcagggcgaatcgcaattgagctcgcttgacccgtcatgtgtcggg

SEQ ID NO: 76160 - DNA, 120 bp, Heterodera glycines
gactcagctcgccgtgaacggtcgtcgcccgacagcggtggcggtgattattacccgccggagcagcagcagcgcggcggaccaccgccgatgcgggctgaacggggcaatattggcgag

SEQ ID NO: 76161 - DNA, 751 bp, Heterodera glycines
cgaagtttttcacggggataatccgctttcggagccggaatgtgcaaatttagccggctttatgcatcagcatttgccacaaattgatgcctatttgacgctgcattcgtacagtaatgtgctgatgcatggctgtaaccacagtttgataacggaatgggttcgtttgaaatttaaaaaaaaaattaatttgttattgtattaatttgaaagattttggcaatttatttctaattgaagcccaataatttgaattgaaaaaataaaaataacttaaaaaagtttcccaaaaatcctatttgaaaatttactattaatatttgcattaaatattcttatttaaaaatataatattttttacaattagcaaagagttggaaatgaaatggccattgccatcgaaaaagcgggcggtgaacactttaaagttggctgtggtgatgaaattttatgtgcgtaattaattaatttaattaataattggatatattttttgggtttttcttcagatgccgcgaccgggagtagccgtgattatgcgcaaagtgtgaacataaagtatttaaataattaattaatttaattgtatttatttagcggtaattttttgaaagaatcattatccttaggcgtagaattttgaaaatttttattcttttgtgtttcctacattttttcttttgatatttttcaaaagttgacattttttggttaaaaaccccgaattcagcgaaatttatcatgaaataaa

SEQ ID NO: 76162 - DNA, 416 bp, Heterodera glycines
atgccgcgaccgggagtagtttgtgtacccggaaaagggcataaacaaattggccaaacaagtaattaaggacgaactaattaacaattaaaattataaatttttaagattttgcctgcccttcaaattttggcggaagaagttagcaaaatgacatgatgaattcattaaattagtgctgatgtgaaatgaaatacctaattatcagtgaaatatatgccctatataaaattgcacagactgtcaaaaggttgcgggtatcgctcgcccatcccgtgcctatgaaggagtacagtctttgaagtagccgccccaaccccaaacctggttttaccgcaaaagcccaagccgataggaagggagtcctttgaaccaaacctattcgactcccttatgaagttgccgccctaattaaa

SEQ ID NO: 76163 - DNA, 658 bp, Heterodera glycines
cacggattagggaaaatgcccatccgaagggattttaattagggcggcaacttcataagggagtcgaataggtttggttcaaaggactcccttcctatcggcttgggcttttgcggtaaaaccaggtttggggttggggcggctacttcaaagactgtactccttcataggcacgggatgggcgagcgatacccgcaaccttttgacagtctgtgcaattttatatagggcatatatttcactgataattaggtatttcatttcacatcagcactaatttaatgaattcatcatgtcattttgctaacttcttccgccaaaatttgaagggcaggcaaaatcttaaaaatttataattttaattgttaattagttcgtccttaattacttgtttggccaatttgtttatgcccttttccgggtacacaaactactcccggtcgcggcatctgaagaaaaaacaaaaaaatatattcaattattaattaaattaattaattacgcacataaaatttcatcaccgtgtgctcatagtcgtcagggtttacagatggaatctcataaatatcaagttggtcgagaattgaatgtaatattgtcggttgcgagctaaaaaaaaatataattacttgattaaactaattaattaaacagaatc

SEQ ID NO: 76164 - DNA, 414 bp, Heterodera glycines
atgaccaccgaacaacttttaaaaggggttaagatgggaattgagctgaagtttggttggcggggggtgccgtcacggcaaatgatgcggtgggacattggcacttttggggagatttggcactctttctgcttctgatggggtgggcgagggcaagggtaagcagattatggcctaaaacatttaacggatcaccccgtggggaattggcgcaccctccgcacaaaatgggcggggaatggcaaagaatgggggaaagggagaggaaaagcagccaaacgacaagctaatcgctcaaaaacacattcttgaattgtaagttttaagtttaattataattcagagcggaaataaatttttaaaattaaaaatgattttaaaattctaaatattctttcatttttgagaatttca

SEQ ID NO: 76165 - DNA, 2400 bp, Heterodera glycines
agttctgacgaaagtattgtgaatgggcccaacacatcgtcggcgtcaatgtccgagtccaacggcacggcggacgggggcacggctttgtcaccgccgccgcaactgccgcgctttgacgaggacacgcagcagcaaatggtaaatggccgggggcagatcaaatcagttgatcagacagtcaaataatcacctcttctgttctgattaaaaaataattgcttctgatcagaatgtatgtccgcatttgagaaaaaaacacttcatacagtatacttttacttacaatactatcttactttcgaatttcttttcgttctcagggactttaaagtttaaacactttataagcccttttgcctctttttctgttaatacacttttctcattgttgttgatcagtccgtccgttctccatttttttccttaccaattagctgatcagcaattgcactgtcgttggcccctcttcgtcctccgaaaacgccgcccttttccccgcccatccgttcgcccattttggcacttccgtcgaccaatttgaccatactttggcccatccgtcgttggccgcttttctcgaacgctttgtgctgctccaaaatcgaacattgccaaacattctgctgacggaacagcagcagcaaaagggcgaaagtgagcagcaaaagaacggtactgaaactcctccggcggcgaatgcgacggaaaattggccaccgaaacaaacgaataacgcggacaatggcagagagggcggaaggccgggtgagttagcatcagggaaatcgaatgttaaattagaagagaaacgaacgattcaactcattggccttggcatgtaatgcaaaattattgaagaggcaaatgttttcactgctatggccaatccgacggacattggccatggctaaataccctcaaaatgattattctcttcaaatggatatgtaatttataattgttcagcgtccgacacaacgacaaaaaggcgtcgaacgcgaacaaatttcaccaattggcagctgaacgagttggaaagcgcattcgaatgtagccattacccggacgtacgaaaagccaattaaaatgcaaaaagaataaattattcaatttatttattggtcttcaaaatgcctttttaaggtttacgtgcgcgaagcacttgccattcggcttgacctgctggagtcgcgagtgcaggtggccaatttattgttttaaaatttaaattccaatttaaatctgctaaattggggggaatgaatcaccactttttatgcaaatcattttccaaattcgtcattctcttcatttctttccattgtttctcccatctcatttcttgcatttccttcactcttttaagcgaatgagtgagatttgttggggggggggggaagcgatggatgacaaattcattcaatttgatgggccattaatggatttcgaccggcaaagagttatgagtggcgaagatgcgccgaagagataaggcagcacaaatgggccaaatttagccacaaataatcgaataataagccaattggacccccggggcgaaacaatcggcggaaaaagggcaaaagatggtggcgcaaaacgccagagggggggggggggataatttatcataaatcagcagaagcaagggttataatttgaaaattggaaagcgaaatgaagcaattaggcacagtaattgaggaaaaacaaaaaaaagggaaatgcaattgcaaaatgaaagggaaaagcggcggggggggactttttttatcattttgcaaagttaaaaaattgtttaaatatttcaggtgtggttccagaaccgaaggtgagtgattttatccatttcataaattaggacgaaaagccgattaattagggcaaaatggcgcaagaaagaacactgtgggcacggattggcagcagacgaacagaaacagcagcaggaaagagtggcggagggaggcggagatgaccaaacgcagcagatggacgggacgacgagaagaagcagttcaacggggacggagagagcggcggacggaggcaaaggaaaaacgatgccattctcagttgaagcattgctggcagcttcgaggtgggcgagcgagcaatgtggcacaatcccttggcactgtcagaagagcgaccaacagatggcaacggcacaatgatatcattgtgccgtcaaactctgagtctccccccctcccgcctcatcccatgggaatttgttttaaaccattttaatgcaatgaatcatatctatcaaaatcctcccacagagtgccacggggacggcgtccgaatgccaaatacccgcgggtgcaggcgtgcaagggcatcgcccctttcatgttcccagccttcccgatcactcagccggtcggccaa

SEQ ID NO: 76166 - DNA, 1542 bp, Heterodera glycines
atgcagggcacaggtgccggtgccgcgtgcggtgtgccattgcctgggatcaatgtgcatgccgcttggtacaacaatttggccaagaaacagtcatgtggcaatggtggtggtggtcatggaagaaatgttggcatctacgtcaatggcagaaaagtgggcgccggtgctggtggtgccattggcagcagcatagacgccagacggcgccaatcggtggcacagattggcaccactggcacggcaccaacattgaatgatcatctacagcctcatcaacggcatggaggaggacgacgagcaataagcacggtgaaccccccagcaggtagtcaaagctgctgggttttgttcaagactcttgagagcttcatacgtgaaataatttcggctattatggggctttataagaccagtgatttctgggctataaaccagcttaacacaggataaacctggatttggttattttgggcttttttatgataaatgcctgatcatgaagcctgtcctcgggttttttggatgcctgatcaaacttctatttgaccctaacaaaaaaaaaaagtcataatccagaaaatttgggttttcgacttttgttcgagttcggcttagggattagaaatttgttaaaatagatgtcagattaatgatcagggatcccaaaaagacttgggaacgagaatttcataaattattaccataaaaattttttgcaaaccaaaagggtacttccccccccccctttttttttgagggtacactctttataattaccgttagccaaatttattattaaaatccatttttaaattgaatatataaatttgtttttgttttttcagcatttcccatcgcaattgtgcgcgagtcgtcgcgctgtgttggcgttgcgcaatttcgtcgccatcaaaccgagtcgcaaccattgaaacagcaaccacaaatacatcaaaattccacagaaactgatgaaacagtggccgaagaatgtgtggtagacagaatgccaccacagcaacaaatttctaccgaagattcatttgacacaaattcatcatcaaatggtaaatattggattaaaaagtgctttcataaatttatttatattacatattttgataaataatttttattctaacaaaatttatttcaaaaatttcatgctaatatattacaaaatattttatttcaaaattttaattgaatatttataaatgttattttttttatttttaaattcaatatttattaaaactatttaaaaatgaattaatttttatttttaattattaaaaatttaaaatgaatatttataaaaaaatttttaatttttaaattaaaattgttcaaaattaaatttattaatgtttcattatcttttatagaaaattgtcgcatttgtcctgaagaagctgatcgaaaacggtccgggcaaagcattgcaagccgaatgtctgtttggagcttgcgcatcttcagcggacaatggagagtcagctcttttttttatctttaaaaaattttcattaaaatata

SEQ ID NO: 76167 - DNA, 806 bp, Heterodera glycines
atgaaaattcggagcccacgcattgttgccaaattcatcaccagcatccaaattctccaatttgtcatctccgtttacatcttcacccacattgtgtacattaagttcacggatgtgctaccatgtgatgcgaggtgatgcaattaaacattaaatcgaaaataattttatttatttgttaaattattaaacaatttttaatggtcaaatcaaatgggatcattggaggttaaaaaagtgtggctagcgtttgcaatttgtttgtagaattttttgacatcattcgatagcccttaagtgtttttcattaaactacaaaatttcaaaaaatttcatttagtttcaaaaaaaaaaagttatgaccaataatgtttgaaaatcctgattttttgagttcttctgaccataactttttttcgaaactcaacaaaaatttgaaattttgcaggcaaatagagaatatttatggctatcgaatgatatcaagaattaaaatttgtttactcttgagctaagttatgaattatttttgtcaaaaatattaatttcacaagacaacaaggacgtccttggttggtgtcataattggcaacaaattacaataattttatttaattagtgaaatttaatttgtttttaattttagttggaatgttttgtctcttggcggtctgatgtatctttcatacctgtatttgtttgctcaattcttctacgactcatatatttcgggcaaaatgaagaagcgcagtttggcaaccaccagcagcagcaatgccatgacggaggcgaaaaaaattgaataa

SEQ ID NO: 76168 - DNA, 103 bp, Heterodera glycines
atgcactcacaaatacatgacagtgtgcacgctgaggttcaatgccaaggaccaacggcaccacgcttgtttctccgcataggttatggtggcgtagaggaag

SEQ ID NO: 76169 - DNA, 494 bp, Heterodera glycines
gaggacagtgacgagttgcgcagtgcccagtcgagcagagcgtccacctcccgccaacagtcgcaacggaaagagacggcggaaaaacattcgcaggaaaagcagccccggggacacaacgagcgggaggagcaccaattccctgcgcctcctccccattttgcgcacccttttcaattcgttttcacgaatcgacaaagcgccaacacattcagtctcagttcgggcgcaaaagtcgacgagttgagcacgccggaggaagagagtgtggtcgatgaggagggcataaaagagggagagacgacggggccgccaaaagtgccgccactgaaattggaggaattgtcgccggagggcaaatcgccgtcggaagtgaaaacattttggaaaatgtgcattatgaaaagcaatgaaacgttcagaccgatacgtataacagctcattgaacatggacactgtgctgatacgagaggaagaggaggaattaaaaaag

SEQ ID NO: 76170 - DNA, 170 bp, Heterodera glycines
aaaatcaaacgattatttcttaaacagttaaaaagtgttcaaaaatatcaaagatgcgatgattgattgttgttgttattgttcattattgcccttcagaatggagaatttgtgcagtccattgttcaaacacagcaatgtgtggaggcaaagaagtttgacgatagact

SEQ ID NO: 76171 - DNA, 280 bp, Heterodera glycines
atgacttttttggtaagaaaaaataagatatttcttgaagtattgtattaaatctgacaggaaattgtatgtaaagtttgaaatgttgataattttttctagagagcgacatttggcgaaaatacggatcaggatcaggactacggactaggcatccatacggactacagacttacggactaaaaccccggaaaacccttactccgtataagtccgtatgcaggaaaaatacggacccgtatacggatcagggttttttgaaaagtttttaatcaataaa

SEQ ID NO: 76172 - DNA, 559 bp, Heterodera glycines
acgggcgactgcactctttttggtgcacgaagcgaacgagtcggacgcgggcgcataccgctgcgtggcgaagaacgcgcatggcagcacgaacagcgcgtgccaagtcagcgtgaaggcattcaaggaggaggtgaagaaccatttgacacgagactcacgagcatggccataataaaatgccgtttaagccgaagaaagagggggccgagccgagcttcacccggggattggtggaccaatacatcgaaagggtaccattgggaggaaattgggataaataatatttaaataaatgatttaaaaataattttaaatgaataaaaatataattagaaaataatgttgcgaatttaatgagtgaaagtgaagaaaagttttttcgttttcttattttattgaaatgaatcaaaatttaaattacttacagaggtttatgggatttacctaatctttttccagggtgacactttggtgtttatttgcgctgtgtcgggtgatccggcgcccgaaattaaatggttttgcaacggcaaactgttgaagccgtcggacaggt

SEQ ID NO: 76173 - DNA, 1072 bp, Heterodera glycines
atgcccgagttggtgtggtacaaagacggcgagcaggtcaggccgtccgagcgcgtgcagttggagcgggacgcagacggcaccgcgtatctgatcattcccaagtgcacgatggacgatgatggggtaggagtggcataattcttttgctaattagtcaactgagactaattaacgatataaaaggtgtaccgagtgatcgcaaccaacccgcacggtactgcctacgataagtgtacggtgacagtgaaaaaggcggcagcggaggagggcccgacaaagcatgagggtgccaaggagtttgaagcggccaaagcgccaaaactgttggaaccgctgcaaaatgtgaaatgcccggagggcacggagtttgtgctgcggtgccgtttctcgggcgaaccgacgcccaccgtcaaatggtgggcaaaaagagaaggggaagcggtcaaagggttgctaattatgcttttcccctttcttcaggttcaaggacggcgaccgactgtttccctacgagcgaatgcaaattgcggaaatgtcgccggatggctggtgcgaattgcgtgtgcccgcctccatgcgttccgattcgggcaattaccgatgcattgcggagaatccatacggcactgcgcgtagcgcatgcgaagtgaattatgggagggatattggcatattggtggtgaacagaaaaagccgacaaatatccatttggacaaaaaatagtgattaggaaggcaactgatcaaagtgattgatcaattagaaaaagtttaataataggagaaaacactccgttggcccaatgttgataattgattagaatttggaaaagatttgaaagtgatcaatatttttgcaaattttggttaaatttgtacaaaaaaatgggaaaaattgactggcagctcgaattttaatggaattaattacatttttattgtttgaggtgcaagtgcaacgcgaaaagaagcccaaagaggacctgaaagagttggccaaggaatttggccgtgccccgggctttacaattccattgaccgtaaaacacgccaagccgggcgacactgtg

SEQ ID NO: 76174 - DNA, 205 bp, Heterodera glycines
atgatgaaaaatgtaatagacgaacaaaaaaaatcatcaaatattaaaaataacgaaacacaagaaattaaaatgctattgagtttacgcaaaggatttgatccaaatcggtacaatgtccaacaaacaaatgaagttgccgcaattattgtatgtaatgcaaacgaagaaataccagctgcaaatataattgttgttgaaaaag

SEQ ID NO: 76175 - DNA, 944 bp, Heterodera glycines
atggccgaaatggaagcgcaaccgaacgtttccccgaagcagaaatatcgggacttgaagaagaagttcaaataccttgtttatgtgggtcaaaaggggaaaatcactttaaaattgaaattcaaagacaaagcgccggcaaaaaagtaggaatttatagcctttggcggtgccgatacgtcaggagatttttttgaaattttaaagatattttaaaaaatgaatcaacaattttacctattttttcttggtaattttgaataattgcgggccgagaatttatcctcccgccttaacaaacaatttaatccaggagaatgaatattaccaagaagagctaaggaacctgcagcggaaattgcttaaactgtcgcgtgacaaaaacttcctcctcgaccgtcttggccaatatgaacagctcagcgagtccagcgacgattcggacgcgtcgacgaaaacactcgaagaacgcggagtcacaaaacagaaaaggttattgtttataaaaagctgaaaattgagtggggagatgtattttggagtgaaataatttaaaaaaattaaggaagccgaagccttccaacaaccgaaaaagggcagccccaaatccgagcggagggcccacaggacaaccgaagcgaatcggcaacaaaacgacgccagcaaaatgcaaaggttcatgtttttgccatttgataacaacaaaaaaatgcaaaccaaaattggtctacatttggttcggtttttttaaaaattaaaatttttaagggaattaaaacttcaagtattttttattttaatctgaaaaagtgtcactttttcgtttccccaaaatttcctcaatttttagtttctggagacgcgattcgaaagaaatgatgcgaaatgcgatcgagccgattcgattcgcgagtgaaggaggaaacggaccgattcggaagtga

SEQ ID NO: 76176 - DNA, 1699 bp, Heterodera glycines
atgatgcagcaacaatcgactcaggctcaacattcaaatccgtctcagcaccttcggaacactccgcaaagtcccgcagcgacggcaccgccgacgtcgagtcaaagccaacacttccaacagcgaccacacgtcgcataccatcagccaccacagcagcactatccgttgcagcaggagacgaaccaaagccaacacatccgtccccagcctggcgtaaggccggcacatccgcagcaacacccaaccgagcagcagtacccatcaatggccgggccattgttccaatcgcaaccgtcgagtgtccaagcccttcaagagcatgagattggcaatgttggacagccgaggcttgcgcagcatggccacacgcacatttctcaccaacaacaagtgatgatgggacaacgccacgcgacccatcacccgtcgcagcagcaaacactgatcagccaacagcaaagccaacacccacagcagcagcatcccaccacggcgattcgaatagaacaatccgggtacaaaaaagtggcaatttcaatgggattggaggcgctagttgcaaagcgtactcttttgaaaatttttttcactttttttggtctaaaaatttttttgtttattttgatacagaatgatgaacattaagcattaacaacacaattatggcgaataaaagtatattcacgagtttttatcaaagaaaattttgcgaaacaaaagggtcccccctttggttattggataaaattcaaaatctttcactttttaatgaccccccccccccctttggtttttggataaaattcaaaatctttcacttttttttgttggtttttttttgtcattagtaccatctgtttaaaaaaacaaattctgtatcaaaactaacaaaaaaaaaaattttgacaaaaaaaaagtgaaatttttttcaaaatctgtcactttttaactagcgccaaaattcccttaaaatgtgtgtcagaacctgcactcgagcgtgaagcggcagagagagtacgtttggttgcaggaaaattattaaggaagagagttcattatctatttgttttttgcataattaatttataaatattttgttcagaaagggttctgaaacgcaccaaattttatttacatgttagtttaggcactctgatgctttttctatcaaattgggagatgaataaaatttttaaaaatttttaattcctttttaaacaggccaaaaagtttaggcttaactttttagtgaaaattcaatcactcatttttcgagtagtgatcagaagcgcaccagattttgcaggggcctaaaaaggtcaaggaaaggcgtctctgcgttgatttagcagtagtacctatgaatttaaattttctatgaatttttaaagttttttgaaatttttttaagtgcaaaatggtggtgtctgcaaaaaattttcaccgggtttaaaaaatctaggaaaattagtaagcatttgtagtgttccgatacgtatccctgcaaaatttggtgagcccctgatcaattacaaattatttatggacgatcaaatttttagaaatttttatttatttttgcataattaattcataaatatttttttcagaaaatgctctgaaacgcaccaaattttatttacatgctagtttaggcactctgatgctttttctatcaaaaagggagatgaataaa

SEQ ID NO: 76177 - DNA, 1832 bp, Heterodera glycines
ctgttcaccgagtcccaatgccccttctgcacgcgactgcttcgagaacagatttggcaattccattcccgattccccggcattatgaatctgcaggtccttcagaaactccgtgtggccaaaagtgtgaatgatcgaattcctttcaggtgattcccttcggcaaaggcaactgcgaattcacgcgcgaccggcggatcatttgcaaatgtatgcacgggcccaccgaatgcgacctgaaccgactgcagaactgtgccatatcggtgaaaaggggttttggcaacaattcatggcattaaaacacaaaagtgccactgtttgttccattagccacattatgcagcctctgctgttcccccatattttctgtaattatcccccccccccttttcacagtatttcccacgacggcatattggcttggtgacgtgcattcaagtgagcattgattaaggggggaaagtggcatcaaataaatggcaattattaaaattgtagggactgaagaatttggacgaagcctaccggcggtgtctgtcgcggctttcgccccgcacgcaattccgactaaagcaatgcgcggaaacgcaaaccggggaggtgctcaattacgtcagcatgctgaacacgcacaggcaaaaaagaacgaatcgaactcccacaaaaaccgctgcttttcccagggccggcgttcgaatttggcccaccgcttatgtaaacggacacttttttgatcggagttatccgatggaggtaagcagaggaaaagcggacgtaacaaaaggaacattggcaatttcagaccaaaatatgcgaacacacggcatggtgctgaccggcaacttctgatcagtcgctgatcggacctttctttctgttttctgtgttttttttgtgcaatttttccgtccaaaatgctcatcgggtttcgttttttaaacgaaagtcaattaacaaatgggaaatttattacattaatgtgatttatttggttaccttttttatttttgtctatttttgttgccatttcacaacttccacctctctttttatgtacatttgattatgtcaatgatattcgtgaataaattaattttaaattcgtttatttttcttccctttgccattaaattcttggcattgccatcaatcacttttttttgccgtcctctccattcgatcagctcatcaaacgccgtcgttcttctctccccaattttttgctaattatttgcaatttctcagatcactgatcactcctccccctcccaaagtgcaattactttttgcctcttcccacactcattccccccccctctccctctgtccaccttcggcttttccttcggctttttcccatttgagtgccaccaaccatcttttaacaatgctccgatgaataattacccttaagcctgttgtgcttttgtgttgttccttttgctccctctcttttatccccgtccatataaatttttccctcttctcttccttttccatttgcttcttcctctctttgatttttaatcaaaaaatgctttcctcttcggcattcaaattgcccattcgtttcgtccttttttgcattttgtttattcctccgttctctgaggcggtttgtccccactgctcgctgatcagagtgatcagactttgttttggtcgctttgatcagcgcctattcccttgccaatgtttgtccctctcagtgcgcctccaatggcatttgcggtggcggtggatgctgtggcccggcgtgtcagccggcgccggtggcgtgtaatcccgcgagttgtcagcccggctacacgtgcggtaccgtccaatga

SEQ ID NO: 76178 - DNA, 759 bp, Heterodera glycines
atggcaaaacggcaaatttcgcttctgaaaattgaagaaatttacgaacaaatgggcaatgtttatcatgctgttaaccttaacgagcttgaatgggtgaatcaatttttcgagaaaggtaaaacaaggagtcagaaaattatcttatggcatgctatctaataatataatcctttctctctaaaaaaaatcaagaatatcatttcttttttcctcaccatctcccccccccccatcttccctccctccctctgttttttctctgtttcctctccattttcaggtgtttccattcgcattgagtacatggaccgaagccaggctcccagcggcggttggcaccacgatttcctcgtcgagggcgacaaccaaccgaaactgttcttcctttaccgccccggtcactacgacattttgtaccgtcgcggtgcgccaccgaaaagcgaataaaggcacagaaattgtgagatggcaattcggaaaagcggaggaggagagacggaacagagaatggaacgcaaattgagactctattatgtttgtgttactaaatgtgaataaattgaatcttcgatgtgaatcacaaaattttatttaaatgaaatttaaaatcaaatttctaaggaagcagcaatattcggtccaaattaatcatttacggagtacagcccaggaggcatgagggactattggagtttcacgaaaaacccggtggaccaggaaaagttccggattctgatttctggaatccgagaccgg

SEQ ID NO: 76179 - DNA, 118 bp, Heterodera glycines
tcaaatcaaatcaaatcacaattcgattcttcacataagtcacatttattatgattctgttatttcttcgactgtgcaattgactttattattggaaaagaataaattctaaaatttt

SEQ ID NO: 76180 - DNA, 1740 bp, Heterodera glycines
atgtccaatctgacctttctgaacgatgcctccgtgctgcacaatcttcgcgcgcgttatggggcaatgctcatttatgtgggctaattttttattaaaaaagctcaagcacctgcttttagacctattccggcctgttttgtgtggtgattaacccgtacaaaagactgccaatttacacggactcagtcgcccgattttacatgggcaaacggaagaccgaaatgccgccacatttggcaagcatttaaaaaaataataaaaccaattaattcatttgttttgtaatttaatttttttgccatgagttagagcatattatgaacaaaatatagaaatgtttttctcttttattcatttaaatattaattttaagtttgctgtttcggacgaagcctaccgtaatatgttgcaaaacgctgaaaaccaatcgatgctaattactggcgagtcgggagccggcaaaacggagaacaccaaaaaggtgggcgaatttgaaaatcagccattacaatttcatcaatcggtctcatctttctctgtttctccactaatacagttctgctgatcacttgcaggtgatcgcttattttgcagcggtcggtgcgtcgcaacagcagacagccgatggcgggagcacgggtccgacgttggaggaccaaattgtgcagaccaacccggtgctggaggcattcggcaacgccaaaacggtgcgcaacaacaactcgtcacggttcggcaagttcatccgcatccacttcaacaagcagggcaaattggccagctgcgacattgagcactgtgcgtttggcatttaattgtttgtttctttatgaaaaactgcttcctctcgagaattaacaagaggcattctcgaatatcacttactaaccaatcaagttctactttaataaaataaataaatgccaaattttcttctgtacgtgtagatctgcttgagaaatcgcgtgtcattcgccaggcacccggcgagcgatgctatcacattttctaccaagtaaaaacctcaaattaataaagggtttttatcaaataacagctcccaattttgttcagattcaatccggctttttgcccgatctgaagaagcaattgttgttggatttgccggcaaaagattattggttcatcgcccaggctgaattgaccatcgacggcgtaaatgatacggaggagcaccaattgacccacgaagtgagtgaagtttaacattaattcataaaatattttttattttaatattcaacaatcactttgaatcctcacactttttattgtgaattttttaggcattcaaagtgctgaatttcacggactctgaaactcaagacgtttaccgtttggtggccggcataatgcacatgggtaagttttaaagtgatcagcaaatcatgttttgaattgcgagtattattctcatatttaaaggctaatgaaaaaaagagtaaggcttgaacgatttaggcaatatgaagttcaaacaacggccccgggaagaacaagccgaggcggacggaaccgaaggttggcattttgaagcgaatgttgcaactttaaaagaaaattttagaggccgagaaaaccgccagaatgtacggggcgaacccggaggaatttatgaaggctttgctgaagccgcgtgtgaaagtcggcacagaatgggtgagcaaaggacagaaccaagaacaggcaaggcaacccaatggcattggcatttaa

SEQ ID NO: 76181 - DNA, 1195 bp, Heterodera glycines
atgggcaagactaagaatttctattcatctcaaaaaaagataaaaaaaataaagtttaaaatatttgtaacttattttgaacccattaaatttggtaaaataaatttactttgatattttttaacaaaagattcaatgctttttccagtcctttacattctcttcacatttataataaacaatgcatctgcaaaatgcacttcaacagaaggtttaaaaaattatggaataaatgcgatagaaaacaatggaggaaaaagtaaaaataaatattaaatatatattaataaataaaatgcaatttagaaatgatcgcaagtttctcagagcagacgatggattgggcattggccaaagggtgcgaaatggcagaaaaattgtgggaaaaggccaaattggggacaaagaccgccaatgaatgtgtaggagaagaaatggggcaaaaaatgatggaaatgtgcgcgggtggaacatcaaaagcgaaggaaattgcacaaaattgggggaaatcggcgctaattgccaccggacaatgcgttttggcacaaatgcaaacggaggaggagcaaattcaagaggaacaaaatgccgagggcatggcgaaacttgcggaatttgacgcatcgttcaaagagtgtgcgaaggcattggcacccgagcaaaaggcaaaaagtggcattgacaaactgctggaggccaaggccaaccagcagctgaagcccagcgacctggtccaaatgctgctcgacgaggcgatttttgagcacgaaattttccaaaaattcgccgaaagttttaacggcggaaaacaaaaaaattttgtacatcgacggcgaaagcgaaaaaacagaggaaaagcaaagaaagaattcggatacgacacttacatcaaactgatcttttttctggccatcaccggtcaaataagcacacttgcctttctgctccttctgttccttcttcctgaccccgtcgttgtgccaacaaaagcaaaagaaaattaaaagcgaaaagtgccaaaaagaatttgtgctttttgttgctgaagaaaatttgatgatacaaaaaaacgtccgaaagaatttttttttttttctttttagttgatgcatttattatttattgcattggtaacaaattctgtcgtatttattcggacaaaaagttttatatgaattttcatgctagcattaaa

SEQ ID NO: 76182 - DNA, 285 bp, Heterodera glycines
aaatttttaaaaattttccagcaaataatggaaatttttttcgaattcccccccccccaaacgaaaattaaaaagtttaataggcaaatttcgtaacaagtagcactcaaatttccaaaaattttttccggcggcgcctatcggcaccgccggacctacatttccactatttttacaagttttttgccttaaaacggccaaaatttggtcatttttagtgaaaaagtgcagttgttacccagcagtggaaaaaaagttattggttaaatagcaaaaaaaaaaaaa

SEQ ID NO: 76183 - DNA, 732 bp, Heterodera glycines
caataaaaaggtggagtccatgacttgggtgatcgaagacaaacgctgcgtttacttaacactcgaaaaggtttgaatacattcacattttgtgcgagtgggcaaattatcttttatatggttttactcaacagccaaaattggcaaaacgaatccaccgtttaaaaattagaaaaaacatacaaatcttttaatttaattttacatggcttttcttttgtcagatcaaccaaatgcactggtggaacaaactgatcgaaggcgacccagaaattgacactcaaaaggtggggaggggaagagaaacgcagaacggaaaaactggaagggacaaaccctttaaaaacgcaaatgcctctcattccctgcaatttttccacaattccccagggaattcgtttgctttttgtcaaataaatttcgataattttttcaggttcagccggaaaactctaaactttcggtttgtgtccctttccattggtgttatttgtaaatatgcgctctttttaaggatttggacggcgaaacgcgctcaatggtcgagaaaatgatgtacgaccagcgccagaaggagctcggcttgcccacttccgaggagaagaagaagcaggacattctgaagaagtgagtggcccgggaaaagaaggccatggaaatgaccgattgttttgacacttcaggtttatggagcagcatccggagatggacttctccaaagcgaaattcagc

SEQ ID NO: 76184 - DNA, 1590 bp, Heterodera glycines
atgccttcggcacgacggcgcacagcgattcgaatttgcggacaatacgctgcactgctcatgcgcactccaatggatgatcaacgcaccggaggaggagcaggtgaatcggacgcaggagacggccaaaaatacaaattaattgccaattttggattattttgacaatcgctaaatggcacaattcagtggttggccgagaattactgcggtgccgaggagaacttcaaggcgctgctgtacttttcgcccgccggcgtcggctgtgccccgtgggttccgacggcgtttgtccctccggtcgctccttttccatcgtcgtcttcgactcgtcctttgcttccgagcagtccccaggatggattggcccagtcggctgaggtcgacgaatggtccgaccccgaggacgaacccttccccaatccgtcgccgcaccggcggcactcttcgcacccccttttctctgcctgccctcctcgtcatcacttggctcgtttcttttccctctgtttgtctgtctttctgccactctcctcctcctttcctatctatcttccctcttttttgctgttgtaaattttcattgacagtgcttttcattttgaccgggaacagagccaattttgaacgcatttgtcaaagcgataaaatcagtcacttctttcaaatgaattctgtgctatttccttattcaaacagaataaatattattatttttataataaaatcagaaacatggaagttatggcaaattggaaggtatcgactagagaccggcgcgggacgggatttttcactatttcgacattttttggaaaattccttaacaaaaatgcaataaaaccaaaaaatacacccctaagaatcgagcaaaaatttttcaaaatatactcctatgaaatgaaaaaaaattttctcaaaaatttactttcttggcaaaaatttttaattttaaaattttttttaggtaactattttgggttttttggtcttaaaaatcccagtcctactcatttgcaactgcaatcagtgaataaaaattatttttgctcaatttttggctgaaaattatgtcactattcgtcactatttcggactttttgacactattttgtcactattttggcatttttactcactattttagttaactatttcgggatttttcgtcactaaaagttgcgaccctacttattaatcttgttgaaattagtcaaaaaatgtaaaatctggtcaatttttgaccaagaatggttttgaaaagcaaaaaatagttaaatttatggtccattaacagatttgattctagatcctctttttaccgtctgatacattcggaaaatcttagtcgccaatgcatcccgctatcccctaaaaatttctttttcaaaatatcattattttctcttttttggaaattttttgaaatttaattgaaattttttcaaaatcccgcaatcccgcgcgggatcccgcaaattttaaatgcgggatttgcgggattaatcccgcgggatcccgtcccccaaaaaattttggattccaatcccgcagcgggatccgcataattagtgctttgagggaatgcaa

SEQ ID NO: 76185 - DNA, 1638 bp, Heterodera glycines
ttaactaaatgccaaactcgtcgtttttcctccgttcagcatctccaacaatcgccgaacggagcgttcgccgcgccaccgcccccgtccaattcagtacagccgacgatggccccccaaattgagcaccaacaacagcagcagcccttcgttttgcttcctgaccgaccggccattcggttggactcgcgattagtgtgcaaatacgaagtgctgtccgtggtcggaaagggctcattctcccaagtgctgcgagtgcaggacagaagtgagttggaggagacgcgggcggagggagagacagcgaaaatgccgaaaatgggcaaatgagaggaaaatgccaaaatgataaaaatatataaaggaaaattgggaaaattagtggaaatgccaaatgacaaataatatataggaaaatggagtgccaacaaatttaatggaaaatggggaaaatgagttgaaaattccaaaatgataaaataatgtaaaggaaaatgggaaaatgagtggaaaatgccagaaaaaaaaggactaaaaatgaatatgtccgtcctctaaaaatgatccatctcccaaaaatggtctcatagtctcaaaatgtcaatgattggcacagtttgttccaaaaacggcattttttgatttgtcagtcagtaaacgcttctacgccgtcaagttggtcagtaccgagcaagactttggcgctgtgaacaacgagctgagcattctcagccgtgttcagcatccgtttgtcattcgacttgaggaagtgtttcgaagtgccacaaaagtaaggccgaggggaagagaaaggaaaagggcgaaaggacctcaaaaaagggcaccgaagttcagtcggttgagcattttgtggtttggaaggccgtgggttcgaattccctcggtcgaaacgccttttatgaattttatgctttgtattggaccatagtttgtgccattctcagttttattggcgccaatttgatcagactgatcagtgcgatcatcgtcccccctcattttcagctgttcatcgtcatggaaatggcttccgggggtgaaatgtacgaccgcgtggtggccaaggggcggtactcggaaagcgaagctcggatggccatcaaaatgttgctgaccgggctcgaatatctgcacaggtaagcccagagagaatgccatcatcggcataatcaatcaattaattaaataccgtaatccgtgtcccatttcccacagtatgcacataacccaccgtgacctgaagccggagaatttgctgtacagcgacacgaggcaggaggcgcggctgctgatcaccgacttcggattggcggtgagtgttgacagaaaaacaaacaaacattttgacaattcctccgagcattttccattttttaaagtgcttttcccctctttcagcaccaatcgcgttctccggacgagaaaatgacggacacttgtggcacgccggaatacattgcgccagagattctgctgcgcgtcccttactcaaatcgcgtggacctttgggcggtcggggtgatcggtcagttcatttgatcacgaatcgtggacacattgaccaccatttttatcatcagtcgaattgccatttttttgatttgccatcatttaccc

SEQ ID NO: 76186 - DNA, 221 bp, Heterodera glycines
tttttttcactccccctctccgcgccgcgcagcgccgcggaaggtcatcaatcatccacctgtcaccaaaagtgacaggtgaaggaaattcaattttttcttttgcaaatttaaatctttttgatcccaaaccttttgggccggttttattttctcaatcctgaatttttttatgatgatttttcggatcctgaaattaaaaattctttttgaaaattagc

SEQ ID NO: 76187 - DNA, 1011 bp, Heterodera glycines
atgcccagtggagaggggccgaggaatgtccataaatttgactttggattcaaggaacaccagcggatagggtaagtgtttttaataaaataaaattaaaatagaaaaaaactaaaataaaaaaacaataaataaatttaaaataaatacattaaatttatttaatgaagcaaaaattctttaaagaaaaaatgaaaaaaagcaacaaaaaacctaaaaataaattaaaaatattaaaaaataataatttaatgagccaaaataaataaaaattaaattttaaaaatcaaaaaaatatatattaaaaaatattaaataaataaaaaataaaatttaaaaaatcaaaaaaaattaaataataattaaagtaaagaaaaaaaagaaataattatttttaattaagcaaagcagcaaaaaaaaacagaaaaaaaaatttaaaaaataaattaaataataaagaaaaaataaatggaaataataataattttattaaggattacaaatgcggataaattttgtttgttttatgctttggtggcgtctaaattttatttggaagtgcatcgaaacatttttaatcgatttatgaacaatattatgagacagagggacgcagctattgagcttttacataattgtggaattgatattaacgaatatagctatggtgtggagcaattgccgaatgttcagaaatattgggtgggtttaaatgaaaaaatgcaaaattaataaatttttcaggatgagatttaccccggaaagtaccgggttgtggcgtttgaaaaatctgcggatccgaggaaatcgatacgtgttttgtggaaaggtcctatggggcgtgaaaatgtcgtgccgttattcttggagaatggccattgggatggtctgaagaatttcgtctgcttttttaatcgagggaggaaattctgcattgattgcgaatgtttttacgacaaggatgttaagcatgcgatggagtgccgggcgagatgttattattgcaataaa

SEQ ID NO: 76188 - DNA, 110 bp, Heterodera glycines
tcgatcactttctgaaaaagaaaatgccgggccgctcaacgggtaaagcggacaaaagcaccgacgaacgaatgatatttgttgatattaccctattcataggcgcatag

SEQ ID NO: 76189 - DNA, 1948 bp, Heterodera glycines
acatccaagaattttacgacaacactttgctgaacgaaagagttccgttggatatgaaaacaaccgaaactcgcaaattggccgagagatgggagcaggtgggcgccgaagtccttccatttgcctaatgagtcgctttcctccaaagagtccccccttcggcgccgtctcccgggcattcactccgtcctccttcgaccgtcctgtctttcccgccacaacaactgcaacacctcacacaaatggcttcaatggcgaaatggaaacagccataacacactcttctcattcatattcgtaccaggagcagagcaaacaattggtgaggcggagagacaattcggccgagaaagccaattcgaacctggcattccatttggcaaccattggcggcatacctgtgctaggggggggctcagccaagaggtcttactatcgactttgccccccccccatgggggggtcagagcccatttccattacgatcgaccattattccaattttttgcctgctgaagaccttttttttaaaccacttttttttgcggcgtgcttttcaaaaattttttggggaacatgggggtccggcggagaagataggcgcggccaggaaaattttaaaatttgagtgcaatttgttaacagattttcacgagaaagtgctgcatttttgcgtttttaagccaactattttaagaaaaattaaggatttttattgacgaaaggggaaaaatcgaggttagtcgatcgtagaaaaattgcaatttaatggaattttttttaaaccggcaaaatttttggggttttctacccactctcctcttacgatcgacaatttttctcacaaatcggtattagtcgatcgtaaaaatctggaatttttaatgaaatttattaagaaataaggcaattttccgaattgccaatgagaaaattttataaagtttctgtttcatgttaacgatcgacttgttcgctgactttttttctctcatcccttttcttcttccctcttcctcccttcacccccccccacctcttacgatcgactaagagaccctcctgtgcacaggtatgattggcggtaattgtccatttcttagaccaaggatggatggcatacgcaagagtaccggactcaaacggtggacgggccgagtgggtttcagacggagacagtgaccaacaacggactgattgacgaccagggaaaggcgtgggaggtagaggacgtggtgctggagaagaaccaactcggactggtcagcctgcatttgtccacaatgtccaccgttttggcctctttctgcagggtttctccatttctggcggcaatgaccacagttccggcccttatatccgtgtcactgacattgcgcctggggtactttccatttccaattgcttctgccaattcggcttacgcccttaagggtggtgtggcgagggacggacgaattcgaattggcgatgtgattctgaaggtgaacaacacggacaccgtcgacgtgccgcaccaagtgccttctcaaccgactctctctcctttctgttaatgccctttctgtgcttaggtggctgtgaatgcgttgaaagttgcgggcagtgtggtccgattagtgagttaattatcccccccccccctcgggcataagtgaacctctccaattttagctcatcaaacgaccaaagacttcccaagcgagtgcgtttcgtccctcctcggccgaaccgctctcgcgcggcagtcccccggagggtttcggtttcggtcccccaccgcccgtccccacccatcagcagtcatttggagaaagtgaggccgtgaaagagttggagcaaatgccgggagtaaggcgaatggatttgatcaaagtggagtcggacggaatacacaagggattgggcttcagcatcgccggaggaaccggaaaccagcactatccgg

SEQ ID NO: 76190 - DNA, 627 bp, Heterodera glycines
atgccttgcagaaagccaaagttgcattttatcctttctttgtgagtttgaaatgtgtataaaaatatttacttatttaatacgcaaaattcaggaactgtgtaaaagtacgataattaaaatcactacttttgttctgaaacacaaaaatttttttctatttaagcatgaaaaaataagcaagaaaaaaacatgtatacacaaacagaaaacactcaaaaatagtagctttattcataaataaaaatgcattattaacttttatctttgctattgtcaaataaatcgaaaagaaattaatttaaaaacttcaaaacttatacaaaatttctttaaatggtccaagaatgctaaatgataaagatatttagactcataatttttttttatcatttttcagcataatttggctatatttcatttaatatattattaaaaacaaaaaaattcatttaagtataaactagattttgaaaaataatggcaacataaaattgtttattgatttgccaacgaatatacgtgtttatttgcgtaatatttttatttttacaaattgttcatattattttaatctttcgctttttgcaattactaaaatcttatattaatgaaaaaaataataaa

SEQ ID NO: 76191 - DNA, 938 bp, Heterodera glycines
atggtaattgaaaatcagagctatggcaataaaagcatttatttcatttccagttacatcgatcactccgtcatcgcttttcttcgttcaaatcaccaaattttcgacaaaagaggcaccaatttatatttgtggattccatcatcacactctacgaatggccagccgattttggacatttttggtcgtgaaatttggccaattttttcggcaaacattcgccatttgggctttccccatggtgatcatttggacaatttgcgtagtctcatttcgccaacaattctcactgatctcaaccaattgatttcaatctattccggtgatttgtcgcccgctgcgtttggtgatgattttgatgggccaaattcaacaatttctgctggcaaaattctgtccaaatggttgcactctccgagaaaagatggccaacccaagcgattgcattgcgaagacattaaagaacaaacgaacactgattggatcaacaatttcaaggaggtgtggtccggggggggggggggacaaaacgtagccgcaaatttttattttaatttaaaaaattatttaaaatttagttacctagcctaaatcaaaaaaaatagataaattcgaaaaaaattattaagaaaattcaaggaaatgtaaaaaagtcgtttttttatttttctggaaattcagaaaattagtttttatacgagacggcgacgttttaggggtgtacccggtctgtggatggcattctgagttattttctgaaacccgaccccaaaaaagttataaatcgaaaatttttgaaaaattccgaattttataaaaaatttcagaaatcggaattcagtgccatccctggtgtggccataattcgacccaagcgattgcgttgcgtagattacaacaaacaaacggacttagattgggtcaacaatttcaaggag

SEQ ID NO: 76192 - DNA, 631 bp, Heterodera glycines
atgtgcgccagtgggaatccatcagtaaaacaatccgtcggttatggacaatctgtcagtggacaatccgtcaacaaattttttttttaattctctgacgaaatgtcctttgacggaacgtcagtctactgacgaattgttcttcactgatgaattgtccgtcactaatagaattgtcttccgaaagattatccactgacggattgtccggaatccggataccgtcaatggtgggaccgcattccgggagtttttgcgacggaattacacattccggcatttatggcttgccgaacacctccatggcatacacatttaaaaatggcattttaaggcgaaatcaaaacattcaactggctccactgctggtggtggactatcagtgccggcgccaaacaatcggaagaaaacgccaaatcaacaacaacagcaaaaaggaaacagcgaagggggaggagaaggaagagaaaatggggggaaaagagaggaaaagggaggagaaaaaggagcagcagcggaagcagaggaaaaggaaaagaaaattgcagctgaacaccatcagaaacaacaacaacaaaagcaagaagttcaagcagtacagcagcaacaacaaaagcaaattttggtgtga

SEQ ID NO: 76193 - DNA, 208 bp, Heterodera glycines
  unsure (1)..(208): unsure at all n locations
atgaaccgacggtaattaaattaaaagtcacaaattcgtcgtttatttgactaaactgttttcccatttcagttggatttgcaacgacgtttggatggacattttcccctcttttgaccgtcctcaactcggcctcaaattggcattgctttcgccacgtttcaantgcgnttggtggacaaacatttcaatggcaaaagcgaattga

SEQ ID NO: 76194 - DNA, 683 bp, Heterodera glycines
atggccaaagctgagaatcgaaagctcaaaaatggcattgaaaaaatgcaggaaaaatttgataagaaagaggagcaattggagaagaatttggaggaattacagaaaaagttggtcgaaatggatcatcagcagaaagaacaacagaaaagcattgatcagatggaaaaggtgggaaaatgtgaaaaaaggaaaatgaagcaaattgatcagcacattttgaatttgattttcttttttgctaaaatgccgtaaaagatgctacagacgaacgctgatgccgaaaaggagaatgatgacaacatgaaaaataagaaaagcttgagaaaaatgtcatggcacaaattgatgtgaaagtgcagacgaaggaagttactgtcaaatagttaagggaaatgagcaatggttaattactgtacctaccgtaacattattattataattactgtcaaatattaataggatttgttccaatttaagttattactgaaaaggcaattttgattgaatcggtgaattggagggacaacaaaaacaccaaaagcagcaaggggagaaggggacaaaaggcgagttgtaattatttatttgagcaaaccacaagacaacatgtaattgcacttatagcggaaaacaaagtaatgaatacaattagaaaaatatgatatggtcaatacagtaaa

SEQ ID NO: 76195 - DNA, 410 bp, Heterodera glycines
cgcctttaccttccacccctgcgcgtcttcctggctggaccggtgcgcaaagtacgggatgttgtccgagaaccactggtaaatctcgctgagcttcagccgtccgtcaatggcacagccgagcgcgcgcgcgatcaagtccgagtaggactcctcgccccagggattcggctttttgtgtgaatgctgctgcgctgcttgaccaccactaccaacagcaccatcatctgtgacaccggtgggcgccgttccgccgtcagcggtacgtcgacggactcgcttcggcttcggcctgattagtgccatagaggatgtgccgagttgagcggtggagaatgacgatgacgcggtgacaccgcaaggaccaccggaggaggacagcaacaacgactgttgtactgcttgagaat

SEQ ID NO: 76196 - DNA, 2911 bp, Heterodera glycines
gaagatgaggatgatgccgactcatttccgggcgagttggagccccgcgggcgctgctacacatggccagtcccacagtttggagccgtatcaacagcacaacaatcgccgctttcctctctgcatcctccgccaccgaatcatcatcacctccaccaccaccatttgttttcgggtgctcctaattctgcaacaacatccgccacttcgtccaaatttccgtcattgagcagcatcattggctgtggaggtgcgggtactgcttgctcttcctcctcctgttctttgctgaccggtgtcgaacaacaacaaccatgcacttcctcatcacatcactcaccattttccgctctgtccatcgacggtcaacaacaacggcatcagcatcattctcaagcagtacaacagtcgttgttgctgtcctcctccggtggtccttgcggtgtcaccgcgtcatcgtcattctccaccgctcaactcggcacatcctctatggcactaatcaggccgaagccgaagcgagtccgtcgacgtaccgctgacggcggaacggcgcccaccggtgtcacagatgatggtgctgttggtagtggtggtcaagcagcgcagcagcattcacacaaaaagccgaatccctggggcgaggagtcctactcggacttgatcgcgcgcgcgctcggctgtgccattgacggacggctgaagctcagcgagatttaccagtggttctcggacaacatcccgtactttgcgcaccggtccagccaggaagacgcgcaggggtggaaggtaaaggcgcagctaagcgcggcgcgttcgaccccttaatctcatgccaattgcgctccctctctccctccctactgcggtgtcatgacaactcgtacaaaaacaacgcctacaatggtttagatttaagcctaagctttaggctttggcttaagctttaggctaggcttaagatttattttataaaaatgttgttattgtacgaattgccttttggtacgagttgccattgactccctgcttccctgtcttgcatttattttccgtcgatttgcagttgccaaacagtgattggttgcttatctcagaaccaaatcctttacaaccctttaagctctctatccactcacccatggtcattaagtataggatttcgttacttccacttaaaagatttagttggatggttttcaatttctttgtatttaaagaaattgaggaattttttaacactattgtttaaatgaggtctcactcaatggggtgtccttattttctcgggaatggaatgagagttcggtttataaaaattttttttttctaatattggtagggggaccaggaatttaaggaaagcctgggattcgggaccggaaacatgtcataaaatgggtcaagaattcccggtgaaaaaatcggtacttctaaaactatttggtcccggtcccgaggccttccaacttaagttgtttgtgttttgcatcatttaaaaaaaatttcactgctttcagaactccattcggcacaacctttcgctgcacagtcgcttcatgcgcattcagaacgagggggctgggaagagctcgtggtgggtgatcaacccggacgcaaagccgggccgaaacccgcgccgaagggccaacacaatggaggcggccacgaaggtggacatcagagctactgaaaatatttaataagagtcgggcggtggtcccaataagccaattttcttttttttaaatttgaaatcgttagttttgggtttctcgaataaaaaagggtcgtcggttcgtctcgccattgtgaaggagttctttcgaattcgcaacatttaaataagcattcactaattgcccccgtccggtcgcttaattgacttccttccacacttgttaattggttttaattacccataatttgatttgccatttacacctcctcctctcctcctccgcaggctgtcattgacaagaagcggcgtggtgcgcgcaaacgtgtcgaaaccctcgtccaacagaagggcagcaacggcggctgttccgcctccatggcctccattctcagcgctcagtcggccgccatgttcccctcgggcaacgacgagctcaacgagcaaccgcaacagcaacaacaacaacagcagcacatggtgctgaatgctgctgcaccgaccggggggcccaacttcgacacgttcaggtgtggtttggctggctggtggccacgaaaacattgctaaattttcaaagattaaaataatcaaattaaaaattatgatattttcgagaccgaaaatttctcgagactctaaaccaaacaccagaaaaatccgagacttttctcgagacgaaattccgaactgagaaccttggtcagcaaaaagggacttttttttattccttttagtttcctaacctaaaaaatgaagggggaaagtgctgcgccgtacggcgcctgctgagaatcaacggattccctgctccacattttcttttttcattgctaaaactacatttccaaattgcatttttcgtcatataaaatttttcaataaaaaatgcccgtttttataaacgttttgataataaggcatgctattgtgaatataggccccgtgctgagtcgacactgtccgtggtcggtgggccggcgtcctgctcgcgcctgtcgccccccaacgagtcgtccatggaatttcctctgtggatggatcaactgcagcaacagcaacaaaacggtgccgacacggcggcaacggtgccgagctgttcagctgttgtgcttccaacaacgacggcgacgacgacgacaggagcggccacggcaccgccgccggtgatgaacccgcaggtcagcgaactgctcgaccggacggaccaaatgcgactggaggcgacgacga

SEQ ID NO: 76197 - DNA, 1110 bp, Heterodera glycines
atgaattcaatggtaagcatcattttgttgatataatcgtcagtttagaaacttcagtaaaacttttataaaatgaaaatatctttgttagaatttatggtgttttaatatataaaaaatttactgacggattgtcatggagccaaagactgtgcccaattgtccctgtgccaaattgccgctttgccaaattgtccctgtgctaaattgtccctgctgtgcccaattgtccctgtgccaaattgccgctttgccaaattgtccctgtgctaaattgtccctgctgtgcccaattgtccctgtgcccaattgtccctgtgccaaattgctgctttgctaaattgtcccccggtcgatccctttcaggtgttggacaacaaaatcggagagggcgaagaagtgccaaatttgaatgtgattagagaagatgacccggtgaacgaattccttggctttttgcactacgatcaaaaattgggccatcacattgccaaagcgtacaacgaaacagtgttttgtgccgccaaaaatcaaattgccaaaagggttgtcgaccaaattttgcaactgaccttctcattggccattcggataatgctttgtgtgatgtgagttttgaaattgaaataatcaaaaagaacaattcctaatttttatccttattaaattttgggcttttggcacaaattttgttggcactttttccattgcaaataatccttaattaattgaatatcttatcaataatatttggcaatttaaatatatttttttcacattacaaataccatccttagttatgagaattatttctcgcgtttttatgatgtcggcgggtggcaattggaacaacttttgtccgcttttcaaattttatcggcacaaagaggcggcaccaacgaaaatgggtaaaatatttttcttccgtttttaattttgtgatttgctattaatgacttttttaaagaatttaatttaatttacagaatatttccttttcaaatcattcgcattgacgcgcaaaccaaagaacatttttgggatgaaattaaagcgaacagcgcgagagaaccgcaatttattggtgggtgaacaaagcgattaaataaa

SEQ ID NO: 76198 - DNA, 75 bp, Heterodera glycines
ttttcctgagctccccgtggcctgaaacgcacgaaaaccatgtttttttgggctgttgttaagctacttttcgag

SEQ ID NO: 76199 - DNA, 1505 bp, Heterodera glycines
atgccattccaaaagccacgcggagtgaaagaggacccgaatcagacaccgcccaattttattcgcgtatgctttatccaattgttaaatattctaaaaatgctataaattcaaagcatcaaaaaattaattaatccatacattcatctctttttaagcctctccgggacaaaagggctttgatcgggcagaacattgtgctggagtgccaaattgaagctcatcctgacccggtggttaagtggctaaaggacgggcacaatgtcagccaatgcccggattataaggtcaattaaaaaaggctatttttaaatataatttttttttcattatattaaatgctattaaaattttaaatctcatgcttttggtgccgttcagatggaagaggagggcaagacgtaccggctgctgatccgtaaggcacaggctgcggactgcggtcggtttacggtgcaggcgatgaatgcggcgggcatcaaacagtccacgtgcatgctaatcgtggcacaggcaccaaccccagtgcccgggggcatgacgagcataacgtaagcacggcatattgtgttttaaccttagagaaaagccaaaaaaaccgtcgatcaggctggcatttttgaagccaatgaatggggccaggggcattgctcggatttatatttttatctaccaatttcactttaattacattcaaaaatattggtacatgttatcgtatgacaacccgccacgcacttacagtagctcacccgcgcccccacaaacgccggtgggcccttccgcgcctttgttcctcaaagagcttaagcatcagccaatgaagcccagtgaagctgcggtgttggaggcacgagtcgtcggtgtgtaatttttaaattatcttttttatttaatttaattttaatgaatttgattttcaggcgttccgttgccacaaattgagtggctaaaggacggaaaaccgataaataattataggtcattaaaagcttttaattaattttttaaaagcaatacccactctttcctgagcagaattaagacggagtacgacgcccgctcgggaatttgcgtgctgacggtgccgcaactgttcacggaggatttgggcgagtacacttgccgtgccaccaacgcaacgggcaaggctgaatcccgtgcacatatcatgccgcaggagcagtacgaccgatggtttgcggatgaaaagcgaatggtgacgcgcgaacgcaagcagcgactggtggccgcgcagcgagcgaaaacgcagccgcagcagcaacagtcgcaataccaaccgcagcagcagcagtacaggtggaaaacagagagggggggggttgatcaaatgatcgggttgattaagtcaaacaccaaactaatcaaaagaacaaacaaactaatcagagagatgaagatgatcagaaaatgaccaaaattattagttgagagtgatcaaggataaaagaaaaggattaaggagaggaggaactgctgattaa

SEQ ID NO: 76200 - DNA, 1720 bp, Heterodera glycines
atgtacttggatttcacgaatttttcccattatgtacttggaaattggcatccctgtacttggaaagtgagtttatccgataggaaccctcaaataattttaaaattagattagaattggaaatatgaaagaaaaaaaaattttgcatcaaaatttaatcaatattgctttcagattttttatgagtatattatagctaattctatcaaattaagcaaaaattagaatttataatggaaattactacttaaattgctgcaacttgaatgatcaatccgatgatagcatgctaatgttgatccccaatgaatgggcaattaacatgctaatgtaaatgatttttgtggctttttaattttaatttcgttttaattcattttataagttatatcaacacagagagaatttgccatttttgaacccatcgcaaaatttgaaacaaaattaattgatccccaattataaacattttccgtcatcatcatcagaggccccagatgtttgattggagaggcccgtgaaaataaaattgaaaaagtattgggaattttaaaatccaattagccaattgttacgattgagaaaaacaatgattataaaacccaaagagaaaatctgcagaaattggactcacaaatgggaaacgatgcattagacgagcagcaaatcaaagcacaacgaatcaaaaaagattttcgtaattaattttataaattttgaaaatttttaatgaattagggtattgccagagaaaattttatgagatggaaaaaagaattggtgccaaatattataaaaggagtaggatttttaaataaaaaatatttttaagcagcaaataaatatacaaatgagtacaaattaaaaatgatgaagcaatattttgaaataaaagaaagaaacccaaaaatgggtgacgaaataattgccaagaaattgggaattatgagaagatggaaaaaggaattactgccaaaataccacatcagaaaaatattaagaatctgcaaacctaaagagccaattttcttgaatggctagacaataataaaaacactcaaacaatgaacacaatatgataaactgctcgaaagcccttgataagacgatgaggggccctatatgttccgcaaatctgcctttaaaccgtacaaactttgcccatatttggcgttaattaaaaatttcagatctatttaaaattcacccattgctgtaataaatagctcatagaatcatggcaactaattaaatgcacaattcgcagtgttgccaatgataaaattgaaaattcatcaaatttatgagattctcagaagttataaatgcaagcccctattaaatgcttgtggatataaattcgtttttaaaaatcattttgtaatgtactaaagaatttcaaaaggtagacctaaagaaaacactaactagcatggcaaattttttcaaaaacctgtcccatttcttgtcgaataagtgagtataattttttgaacttttatgagtatcaaaaatttgccacccttttcaatatcgaccagtaaaatttacagtttcaatttgattctgaaaaactaatttcagaaattgcgaacccgagttgaagagatccagtttgtttttgacaatttctcttttatatcagtccaaaacaaagtggtcaaaattgcggtttaattttctctttttcaaataattagtaaacttttgagatattaaa

SEQ ID NO: 76201 - DNA, 1220 bp, Heterodera glycines
atgagcgacttcgagattggaatgctgaaagcgatgcgtcatgtcttcccgtcatgcgaacgctcgggctgcagcttccacatggcgcaagcggtgttccgaaaagccagaagcatgggcatttttaatttgttgaacgaagatgacgacgaagcaccggttcaaaggaaatccgttcacaaaacattcaggtgtctttcattagcttatgtgtatttatttgttttttcaaaatcagatctgttctctctttggcactcattctgccactttacgttcggcgcgctttttcaactattgtcagcgcggcaccgcttggagttcaaggatggctggcgtattttgccaaaacctacattgccaccactcaattcgagattgatcgcggggcggaggcatttgaaccgcatgctgatgtcggacactttcttctgcgtcgcactcgaagcacaactcgtaaatgcacctattctgtcatgaatttatgaaatttttcaattttaccgttcagtatttcccaggcatccataatgacaggcagtggaccaatacaattcggactgcattcgccacaaccttcaactccaaccattccattgtcagaagaaagcagcttgcagcttattccacgctgggaacaagacatcgtctgtcctccacgcttcccaatctcgttttggaatgtgtacaccagggctcaaatggcaattgagcgaacgaacaacggcatggaagccgcgcatggacaatttgcagtaaaaatttgtccgttggaagacacttttttgttaatttagtgtgaactcaatcatcatccgtcactgagtgatttcatcgctgcaatcatcaaggacatcgacaaacaactggacattggacgagcagaacgtctccagaaaagcacaaaacgacgacaacggtacatcatcaaagaacaaaatgtggtgcggatccttgacgaggccgactttgaatcggaagaaggattgacgaacgccttgtatctgatcgggctcgtaatgcaaggctttgtggagggacttcacgtccgtggaaatgaagatagtgagaagaaactgatgataccgatggaaattgaatttatgattttaacaatttttacttttatgatttttaaccttttacttttattttttctttggaatttaataaatatctatttgcttccgtgtatttttaggttaaatttaattattata

SEQ ID NO: 76202 - DNA, 953 bp, Heterodera glycines
atgtccaccaacgaatgttttgtcgacctttcccgtcgcattatttctcatctgatttcgaagggttccgatcagaaattttggtaatatttgttagtgacggaggcattaattagccaattgtcaaatgaaataaaatcctattactatttaattcaacatttcagcaattggcattgtggcggggcagcaacggttgcagaggttgcaaaaacggtgttgaatgaagagcaccggtgagcaaattttgtattaataaaacggattaaaaatttaaaaaatatgtttttttcagtctttttctgtccggcatccgtcgtggccttttgacctttttgcacagccaacgccaattgttcgtcctctcaaatggcaccctttcgctgcgcttttggcactcggactatcagcgatttgagaaggaaattggacgagaaaaactgcgcactttccaatgccttttccaccaaaaccatccggacgggtaagagagagagagagagagcgaaatttgaacagaaaatgccatcccttgttaagatgcacaattggtccggagaagtgcccatttaaacacaattgaaggaaagaaagaaattattttttaataatttattcatcattttgcgcacattaaatcgcatttgacacacgcgaaaaatgcgtgaatgggtttgttagtgttattgggatacgattttttggctctaaaaatcatcgaaataggtgggatttaggccttaaaaatcctaaaaataggcacaaaaatgaaaattcatgaaaaataatagatgcatgcattaataagttattctaaaaaagcggcaacgtatataaaccagtttttaaaccggttaaaaatgcggaaatattgggaaacgtggtgagtcgaagtgacaaaagtgcgaatgagtgatgatcagaaggggcgggtcatttcagtacggaataaa

SEQ ID NO: 76203 - DNA, 101 bp, Heterodera glycines
taattatattattaattaattaaattcatttattccgtactgaaatgacccgccccttctgatcatcactcattcgcacttttgtcacttcgactcaccac

SEQ ID NO: 76204 - DNA, 95 bp, Heterodera glycines
atgcattcggcaggtggcgttcagtccggacggaagggtaaatgcatttgttgggatgaaacgttcaaaaagcggacgaatgattcctttgccag

SEQ ID NO: 76205 - DNA, 1508 bp, Heterodera glycines
atggcttattcattgtctcttcaaccgtggccttcgtctgcttctgcttcttctgttttgtcagtgttcgtcttcgtcctgctcttcgcccgttgctgctcccaatcggcggatgccagcagcagcagtttttcattgcgcggctttgcctgtgcgaagaaagatgccgcagtgcacggcggcacgttcactgttgttggagagaagcggctgtgagtcgctaatcacgaatatcacattaatttcgaccaatttcgaaccccggacccgaattcgaacaaaagttgaaaattcaaatttcctttttcatttatgttttttggcatttttcagtcgtgttgatccatcgcaactgacaaccaatgaaggcaacgcaaaaattgatgcgcttcgtttggacgacgctgcggacaaacgcttggtgatgtcagtactgttcccaaatggtggcggcatcaattgcaaaacatccttcctttctcgtgttcaaatgccaaccggttgtgccgttgatgagcgcgctgttgccctcgagggacgtgcggtcagtcagtgtttttgtgttgcaaatcagtgttaattatgtacgaacaattcctaattgtttttcagggtcaagatcgcttcggagagaactgtggtcaaggcaaatgtgcgtttctgaatgtcacgtgcaaccttcttcaaatgactccggtcgatggcttgccgaatgcgcgtcatttcacaatgtctttgtggaaaaacatctcggatgatgatgacgacttggttcagtgcggatggaaagcgtttattgtccgtgtcatttcagtacttctgtgtttttgctacccgcgccccccgaaaaatattaaaaattcatattttggatttgtcaaggtctcgtctcatcaatctcacgaatgtggcgtttgttttgacatctgaacacctgctggtcatagatttaaaaaatatctatgatttttttaaatttttcgagggggggggtagcaaaacaaggaactatcgtaattttttttatttgtttaattggcaattgcacaattttttaaggacgatgtcgtggttcttctaaacaaggcggaaagcggtcctgaattgttggttgagcaatgttggcaaaagggcggtggcattttgaacttgaaggatttgcttttctacggcctcctcgggtgcgtgccaacttccgctgtttgcttgaaaatggcacaaactgttgatcccccccccccccccatcccactttcagaggtggtctcctcattttggctaccgtcctgacaattgtgattgtgctggtggttcgtcgacaacgaaagtctgcttctcatacggttgcgggtgacgatgacatcatcgatgacaaacgtgagaagaagaaaatggagagaccagcagctgcaacgagaattgtggtgcacagttgtcgcatgggacaacccgcagcggggggaaatctgagtcaaatgtcacacgaaggtgattcggatacgatttga

SEQ ID NO: 76206 - DNA, 2059 bp, Heterodera glycines
caagacagtgattttgatgacgtaaatgaaattatggttactttaacgaaagaagaacgtaatgaaatcaaggcaaatcataaaatatatgataccgagcttgcaaaaaacaaaaaaaaatatgaacaggttgatgggaaaaaaaataaggaagatgcaccaggcttgtgcactgatttaaggtgagtttcttctttggcgggcgggttatatatatacctaaacattttttgttgggttaaaaactttaaaagaaataataaaaaattatatatatatatatatatatatatatatatatatatatatataatatatacagtatgtaaaaaaagaggactttgggtccctctcttaagaatctttcatctttttttctggttacagtcatgaatccgggccctatcaaaaataaaatcatggctattatcggctttttgggcaaaattgttgcttttaccaaactgttaattgttatttcagaaaacgggaaagcaaactcaaaggagcttcgaaatatgcaattgtgattataaatctttgtgaaacaaatcgtgaacaaacctttgcgccatttagtaaaaaaggaaaaaaggaggctgctttatatacgccagcaacaattaaaaaagtaatggaatattgaaaaaaatgcttttttgtttggttttggtggtgcaaaattttaggttcttgaagaaaatttggaatttgttacgattgaccaaaaatttacgcttacaatgatctttaggactaataaaataaaaaattctaagaatttaaaaattaaaaaaaatgcaattacgcactctgtacacgtgccgatagatgcatgtgcaaatttaccaatttttaatacaaaaaaaacatttctcatttaggacgctgatttattgaaagcatttatcaaagatgctagtaataattttgacgacgtttggacaagaaacaacgaatttataaatgatatggacggcaaagaccgggttgtacgaatgctgaccgaggacaattatgagagactgcgttgtgttttagtatattataatcatcagcatggtaatgtaattgatgatttggatcggactataacagaagaaataaaaaagaaaaaaatcccagccgacgcactcgcattgctggtaatggaaaaggctaagtgggagatttttctaaatccgctaaaatccgtcatcgaaaacaaagcaaaaaatatggactaaaaatttttaaattttttatccaaattcaaaatttttggcacgaagattttttttccttaactgtggaaggccggcctaaaacgcatgaaaacttttggtggaaatcaataattatcgctttcttttgtatttttccttttaaattgtttttttaccatgtttaactattttcgatatttttagcttaaatttaatgaaatatgaagaattttctaaaattttgccatcaatttgaaaaattcatttccatatttttcacttttatcggtataaaaaccaaatttgtgggtcaccaccgcccccgcccagtatggatggaatttcacagaaattatacaagaaaattttcattattatttcaatctggaaaaatccatttcgcatttgccaccgaagcccagaaaaaacttctagaactctgtaaaattcagagattggcccgtttggtattcattgacgcgctctatggacgaccatttctgctggcactgctgttacatgaaaagttggaacgtctgtactggtctgcatcagaacaatggccgaaaggccagaagacaccaaatgataaagtcaatgaattgagtgatgcgttcaacgacgcgtcacgcctgttcatattgcatgctccagttcagctgtgggaaattagtaaagtgtacagcgatgccatcaagaaattcaaaaaatctgaagtaagatgatcgtcaagagggttttaacaattatagggaaaattccatgttttaggtaaaacttgttgatcgtcttatggaaatcaaaatggtttttgaaaagaaaaaaaaaattgatgaggcgttcgtgataagcgg

SEQ ID NO: 76207 - DNA, 559 bp, Heterodera glycines
atggacaatcatcgccgaaagcgcttcactaacttttccattgaccatattctctccgagcccaaaaagccccgtcaaggcttcctgatcaatgaacatggcatagtacacttccacgactcagttcaacaagccgaaggagcatcgaaagtggccaaagactacgttaaaaaattggagaaaaacatcgagcatatggccaaattccactatgtcaaagtcaagtcaaaattcatcattaccgacttgccgagcacgcctgaggcaatgtggacctggactttcaaacattatatcgaggaggcatttgctgacagccgtgagcgcaacatcgaacctacacacctcggctgtatgatcagcagtcctctgttgaaaggcggagacatctcaaccccaatacaacaaatgacaaacaacacactcgacagcattctgtaccagtacaaaaaagtgacacagaacaatcaactgaaagatgtgacgctgtggagagaacccttcaccattaccataacgacagtggaccgaaatggactgggattgtctaagaaaaaat

SEQ ID NO: 76208 - DNA, 1047 bp, Heterodera glycines
atgaaacgccctaatcctttgaaccttccaacgagtgagaaaaagccaaaacttcgtcgactcctgccggctgaattgaacaacgagcagatcagtttcgtgccattagtctgcctatttgccaatgtgaagcggactccaatcggtcctgtttgttaccaattcgagtgtttccgtagtcagcgccaaaagtgctttgaatatttggtattttaccaaatttattattttattacataaattatttatagaagggtgttattgcagtattcgatgtgatgtttgaggagaaaaggacaccgaagaagaagaaagtgtggagactgcatctacaggaagaactgccgcatgagctcagccgaaatgagcttctacactacctcagttacggacgactgggaacgaatttgttcgagacttattttgtgatgagccaagcaacaaatgtaagcgaaaagttttaaatttttaatgacaacacaaaatttttagtcaattgccattgggaatttgtttgggcttctgctcgattttgcaatgagctcaccaactccttggctcatgaaacgaccaatttgctgtggaattttcttccgacaacatttgccatggattctgcaacaaccgatgaacgtaatgctttctcatggcttttttccggaggtccgaagtgatggttttgaatttttttggctgttcaacccacacttgaaaaagtatgctgggtatgtccgaattctccctgagcttagtcagcctgacaatttgcattttttccttagcattttctaagcattttacttgaccaatttattcatcattatcattacatacagatcggaatttgtcgatttttccattttctcaataaattgttgaaatgaatgaccttgtgacatatgatacacaaaaacaatacaatgtggggcacacgttgacactaattgggattgataggaacgaatattttttcttaggcccattggaaacttattcaggaatgatgacacaatgacagatggtattttttgggctaagctgtcataa

SEQ ID NO: 76209 - DNA, 439 bp, Heterodera glycines
  unsure (1)..(439): unsure at all n locations
atgagccaagcaacaaatgtaagcgaaaagttttaaatttntaatgacacacanaaatttttagtcaattgccattgggaatttgtttgggcttctgctcgattttgcaatgagctcaccaactccttggctcatgaagcggccaatttgctgtggaattttcttccgacaacatttgccgtggattctgcaacaaccgatgaacgtaatgctttctcatgacatttttccggaggtccgaggtgatggttttgaatttttttggctgttcaacccacacttgaaaaagtatgctgggtatgtcagaattctgcctgagcttagtcagcctgacaatttgcattttttcttcagcattttctaagcattttaattgatcaatttattcatcattattattacatacagatcaaaatttgtcgatttttccattttctca

SEQ ID NO: 76210 - DNA, 669 bp, Heterodera glycines
atggaaatgaccagggatggcaccaaattgaaggtgaggctgctgtttgcttatatcatatcgcaatatatgtagaatattgtggcaatatttttatacaaatttcaaaaaatttattttttaaattattttttcatttttaaataaattatttaattgttgccagatgagtgcctgtgacgtggacaatgtgtaccagcattggaccttcaaggagtacaacgaggccaaggcgcgcgagtacgcaatgatcaggggcggtggcacggacaaaaatggcggaggcctttgaatttaaatggcaaaaataataattaattaacctttaattgtatttataaattttatttgtcccctccaccttctcctttttttatgttcttgttctaattacctaattaacttcattcatttcccgcattccttctttcgtactttcaccaaaatcatcacttaagaattgtgcgcataatttattattatttaattttgtattattatttatttatttattggtttttttaattatttttcatacctatattgtaataatgcctctctctatctctgtgtttgtttttatgtaattgtatgtatgttatttttgtttttcatctcattatgaagattatgataataatatgatatggttgttatgatgcaaataaa

SEQ ID NO: 76211 - DNA, 279 bp, Heterodera glycines
atgttgaaaaccgttgtgggtattgtccgcgaaacattggacagcgaatgggccgaaattgacgaaatggcaccggcaccgaaaaatgaaaaatcgccggagggagaggggaaagaatggcacgacgacgcagcgaatcgatgttggcacattacgaaggatggcatcgaaaagttgaaggcaatgaagctgtacgagctgctctacgagcacatccttgaaaagcatttcgacaacagcaatgacacgacaagcaaccgccaattagtggcacagcag

SEQ ID NO: 76212 - DNA, 321 bp, Heterodera glycines
tttctcatccaaattaatcattcttggtattattcgaaagcattggaaaaatgctagtatcgtgcaaattttcaaaaattttttatttatgcacaaaaaaatcagagcaaaaaaaagttcgaattgctgggtttttgagttccttctggccataacttttttgaaacttaaccaaaatttttgagattttgcaaattaataataaacacatagagttatcgaacaacaccaacaattcttaatttgattgacagtgaacaaagttatggttcaaaaagtcttccgacgacgtttcggccgacgacgttttggggtgcaccg

SEQ ID NO: 76213 - DNA, 1306 bp, Heterodera glycines
atgcatttggacttgaagccacaaaatttgctttatgtaaaaaaggaaaatggagaggattcagtgatgaaagccatagatttcggaactgctcaattcattgttgaagaggaggatgtacaacgacagcagatggcaaacttttgcaaatggttcgtcatcaatgacccattgaccaccaaatattacgaggcaagtgccacccacaccaaaaaaagataattggtcaattaaaccaaaacattttataattctaattggccaattaagctaaaatcttttataattctaattggccaatttagcctaaaaattataattttattttttactactaaaaaatttctaatatttcgccaattaagccaaaacattttatatttttaattggccaattgccaaaatatttataattttaattggcaattaagccaacaaaatttaatttactttatatatctatctgtttaagaaacaaacgaaaaatatttttcattctttgtgttgggcttttctccaaaatcttctttaatcctatccccctgatttctatgcgtaagaattaaaatttaattattttatcaatgaatttataaaaaaaaatatttttattttacagagccccgaacatcataagctatgcaattggggctatatgctgcataatgagcgttcgatgcggctcagttcaaaaacggacatttgggcgtttggaatcattgcctatgaaatggcatattttgggctgaactttgggcccaaattggagggaggagaacagcagaaaatatgtgccgtgactaacaacgtttgttaattaattaattaatggatgttggaaaataaaacaataaaaaaaataatgcgacaaaaatgtgtcaattaataaaatttcagaaaatagaacacaacaaattcgtcgcttggttatggactattttcagtgccgaacgcgatgatgttctgtttggaaaaaaggtggttcaaagaatgggcactcaatttatttttgccaaaatcattcaatttatccgttttaattctcaatttcaaatgctaattaatatgactcgaaattatatggactaaaaattcctgaaatatggactaaaaagctcaaaaatggccaaatatggaccaaaatatggactaaaaactgacaaaaattaaattttaaaccatcaaaattccaaaaatattcaatatttgcttaaacaaacttaatacatctcaaagaaatttttgtaataatctcattctgacgtcaatgaaaattttaggaagaagcgaaaaaatacctaataaa

SEQ ID NO: 76214 - DNA, 791 bp, Heterodera glycines
ttttctgctgttctcctccctccaatttgggcccaaagttcagcccaaaatatgccatttcataggcaatgattccaaacgcccaaatgtccgtttttgaactgagccgcatcgaacgctcattatgcagcatatagccccaattgcatagcttatgatgttcggggctctgtaaaataaaaatatttttttttataaattcattgataaaataattaaattttaattcttacgcatagaaatcagggggataggattaaagaagattttggagaaaagcccaacacaaagaatgaaaaatatttttcgtttgtttcttaaacagatagatatataaagtaaattaaattttgttggcttaattgccaattaaaattataaatattttggcaattggccaattaaaaatataaaatgttttggcttaattggcgaaatattagaaattttttagtagtaaaaaataaaattataatttttaggctaaattggccaattagaattataaaagattttagcttaattggccaattagaattataaaatgttttggtttaattgaccaattatctttttttggtgtgggtggcacttgcctcgtaatatttggtggtcaatgggtcattgatgacgaaccatttgcaaaagtttgccatctgctgtcgttgtacatcctcctcttcaacaatgaattgagcagttccgaaatctatggctttcatcactgaatcctctccattttccttttttacataaagcaaattttgtggcttcaagtccaaatgcataat

SEQ ID NO: 76215 - DNA, 246 bp, Heterodera glycines
ctgacccacaaaatgtccagcccacgaaatgtccaagtctcgaatttgagttttttattattcagatgggcctaaggttaggcaaggggtaatataaagggtatattcgtattcagcgaccccgaaaaccctaaaaatcctaaattagactcattttgtttttataaattttgaaaaattttggacatttcgtgggtttttactcttttggacatttcgtggcttggacactttgtgggggtgcca

SEQ ID NO: 76216 - DNA, 1036 bp, Heterodera glycines
atgtccaaagaagaaattgtgccaaaacagcaaaaattgcccatgggacagtgccattgtggacagtcaaatttatcggaaatgaatgaagcgcttgaaatgacaaatttagtggacaacgcaacaattaaacttaagctacaaaaagaagaaaagccaataggcgaaggatcattctcagaagttcgttttaataaagaatttagccgtgtctaaaactgggcttcgatctgtcctgatttatcagatttgtcctgatgtggaggtaaaggccaaaatttgttctgatttcttaaataaactcatgaactttttgaaactttatggcagaatgtcacggttttatcaaggaaatttgcgcaaaatttggtcatttttggacaaaaatctgttaaaaaatacacattaaaaattacaaatttttccctgacggcgcctatcggcgccgccggaccccatcccctcgcccattcaccaaaagttttttgaaaaatgcgccgcacaaaaatgttaaaaatctgattttttgatcccgaacgatttgctaatttcctccacaaaattattaacgatgaaaatcggaggcgaaaaaatataatttttattacattttttcgtcgaataattttaaaaataactgatttgaagcaatttcgcaaaatgttttgattgtcgaccgcaaaatttgattttttgagcccaatgttctgattttgaaaaattttcgatcgaagccccaggtctaaaagataaatatttaaatcagagtttttaatccaaataaattcaattgtttaatgtctttaattttttaagccaaattttctggctttttcatggcctaatttttttaaaggtgcagcatgccgtattgtacgcaattggtgcccgtccgtacaacaaatgtgtggcattgaaaaggacttacatagactgggaaaccagtgattggcaaaagcatgtcaaggagtggaaaattcagaaagcattcgatgcattgccaaaaaatgagcgagtcatcaaattaattgcttag

SEQ ID NO: 76217 - DNA, 1360 bp, Heterodera glycines
atggattttgctaattgctcttttggcggtgccaatgttcttccccgttggatgccaaagtgtcgccacattgggcgcatttctatcataaattgtggcctgcgctccgcgttgcaacttgcccacattggttcggctgttcaaattcgtgccaaacataatcaaattggtgatctgcaccgggttgcatttgaatgcactcgattgactgagcttgaccttagtgccaatgaggtcagtttaatttgtgctagtgtaaagccttaatgttagattattttaatttgggataaatttataatttggtcacccaacaaaaaatataaataaataaatttctgtataatgccggccggataatttatgggcaaactcttctctcaatctgtaaaggggcaggcatgagcttgccaataaattggaaatatttaaataattccattaaaaataatttttttattgtgaaattttcagtttgttcgaaaaatcttgaaaaaactttattggtcactaaaaacttcaaacttaaccaaacttcaattatcctacctctattttatgacacagattgccaaaatcggtgcccacacattggcgcgatgccattttttacgtttcttggacctaagtgataatccgatgggcgagttgccggacaaattatttcaaggatgccgacgtttaaaagatttacgattggatcggcttggattacgggtgaacatttgaaaaataataattttatatctcctcagcaggatgtcgcaattggattttgattttcaaaaagaacctcttcacaacaaaagttttatgaaaattaattatttatatttttaaaataattaaatcaattttggataataaatttaatctaaaatgttcaacaatttttgtgtatagcgaagagaaagaaaaaaaatgccatgttttctctgaccataacttaaatcatggataataaattagggctaaacggttaaaccaatggagtaggactgagtaaattaattaatgatttcattagaaatccattttttttactgttttgttcagagtgtccgtgctgagctgtttctcgggctgaacgcactcaaatcgctttctctgtccggaaatccgttgtcccgcatcgatccgttcacatttttgcccgcccggtcaatccgcgctttacgcctcgacaattgcacattggcacaaatgccattggcagtcacacaatgttgcctattggacaggtgtttttttttgttttgttttagtcgccaaaattagccgttggtcttataagattaaaaaaaatttttttttcggaaatttatttttaataattcaaatgaaatgtaattaaaagtaa

SEQ ID NO: 76218 - DNA, 1681 bp, Heterodera glycines
atgcccgccccgctgttggcccttcttccccgcctttcccacttttccttcgccaacaatccgttgttgcagctgcccttggcacttttcctctatgagcataaccgtgccgaagaggcactgctcgaagacattgtggacaccttggtaatttgcataaatcgatcaccattttaatccttcgagaaccattaaatgattttattaacttaaaaatgaatcaatttccaatatttattattaattaattattgtttaattttgccgatcaaattgcccgtctggcgcttggagccctgcacgccctatctttggcacttccatttgcgcaatgccagctctgcggcacttcgtcgtcgaatggctgcgtggaatgcgttccgaatgcaccgcgacggtttagcgcattgtgaccaactatacgaaacgatcattgacggcattggcatttacaggcaaaaaaaaaagacgaaaaaatatgtattaatttatccaacaaatttttaaaattaaagtcctggtcatatgtttgtgatcacggatattgtcctaactttataaatggaataatttttttggtgatctgctatgaattctgtataagatgcaaaaactgcgtccagctctgttcagaatcagtagtagacgagttataagttctttaatttcccatgatatgcaaaatgatatattactttttaaaccgatttaaaaactggttaaactgattttttttttgaaaaatgccgaaacaggtcaactgatatttcaattaagctatttttgaaactaaaatcgttaagattaactaaaaactgataaagtagtgccctgtttgaagtcatcataaacatatgatcatgactgtaggaaattgaacttttattaagttattttctttttttttcttttttaatttaagaaatttatatgggtttttgtcttttcatgcgcaatttttattttaaaaatttttagactttttgtagggaacttcgtgaacacaatggttgtgaggcgactcgtcggctgcgttcagttcgcgctgatggtaaaaatgctgtgggaattcgctgcgattcggcaacaccaagcaaagcgacggaaaaggaagcaacaaaaaaccttggctttaactggcaccaaaataatgccaacaaaaaaccaaatgtcaaaaaccaagccacgtcagtaggaccatcagcatttgcctacggtccaaatggcacggatactgtcattttgggaagtgatttactgtcgactaatgcctgtcaaaccgcatacagtgtgctgccaatgggtggaagtgcaagtaaatcacatttattccgcacaaatttttttattttttgaatttccatttaattttcaacgttttcgcttttttaattttatctttttccgaattcatattttagttcatcattttttggcaaaaattcaaaggtttttatcagtttttgaaaaaaaaatgctaaattattaatttacaattttagacattattttttgaatgaaaaaattttaaaaagaaaaaaagagatatttaaatatatttttttctgcgaattttaccattttgtgtcttttttttgtatttttggtgtcataatttacgcaaataataatgatttttttcatataaatgacaattttttttatttattcataatttcta

SEQ ID NO: 76219 - DNA, 85 bp, Heterodera glycines
atgaacaactttgtgtcattttcaactttgcttttgctcattggtggtttcatgtcatttggtgatgttgacgggatgtataatg

SEQ ID NO: 76220 - DNA, 507 bp, Heterodera glycines
atggataaagtgttgatgagatggattaatgctaattgtaattcatcaagttcgaaaacttctgatttttattccggaatatgtgtattccgacagttcattctggtgccgatttgtccatatgggcgactcattttggtgataaccgtccgtgggcttggagtttcattggccggcatcatccggcaattccagccggtataaaaaaaaagccaccaaatgaaaattttcaacaaaaaactacccataactttgcttaaacccaactaaaattttaattctttatatcattcgatagccctaagagagtactctattagctctccttatttaaaaaaatttggtcgagtttgaacaaagttatggccaaaagtaaacaagcaccaaaaatttttggccataacttttttgaagtagacataccttttttgaaacttacaaattttaacaattttgcaggctagtaggaaacccagggggtatcgaatgagactcaagattatttaa

SEQ ID NO: 76221 - DNA, 224 bp, Heterodera glycines
gtctgaggccgcgaagcggccttaatagcccaacaaatttagaaacgggcgcgaagcgcccgtctgaggtctcgaagctgccttaatagccaaacaaatttagaaacgggcgcgaagcgcccgtataagcccaacaaaatttaaaaaacgggcgcgaagcgcccgttcgaggccgcgaagcggccgaaaagcacaacaaaaattagaaacgggcgcaaagcgcc

SEQ ID NO: 76222 - DNA, 1242 bp, Heterodera glycines
tcctcttttaatcagtattgtacctcttctaatcacttttgtatcttttatcacttttgtacctctttaaatcacatttgtacctcttctaatcactgttcttcctcttttaatcactgttgtgcctcttttaatcactattgtacctcttttaatcacagttgtacctcttttaatcacagttgtacctcttttaatcactgttgtacctcttctcacactgttgtacctcttctcatcactgttgtacctcttctcatcactgttgtgcctcttctcatcactgttgtacctcttctcatcacttttgtacctcttctaatcactgttcttcctcttttaatcactattgtacctcttttaatcactgttcttcctcttttaatcactattgtacctcttttaatcacttttgtacctcttctcatcactgttgtgcctcttctaatcaatcacagttgtacctcttctaatcacagttgtacctcttctaatcactgttcttcctcttttaatcactgttgtacctctcctaatcactgttgtatgttcttatcactgttgtacctcttccatttacttttgtacctcttttaatcaccgttgtacctcttctaatcaccgttgtacctcttctgaccaatgttgtacctcttctaatcacttttgtacctcttctaatcgctgttgtacctcttctaatcactgttgtaccacttctaatcactgttgtacctcttctaatcactcttctaatcgctgttgtacctcttctaatcgctgttgtacctcttctaatcactcttctaatcgctgttgtacctcttctaatcgctgttgtacctcttctaatcactgttgtaccacttctaatcactgttgtacctcttctaatcactcttctaatcgctgttgtacctcttctaatcgctgttgtacctcttctaatcgctgttgtacctcttctaatcgctgttgtactcttctaatcactgttgtacctcttctaatcactcttctaatcgctgttgtacctcttctaatcgctgttgtacctcttctaatcactgttgtacctcttctaatcactcttctaatcgctgttgtacctcaaaatttaaaaaacgggcgcgaagcgcccgtatgagttcaacgaatttaaaaaacgggcgcgaagcgcccgtccaaggccaacaaaaattgaaaaaccgggcgaagcgctcgactgaggccgtgaagcgg

SEQ ID NO: 76223 - DNA, 316 bp, Heterodera glycines
tgattagaagaggtacaaatgtgatttaaagaggtacaaaagtgataaaagatacaaaagtgattagaagaggtacaatactgattaaaagaggaagaacagtgattagaagaggtacaactgtgattaaaagaggtacaactgtgattaaaagaggaagaacagtgattgaagaggtacaaaagtgatgagaagaggcacaacagtgattaaaagaggaagaacagtgattagaagagatacaaatgtgatttaaagaggtacaaaagtgataaaagatacaaaagtgattagaagaggtacaaaagtgattaga

SEQ ID NO: 76224 - DNA, 434 bp, Heterodera glycines
atggaatgcgttgaagtgcaaattttattattcggaaaagctcgggagatggcagaatgccaggaaattcgccagattttgccgaaaagtttgaccagcacggaactttacaaccacatttttgataaagtatttttaaaatttcaaaaatacttttttatataaaaatgcaataaaataagactaattggaaaattttcgcagattttccccgctttaatgccaattcgaaattcgtgtattttggcagtgaatcatcgctattgttttgaaggaagagacgccctcggagggacagaaaatcgcatcgaattggaagaaaactccgaaattgcgataattcccccaatatcaggcggatgaaaaagcatcagctgggtaacaactgctgattggacaagccgacttttgcggattaagtaaattgaaataaa

SEQ ID NO: 76225 - DNA, 637 bp, Heterodera glycines
atggcgctcctgggtggatcccctccacactgccgggaccactggaccaaggagagtccaagtccgtcggtgaagggccaaggagagcccgagggaccggtcttccgagggaggcggaatgtgatgccagaaggaacggagtgtgggagaaagtgggataaaggacctgagagaacctctaaaggaggcgcccgtagctcagttggttagagcacggcacggattgctggggtcgtgggttcgagtcccaccgggcgagttaccttttatgttctacattgttattaaatgtcaaccatcaaacaaataaattccaatatataataatataatttttattatttttatttcacatttttaattaaaacatagataattcttcgttttgcatgcatttccatttgaaatttcgtctttctttctcggttcatttattatttaattattgtctcttaatttgataatgaaccattaaatgaattttccgtccatttctttaaatttctctttgtcagatggcgtgccaaaaaagaagccgaatttaattgcatttgaagtacaaatgcggattcaattagcagcagcaggtgttctcggcaaattaatttcccgatttccaattaatgcatttcattga

SEQ ID NO: 76226 - DNA, 380 bp, Heterodera glycines
atggctgaaagtggttgccgggacagaagtcatctgacgcttgatttaaaaggtgatttgattttgcctaattgatccgccaaagtttttgataatttggtaaccaacgtcataacggcatggtttgagtttttggagtttttgaccaattctgacaaaattgtaaggcactaaaactgggttttcagatggaaatgaattgagtatccaaatcctaaatcctaaaaaaatatataaaattttataatacaaaatctttaggcttaaagccaacgccaaataatgacagtggactttcaccaatttacacggcaatgccattgtcgccagaaaaaattcagtgtaagtatgattatgctgtgctgtgtttctatgtttaa

SEQ ID NO: 76227 - DNA, 526 bp, Heterodera glycines
atgaatttagaccgagtatttgtgaatgatagaagtaatgataatgaacagaatttggaatatgcatatgtttttgataatgattatgaagtagttgagagcagttatgatatattggaagagcataattatagtaaacggtcaagaatggatgttgttggtggcgaaagccaggtatctctgaattcagatattggtattgctggaccgtcacgtatgagtgatagtcaatttgaagaaaggagaagaactgagtatttgaaaagaaagagagaacgtgagagaatgagaagagaaaacgaatcacaaaaccagagagttttgcgtttagaacagatgcgagatagaaataatagtcaacgaacggaagaaaatgcaaatgaacgtcgtttgcgtttagaacagatgagaaatagaaataatagtcaacgaacggaagaaaatgcaaatgaacgtcgtttgcgtttagaacagatgagaaatagaaataatagtcaaagatcggaagagaatgcaaatgaacgtc

SEQ ID NO: 76228 - DNA, 679 bp, Heterodera glycines
agattgaagcccgaaccgactcattcaaacagacggccgaaacgggacaacgtctgttggacgaagacattgacgagtcggacgaaattcgacagtgccttcaggtgtggcggaaaaatatttaatatattttaaatggcataaatattaaaggcaaacaatatgtttgaatgttttttataaaacttaaattaattttaatttttaacatctcgaatatagagaaaggtttggagaatgtttataattgagtatttagcctttcaattcttaaaaacaagtgatttcgatgaattgatcaaaaatcataaatttcacaaaatcatagatctctgaagtcattctgtaaatctgatgccatattcggaaaaagtaactcaaagcaaataagaaatacgaacataattatgagacaacctaaaacatcttttaaaaaaagtaatttctgaattttttcaccgtttgatgaatttttttttaaaatttttaactcttaaatgatcatattacaaaattgaaattttggctttcattttgtctttaaaataattttttttttgtcacagaatttggccatggagcagacgagcctgaacaatctgtgggaggagcgtcgcatactgtacgaacagtgcatggacctgcagttgttctacagggacactgagcaggccgagtc

SEQ ID NO: 76229 - DNA, 1456 bp, Heterodera glycines
aggcaaatgcgacactcaaaaagtggcgggaagagcacgcgcgacgctcggaagaagtcgtggaaatttgggagtttgtgctcagtcggtacgccgctgcgcttaagggcgaattgtgggcggtgttggaacaggtggggaaggaggggggggggggataacgatggggtatagcattttcaaggtttttgctaccattccgattttcaaggtttattcaaaaaggtcactgaaaagatttgatgaaagctttttgaaatctcctaacattctcaattaaattacagcagaataacaacacctttatgccgcttttcaggtgaccatcgccgcgctcgaccaggcaagacatgacttggccattgaatgcctgcagcaattgcatcgccgttttccgaagagtacccgcgtaacaaagcttcaagtttggcacttaagaaagccattccctgtcctttacatgtttaggcaatgcgtttggaagccattggcaattacgaagacgcggaagagctttaccgtcgcctgatcgaaggggacgacacgaatccggtaaataataaacggagttctcgagacttaatcatatttgactatcgcaattttatttttccctttggttgcttttctcagcttttccgcaagcgttgcattgccattctgatcgcgcgcggtgatcgccagttggccatccgcgaactgaacaaatatttggagattttcgccaacgactccgaggcgtggctgcagcagggcgaactgttccttcaggaggccgactttggccgggctgcgttttgtttcgaggaattgcttctttcaaatgttggaccgatgcctaaatttccaacaaaacgttttggaatttgtctgttctcatattttagccccaaaatcccacttatttgctcaaaatggctgaaattcgctacactttgggtggacccgacaatgtcgagattgcacgtgcctattacgagcggtcgctcgccctcgcgccaagtgcccaagccctgtacggcctaattctggtcgagttttgaaagcaagcacaaaaacattgcttttgccatcggttttccttccccaaccattctcacaatcgagtgcaacaaccaattgctgcatctgaagacgggcattggccaacaacgccgtcgtgacttggtccgttcggcattgaatgcgtgcgatcgagttggccaatttgtacgaggggaaggcgacgggcggagggggcgacgaaacaccgcgggaagactttggaaggcgattgtcggtggttgtgcaaacactgcgcgggtgtttcactgaatgaataggccgtcgagaagaaaaaagagcttcggctgatcgcactttttgattttgactatcatttaatgtgattttgtacaaaaatgccaaatgtcgaagaaataaaaaggtgaaactttggcattttgcaaaggcaccg

SEQ ID NO: 76230 - DNA, 451 bp, Heterodera glycines
gatggggatgctggtcagctcgttcgttccctgaaggaccaaactccgttcggactgactggcgcagttttcagccaggacaagtgaaccgacatttaaagaatgttaattttttcttgttttaagggactttctttatgaagcaaaagacattctccgtgatgcagtcggtcaggataaattaaaaaaaaaaaaaatcgcttgcaaattaaggcaatttgtatttgaatgacaaatgtaccggttccgttgttggtcagcagccttttggtggagcgcgtcaatccggttagtaggctttttgtgccaattttcttatggaatcgcttaaaattaaggcactaatgacaaggccggaggcccccattacgtcctccgatggacttctgcccaagtgatcaaagagagttttgggccgcttaccgaatggcgctacccgcacatggattag

SEQ ID NO: 76231 - DNA, 414 bp, Heterodera glycines
atgatcgcgtgtttcagcgccgccgttgccgcactctccgcgttcactttgttcagcctcgtcagcggcgagttttcgctcgccctcagcgcggtggaaagcggcggcggcggaatgccccgcgagggggcgaagcggccgccgtcggacgcgccggtgggacggaatttggtgattctgcaacacaacacgacatgtaaacattggcaaattagttcggcattttcattttgtatttatttcaacaattcatggacgacgatcgatcccatggggacaaagacatttacttttttatcttaaattaaaaaaaaactttttcggtggtaattcgtgtgatttttaaagattttatccagaatattttttagcattgtcaaggacaacccaagaattgagctcggaaaatgtata

SEQ ID NO: 76232 - DNA, 887 bp, Heterodera glycines
ccaaaggtatgtaaaatagaacaaaaaatataaaattttatcaattttttgagaaagctagacgaaacgacggtaaaaagcaagcaaaaaggctatacataaggctaattccgtaaaaaataattctaaaataaaacaccaaaacttcaaattcttagagttgatagtgtcacgggaccggggcgggaattcccggtcctccgaggtcccggttcccggattttgaaaatttatttcccggtagggctcccgggaaaaacaaacacgggtaagaatggggtattagcgaaaaattaatgagcgaaattgggggggaaaggaaaactttttgataaaaatcaattataaaatttattttttaaataatatacaaatggtccagtggttaatcttcctgctggtttcttacttctttcccttgtttcaatcccacttcagtaattaaatgtattttgtttttttctttttgtaatcatttttaatgtaccttcttccatcagcaatactatagtaaattaatttttaattcgaattttcccgaagatgcctatcggtattgcggcactcaaatcaagcaaaattttcatggtttagtcaaattttcaagttaccaaacaagataaggagatttatcaatatgcaacgcgaacaaaagaataaattaaattaaaacagaaataaaagttgattggactcataaagtgaagtagagccagaaattccacaagttttttcagtccgtctgctgcatgttcgctgataagtccgcctcgctcactgtgtcgcccgccctcacctgcgcagctcatgcttcattttctgtgcttgctggcgcagtcgctcgtaccgccgcttccattcctcatgtagcttggcgctcgccgtga

SEQ ID NO: 76233 - DNA, 183 bp, Heterodera glycines
aggttcaactatgaaaaaccccggtcacggcgagcgccaagctacatgaggaatggaagcggcggtacgagcgactgcgccagcaagcacagaaaatgaagcatgagctgcgcaggtgagggcgggcgacacagtgagcgaggcggacttatcagcgaacatgcagcagacggactgaaaaaa

SEQ ID NO: 76234 - DNA, 270 bp, Heterodera glycines
atgactgaactttgccaattgctgaaaagcgaaattcggcgtttggaaacgaaaatggactatggtttcaatgaactcggcaaaaaaatcagtggattggagaccaaaatcggtggattggagacaagaatcgatggattggagacaagaatcgatggattggagaccaaaatcggtggattggagacgaaaatcgatggaatggagacgaaaattggtggaatgcagacgaagatcgatggaatggatatgaaaatgaatcagtttgag

SEQ ID NO: 76235 - DNA, 1132 bp, Heterodera glycines
  unsure (1)..(1132): unsure at all n locations
atgggaattatcgacggggacggagtcagccgagacaatgacaagggcgagtactttcgatcaaggcgatggtcatcactgtgaagagtgaccaggccatctatcaggtcagacncaacaacaaatagactttgtatggggaaacacattaaattgaatacgatttcgacaaaggcataaatattcggacgcaaaagccaaataaaactcactttaaaccaccaattttgtgttttgccaggcgtgtcctcagcagggctgcaagaagaaagtgtccatggagggcaaccagtaccgttgcgagaagtgcgccaacactttcgacacctacaagaacataatgatgttgcaggttcttcttgttgtgcaatgcgattccccactttcctttcaggtcgaattggccgacttttctggagagacctgggcaaccatttttgaggacaaagcggaggcattgttgggggtgaaagctgaccaaatggcacagtggcagagagaggacgtgagcacaaaatttaatttcatatttatattaaagcacattttaccacggggggggaatgagtcgggtagcaattgcctattttcattgtaatttctgtgtccgaggagatttttcaatacatggacttcccttcatcgtttttcctttttgtccagcccgctcggtttgattctgcatttaatgtcattcgtttccatgagtttttgttccgcgtcggagtcaaatacgaaatgtacaatgtgagtggacaaataaatgttcaataatttttgaaactgttattttctcaagggatgctttcatacttttgcctaaattgccgtcatttatccaacacgtgcctctaattttttttcttctcttccaggacaaatcccgtctcaaatggtctgtgttcaacattcagcccgtcccattggccaagtgcaaagctttctttgagcaatcggtgcaaaaattggaaggaatttgatgccaatttcgaatttgataaaccgcaaatacacaacgtttttgcttctgatcaggcgatactcattttatccaaatatgatttcacttatttttgcaaatattttgacattaatgaatatttaaattcaaaaatgggctaaatgttattaa

SEQ ID NO: 76236 - DNA, 2009 bp, Heterodera glycines
  unsure (1)..(2009): unsure at all n locations
cagcggcgggagctcaaaaggcaacggtcggagagggtnccgccagcggggacgagaacgccccgcaattggctgccaattgcgccacaattcgaagcggaagatcggacggatgcgacggcaccgcaccgtcggcacttgtggtgagtggtggtggagaatattcaactcgtaggatttcgatttgtttgtttgttggttggttcataaatggcgacaattaccatgtgcactaggcccattttcttttttttgccattaattgttttttattgtgttatttttgttccttcactttccatcaatttacccattttcagttgtcctgtggtctctgttcgtgctcccaatgcaaatgttcggggtttgtgtcaatttgataatttaccatcgcttttcgccctcattttccccctaatttgttcttcctcagccttccctcgtcctgcaatgggcccaattgtcccttttgcccgtcgatgtgccaatgtccgaccgaatgcggctgcgactcgatggcatcattacctccattcaatggcattcaaaacagcgaaaatggcatcgaattaggggaaagccaagtgattaaaaatatcaattattgtcgtaattaatgttaattatgtgcacgtttttttgtttaaggccgtcgaaatgcagcaacagcagtacattccgtcatggaatgagcaacagcaaatcggcacatcgcagaactattacgccgtccgtccttttattaattcataaattatttaattaaaattttttttattattttagagtcagtggaaaatattttaaatttaaacatttaataaaaaatacagcgaccctctcatatggtattttaagtttatttgtcataattactccctaaggcgccgaactttggttacggtgtcaacggtggaggttacggtggcggcacggcgcttaatgccgccttcgcctcgctgcagtgtttcagcggtgatcagttggtccggacagcccggggacccgtccgcatggatcagctccgaatcggcgatttggtgctgtccatggacgagtcattggtagacggcattaacaattaataatatctttttgccaatctgtcctgatgaacatggcaatcagttttgaatttcagtttattgagattgatcacttcttaaaattcaaaaattgatcaaatggtttaaatccgaatttcgaaaccgtttcttctgaaattcagaaggttcccaaaacaatatcattttttcatttttctaatttccgtttttcttttttcaaattccgttaagctttccttctctcccgttctgatgtttctccatcggaagccgtcagaatcggcccttttcatgcgaattttcaccgaatttggccaccaactccaactcaccgccctccatttgatttgggtcggatgcgcggggcgactgcggctaattagggccaatgaattgcgcccggggcaatgcgtttacgcattggagggaggagaaaacggcaaaatgggcgaggaaatagtgtggggaagggatggagacgggacggagagagttcggcaaacggagagacgaggagaaggagaaagaagggggcagaccaggatggcattgagccgaattgtgcacattgacaaggcaacgaggcttaattgggcctaatcaggtgtaaatggcactaattaggtgcgtggccatggcatttacgcgccattgactgccaacggaaacattttggtcaacggtgttttggccagctgtcacgccaatttggccgcgcaaacgctgcagcaaacgtttttcaattggtggcgcgccctgagggaatttggccacaattttcactacgccgctttcgccccggggctatggcaattggcgggcggcgattggtggacaaatcaacaaaacgcggaccaaatgcacgccgaaggggaggacttgccgatgggggtgcatttcttagtcacagtgttggacacgctgatgcccgaatccattctc

SEQ ID NO: 76237 - DNA, 1044 bp, Heterodera glycines
atgaaatctcatctttttcttctcataacactgaacattttggcacagatatttacaccttacaaatgtatggacagaaaaggcaaaaaaagagtagagagaacttactcaaaaggatcatttgaagacgaaagagataaggaattttatttccgagacgattcttacggtatcgaaccttaccgtattaatgtcgcgcctgagggctttcgcggcacgatccaagctatgacggcaagtaaggatgatcctgtgagagaacaattatcccaggaaatgcgttggaattcaacatttcaacaactcccaccaaaccaacaaaaagaaatgtataatttggtaaagaatgggccaaattcggcctcttctagccgaagtccacagccatttcaaagttcaaaccaattcccatcaaaccaatttgggtcaggtcagtcgaacagattctgtgcttaattagctgaaaattaactgaaatggagaaatttagctaaattacgtgcaaattaatttgctgatgttttaggcactgtgccattggggaaagcatatttgggccaacaaccattggtggcctctggttcatcaagtagaccattacaatccagcggcacctttttgagaccaaatccttcgagaacttccgtggctaaaccatcattcattgtgccaaagagcacttcgtcaaatgcttttaccagttcatcacagttcaattccagatttaactcatcaggcaccttcctagtgccacaaaacccttcttcaaatgcattcgccaattcatcacaattaaatgccagattaaatgctttaaattccttcaaaatgccacagaacgcttctttaaatgctttagacaattcatcacaattcaattccggattaaatccttcaaattccttcaatgctccgcaaaatccttcttcaaatgacttcgccagttcatcatcatatcactcactgtttgagtttgagtaccctcaagtggacactcttgaatcgttattgtttgggtgcaagaagcataaaaccgataattag

SEQ ID NO: 76238 - DNA, 1153 bp, Heterodera glycines
gtccaagcagttcagagaagggctcaagaaatcggagcctctgttccgacagaccacacaataaaaaatcgaacttgcgcgatccgtaagaaaatgcgcaacaaacagaagaaagatgaggaggaggcgcaacagaaattacaaagtgaacaaattgtgcccatcccgcaacacgaacaaatccaacaacagccgtcaactttccaaacaccaacggactggagaaattcgccaacggatgacgaagatgaaatcgaaattttgggttgttatgagatcgaaagaacgaatatcagcacagaagttgaaggaaataacgagcaaaacagcgacaacaacaacattattactaccaattgtgaattggtgcattcgacgaataacgagaacaatcaggaagatgccgagaaggaaagctacgaagaaaacactgttgtggatgttgcagaagaaactgttgcaaaatcaatggaccaattagaagaaggcattgaagtggggacggtcgtcaacgaagaaatggcacagaatgtgccggaagagcccatggcatcagtgcaattggcgaagcggtcgaagccgttcaatcagaggattgtcgagaacatcggatgggtaaataaatgaggcttaatggttcaatttgcttgccactttctagcgaaaggaatttgggcgggttccaccgaaggaaagggactctttgggactgatcgaatgcattgatggcgcaacggtcggatgcaaccaacggcttctcgcttctctgaagagttcaaacccttcattgtttttgagaactgataaggcgtgactattaaaaactaaaagcaaaaaaagataatttcatttttagtttcgctcgagaaatgcgtgtggcaataaaaaaagcgaagtgagtctacaaattgatgaatttgacgaattttacaaacgatggatttcaaattatgagcaagagggagcggggaagagccacggagaggagaacagtgaacacgatgggaaggaggaaagtgaaagtggagacgaagaggaggagccaccacaaaacagccgaggacccgtgatcaaatgcccacggatgccaaagataagaatcaatttgaagcgacgtatttcaacaatttccatcgaaaaagcaaaggaatag

SEQ ID NO: 76239 - DNA, 3671 bp, Heterodera glycines
cttcggaaacaatgcattcgaggacatttgcgaaattcacatctgagatccattgtttggaggcttctcttaggagttttgcccatggaggacaggacacaatgggtcgaagtcattggtcaagaacgtcgaaattataccgaattgagacatcggattgagtcaaacccaagaattaataattcgccagaaggaaagaattttgatggtaacaatccactttcgctcagtgcagaagttggtgttttgtttaatactggtgaaatgaaattttagagtccgtggtgcagacattttgagaatcaatcaacgaggaaaaacatcgagaaagacgttgacagaacgtaaaaattattttttgtttttatataaatgagtttgacaggtgtcctgacttaaagtttttccaaatcgatgatgttaaacaaacaatggtcaatgtgctgtttttctattcaaaactcaattcgcagatttcttatattcaggtttgaaaaatgatctctttattttatttgtttctgaaagaatgcattaagggaatgcacgaacttcttggtccaattctatttgttctggattccgaccaaaaggccttccaagacatgaaagaacaggacattttaaggtaatatggtattttatcgtttttaagtccatacttccaggcctaatgggagtgatttttccgatgttgacgtccattgtttggttgtattaaatgacccagttttcttagagcacgacgcattgttagtcaatttttaattgcgcttaattttctctctgtaagtgcattgttcactcggttgatgtcgttgatccgttgcttttatctgagcgataatgcgccttcagtcaacgcaaatgtcgcaacctttaaaagtcacttagaaagagagccattctcagaaaggcattttctacgttttaaattcaattccgatatgttttcttaagtttgcctggaaagtcatctgaattgttgcgccggttggattacatttgcaatggtttactgcttgaagttgatccgcctttgcaccaccatttaagcaatttggatattttaccgcaaatttacggagtgttggtttaatttgcatttcaactctttttttgtaaaggcatcttaagataggaggtggcttcgcttgttatttggccgagaattttcgctgcccgatttattgtatttgtgggacgtaatttttgcggaatgccaccagcaacaatccctcgaaatcatcgactgtatttttgtcgctcttttggtccaaattcgaaatgtgttactaaacggtgattattccgcctgtatccattgtctgatgcgttatcctccaattgtcggtaatcttttttggactttttttattttcataattttaattttagacatccaaactttcatccattatgttcttcatttagtcgctccaaaggtataggagaggcgctttaattattgtttgattaaataacagaagttttgcgggtctcttgaaaatgtgcacaaagcataccaaacgcatttgacattggccggaaaaacgcatccgaacagaagcaaatcaccgccaatacaactgacaaggtcacgacaattggagaatgttttcaacaaaattggtacattattcaaaatgcaaatttgaaaaactgaaatgacataggatttattcatttttttatgaatttaggccgacaggcattgaccagtgcccaacaaattcacttcagcagtttaacccggaaagaacacaaaggccaagaaagccttgtaaaagaaggacaattttcgacagaattcgctagcactaaaaacatcgaagtcaaacaacagccaaatgcagcgcaatatgcggatgaaattgaactgatgaaagaacaagttgcacaactccaatcacgtcttaatgactccgatctgttgaaacaaatttgcacacagaacatcacatcattggtcaaagagctcgagaaaactgggccatttaccgaagaacagggcaaaaaaataaacaaaattcgagaaattgctgaacagctcaatcgaaggttggtgcatttaacttaatattttcaacattcattcccatttcagcagtgttccggaacaactcattccccggtatttgcatgctcttccgtcaacttctgcgactaactcaacaacgggcgaaacggaaccgattgaagttgcctctgaactgcttggtcttcgtccttccaccgcttctgaaacggtcgctcgttcacgtctttcttcgaaatctcttaacaacagcaacgaattaattgaattgcgatttgatcgaaagaagaatttctgactgtgattttttgattcgaccatttttgttttatattccaatttactcactttttgccatttttcgttgagtttgttaattttaatgtacacttggcgcaattcgaagatttaaacaaattataaatataattttctcttggaataatacctttttaaaatggtttaatttattttgttttggtttgggtcatttttgtgaattatctttttcagtatattccatgcagcaacagcggcagactttgactcactcaaatggacgagtggcgacggccatttaccgcactgctttggatgttgtgcaaaacatcagcagaattctcgacagcacggcgaacaccgcaacttcccaacaacaggtggcgatgggtgggcactttgtttacacaccgtttcaaaaaacgagagatgaacaaataaaatacaaagaaagcattctcaatttggcatgctattttatagagaagaaaagtgttgattgttttcgaaaatttagacaatcttaacgtatagtttaggtggtaccacttacaattagtatcattcggaagctctttgatgaagatttgcttagattttatgagttaaaaaatgcaatattaatcgatgtagaaattttttctttatcggtatgcaaaatttgaaatagatttaacatctcgaaaaaaaaaattaaacatcacgcattagatttggtttttctctattaacataatgaaatagtacgccaaaatggtaaatgtttttctctattttttggttcgtttctatcttttttaacctatgttcacatgtgtttttgttgttgtaaattttgagttcagtacaacattgtccctggtgattgtgtcgttgcctctgttcaaaactctaatttgactcgcgcttccatcgctccaaatttggtattttttgcattctttcgtttttactttaaaaatcattaacttagttttctccatcacacggacatttgacgaatgcacaaactatccaaaactttgcaatttctctgaatgatggtagggaattagttgatattaacaacaaatttattctcgaaaacagaattagacacctccaaaataggccaagaagacggaagtgatgacgacatcattttgcttgacacaccgaacaatcattcggaggtaaaatactctcaaattagaacaaagaatttaattcgcctcaaatccatcgtattttataggtttcggttacaaacgatgcttttgctctgcctgtcactcattcgacttcttttttgtctgatgtcgaccgttctttcgtccccccttcgccatccaccacacattttgacgctgttcca

SEQ ID NO: 76240 - DNA, 1280 bp, Heterodera glycines
atgacccaaactcatctcgtgctgggctctcctcgagagtcgctctcgactgtaagtgatttgttctgtcgctgcttttcccctttttcctccctttcttccctcagattgcggcgatgttccgttccattagccaatgttccgtcgcgtgtcgtccccatattctatccgattttgagcctcagctgcacatccttttggtcctttcttgttcggttttcccttataccctgttcctcttttcagggtctgtacgcctcctatcagcgcgactcggacaatgccgagcgacagttccgtgccgctctgaaggtcagtcggtcggcttcgtttggcccatcattaggaccaccaattaattaattgttcatttgtcagctgaagggacccaacgacgacgccgaactgagcacattggccaacctcggcctggcactgattttcctttcctccggccgagaggcccaattctacgaactgttcgactcactttcgccctcgcgcatcccttcccaagcgaattcactccgttccgcggcccatctcattcacggctttcactactttctgcacgcgcgacacaacgagtgcaagtgaggagcccaattaattaaatgaagagccattaattagtcactaattgactgttaattgaagaagccattaattagtccctaattgactcttttggcttttccaggaaacagctgatggactccattgccatctccaaggaggaggacatggcccggcttcagagcattgcgttgcttctgctcgcaaaactcctttcctccaagtgcccttctcccatttttaatcccaaatttcttcattcctctccaaagggatgtgctaaaagctgcttccgaatgggccacaaaaagtgccgacgttggccttttgctgtgggccaattcgggtgaacgccacgaagaaaaaagacaaattccattgcattttcagtgattcgttcggtcggtgacgcgagcgactcgaaaaaagcggaggaggaaatcagtgcaaaacggcgacaatttgacacggcacgggaagaaagtgcccgagaaaatgcacacgcccttctcaaggtgaaaaagatccaaatgaaccggcaaaattccaattgaaaaaattgtttttagtgggtcgacagggaaatgccgagcgcagcaacttttcgacaataagccaaagaatctcccagataattaaatttgtacacagccaagcgacatatgttttaagcaaactttattggaattaatttcataaataaa

SEQ ID NO: 76241 - DNA, 312 bp, Heterodera glycines
atgaaggaaaaagaggaggaggagaagaaaagaagagagggaaaagaaaaagagacggaaaagaagaaggaagagatgaagcagaaggacgagacggaaaccaaacgaagcctcagcgtcggaacaacgaaagacgatgaaatctcgattgtggattctgaagaaagagaaagagatgccttcgaatacccgccgaaaccgacaaacgagcgaatggcattttgggagtcgactttgaacaatgaggcaaaaaaggatttgcgagaggacaaagagaaagccttaaaaacacaggccaagctattgtcgtaa

SEQ ID NO: 76242 - DNA, 285 bp, Heterodera glycines
gcttttgcttcttcacccgtcaattttattgtcgtcatttcgtttccgttgcattttgctttctccgttgtgccattcgatctgatcaatgaatttactcgtgaacaattggcattgaaaataattgacaataaccgccgttttctgctgatccgttgtccaattgcgcgagacgaaagcaaatggacaaaatgggaagaggaagcgattggctggcgaatttataaccagtggagcagtattgagattcgaatttatgatgaggatgaaatcggagacgggtaa

SEQ ID NO: 76243 - DNA, 751 bp, Heterodera glycines
atggaaccggcaaaggccccgtgggatggccgttcggagtgcactcggcggaggtggcaacggtaagcaaaaaaacaatgaaatttttcaaaaattcccttaaaatttttcaaaccattttttcttgaaattttctttgtacaaaaagttttagagggattcaacttaatattttgcatatgatgattgagtctgtttttcacaaaaattttcctaaaatttgctgaaaaaattttcaaaaatattcttgtaaaaaatttattttttttcttgaaaaattctaagtttttttggggggagggaagaattaagaaattccatcatctcaacattttgtacatttgcagcctttccgcgtcgggccggcaagccgtacgagcgcgagcgtgggcgcaccggcgctgccgcgtcatcgtcgtcgagttggcgccgtcggtccgagtcgccgtcgccagtgattgacacgagtccgttcccgagcgccgccaccaccaacggcactcttcgacgggtaaaaaaaattttttttttttgatacgacaaatacacaaacagaggcccgtagaagaccaggatttcggccctggcgatgacttttttctttttttgcagcgatttttataaattggtgtgtaacctatataggcgccgcttgggaaaaatagaaatttttaccattttttaaaaaccatgaaattaattatttgtacagtaccgaatatgcagcgtaaaaatattaatttgtttgaaa

SEQ ID NO: 76244 - DNA, 1172 bp, Heterodera glycines
atgagaccgatcaagacacttacaaaatcagagagaaaagaagagactgatcgagaaagagagaatgccaaaagacagcgagaaatagaccgagcgagcgagagagataattgtaagctaagagaaaggagactgacagagaaagagagactgccatgaaaacttaaaaaaatggaaacacaaaaaaattttctcgaaccaattcatttttcagaaagtcggaagtctcgcgcacaaccctaacataaaatcaaataataataataatataataataataataatagtgtctgttgcgggagggtggagagatgagaggggaatgaagaaatagtactccgtttgaacaaagcaaatgatgcaaaacaaaaacaacaaaaaaaaagtgtcaaattttgtaaaatgaaatcgatgcactcggcacgtgtgccattcattggtgctacacacacacacaaaggctcatcattcattccccacgcagtgccaatgccctcctctctatccgtgtgcacaaaatccgtattcagcgccgcagatcatccatcacacatcagtagaggcggtacgagccgtacagcgagcgaccaccgccgccctgctcacgacaataattgtttttttattttgtgcaaaatgatgatgaagtgtatgggtggtggcagaagtgccattccaaaaattggacagttccgtccccctttggcataacaatcaatggcaaattgggtaaaaaatcataaaaaaactttaaaattatataaaaaaatagaaaattattttatatttttttgttgcaatttttcaaaaatatttttaaaagaaatttataaaattttaaaaaaatttgaatttttataacaaaattttttacaataaatgcattacggcactgacccatgccatttttgtctcggtcctctccgtaaaaataaatttttaaaattttcagatttttgccgggtttgggtggacggagctccagggaaaaatgcatccaacaaataatagaacagcaaaacaaacaattggcgaaacagggatgaattagcaattagaatttcaaaccaattttgacatgaaaatgccatcattcaaaaaagtcagtattcagtcatccctgggtcgcacttggcataatacaaaatgaaaaacagcaaacaaacaataaa

SEQ ID NO: 76245 - DNA, 1750 bp, Heterodera glycines
atgcaaaaaccgataatcgtaaatataattgctctcgctaatctcggtaccggaattaaactaaactctctgacgatcaccgaatgcgaatttaagtataaccctagaaaattcaatgccgcggttatcaaatgtacaactcctatcaacgccacggcattattatgggaatccggaaaaatgatatgtctggggacgaaaagtctgatagactgtgaaaatgctattaaaaaatttatagaaataattaagggctcggggtgtccgggggcttcttacaccggacacacggttgaaaatattgtttcgacctttaaattcggacatgaaattgaactgaacgagtttcgaaaaaatcgtcgtgccttttatgaacccgaaatattttgcggtttaaatttcaagcggggtaaaagcaggacagcgttaattttctggaccggtaaagtcgtaattacgggaacaaaaaacaattctgaaattgatgaaatgtatcattatattcttccctatctgaaaatggctcaaaagaatttaaagagacgataaaatttttttcatttattgggacggtccctcaatttgtggtcctgttgtgtatttttttattaatttcgctggcgggcaggtgcccgtggggcagggggttggtggggcgggggtctgagtgctcgtttcaaagttcgctggcgggcaggtgcccgtggggcaggggggttggtggggcgggggggtctgagtgctcatttcaaagctcgctggcgggcaggtgccatcgatagggaggatagtgctagtgtaattatcgattatttttatcgattaatttgcgcggcgatgcatcgcggcgcatcggcagggagtgagtggaaatgaaaaaacctcacgattttggctaattttcaaaaagaatttttaatttcaggatcaaaaaatcatcataaaaaaatttcaggattgagaaaataaaacgctaaaaggttttgaaaacaaaagattaaaatttgcaaaagttaaattgaatttcctccacctgtcactttggtgacaggtggatgattgatgaccttcccgcggcgctgcgcggcggtgaaaaaaaaagcacccgcaacaatttgggaaatcggatttggtcaggcggctacatcaaagtggtccaataggttttggaatcaaaggaatgcgcatccatcccttaggatttggttcttggcggtaaatgtccacggcggctacttcaaagggctgcgcccacgggctcgtgcgggaaacacccgcaaccaacccgcaacctttaggggtcatatactacttacatttcaatttatcatttatataactaaaatattttaaatgattaaaataatattaatttatttatagattctgcacgcgaattaacaccatttttttcaataaaccacattttctttatccattttctatcaagatcacatgaactttactatttccttaatttgtatcgcgtaaatcttataaaagatttaaataatattaattttttaagattctacaccgcgtctgaaaccttcaaatctgtaagtaaaatattttccacaaagtgctaatttttccgtttctgttgaatccattatcaaatgatttttttatcagagcattaataaatttcgatttatcatttatataaataaaatatttttaatgattaaaataatattaatttatttatagattctgaacgcgaattaacaccatttttttcaataaa

SEQ ID NO: 76246 - DNA, 919 bp, Heterodera glycines
atgggcgtacgacaaaagcaacggtactcacctagccttaccaaccccggtgaactttttctgaaccgcgacgatccattcgaaattgtcaccgccgagttgctccacgctcaaatggccgagccgaccgtcccactcagccggaagagcaaaattggagctgagaaaattgacagatggcgaattggacgaagcagcagcagaacattggcggaacaatgggacatgggaatgggagagacgagcaaaaacggacggaaaaggcgaaagaatgaggcgaaaggccggcatttctaagcagcagaaaagtgagtaaacatatggaaatggaaaaagtattgaaaggtttggtcaaacaatgaaagaaagaaaaacaaacattataaaaaatgcatttaaaagtgatagtaaggaaaagcgagtgattccctgcatcggtttcttcttctgcattagtctcgtccctcttcgcctgtcgtcaaattgcctcgcacatagcatttcgtctgaagccgaaagagaccatcttggcactttttgtactaaataataatctgatcgtctcacaatagtgttagatcagctcacatggaagcgagaaaacccaatgggtattgccaaatggtggactgttttgaagtgtttggagagtgccgagcctcgtgcatagcgagaattgcacaaatggcattcgtagggagtagggttgaaatccttgacagagagagagtcagtcgaacgggaaccgagcaattgcccccccccccgcatcgtaccccaccccgaaaaacaaatttttttttttttgaactttccggaaggttctctttgaaaacctaaaaatattcttttttaagaatttcaatcgaattttccataatattaattttcaaaaaacccaatttttcaaaaaacacaa

SEQ ID NO: 76247 - DNA, 833 bp, Heterodera glycines
atgaccgcacacattgtggacaaacacccgcaatatgcggcaaaactgttggccaaacagctcgaatttgacggaggaagctgccatttgcagcaaattgcaaaagtggaggggacggaggagacggaagtgagtggaaagggaaaaagacaaattggaaatggaagaagtgcccacaaaaataagtagctgtacaatctacataaaactgttgcatttttgctaaaatttcggcattttagctgtttaatgcccccaaaaaatccaaaaagtggacccttttgttttgtaagtttttttttgtcataagccgagaaaacatgttcacggagttttcggagcgctaaaaaccaacctgacagctatatcgaccaattccaaatcctttcacaagggtccccctttgggtttttttcgggggccctaaacagcaaaagtgccaaaaaatttttgtttttctcggaatctttgttacaaaagtctggcgattttttagctttgtttaattttaaaaaataatagtgtccaacttcaactacacctaaatgtccaactccggccaacaccgatgcgaatttgacgaccagaacaacgccgacggcaccaacaaattattcgccgtcgacggaattggacagcaacaggcgcatgggaagggacgacgacaaatgggtgacagaaaatggggctggttttgcatgagtttggcagttttcatttttaatgggaagttcgaaaattaaaatagaaaaaaatttataaaaaaacattgggttcaatcaaaaatcagagcccgactaattgttactggtgacattttttggaaaaataaa

SEQ ID NO: 76248 - DNA, 57 bp, Heterodera glycines
agcaattacaacatggaaaaaacagtttggcattagtcttaagagaataacggaaaa

SEQ ID NO: 76249 - DNA, 750 bp, Heterodera glycines
atgaaattctgtattttattatttttatttttgattgccctaattattccaattgaatcagaaaagaaaaaacttcagcagaaatcatttgatgaaatatttggagaaaaatggcaagaaaaagaagaagaaaggcgaaatgaactcaaaaaaagagaaataattgcaaaattttataaaataaaagagaaaatcaagcaaaaaggaagaaaatactcaacaaaagaatggagtaaaataaacacgaaaatagcgaagagtttggggacaaatcgaaacaaaatttataaatggattaaagaaattggactttataaatatcacaaatcaaaaactgatgaacaaaaacgcgaaattgtgcaaaaattcattgtaatgaaaaatgaatttaaacaaaacagaaaatattcgcaaaaagaatgggagaaaaattatgccgaaatttgtaagaaaattggagtaggccgtgaaacacttagaaaatggaagaaacaatttggaatgaataaatttataacgaagaaagaaaaaatggaaaaaatgaaaaaatattggcaaacaaaaaaagaaaatccgaaaatgagtgaaagggaaattgcaaaaacattacaaattgatagaaagagcatttcaagatggaagaaccaatttggagaagaaatttgaagtattaaaaacagaagaaaaatgggataaatttgccggaaaaactatcacaaaaacaaaggaaaaatatacatttaattcata

SEQ ID NO: 76250 - DNA, 417 bp, Heterodera glycines
atgcttataaaaggtttttgatgagtaaggaggacccagcacccgcctatcggcacctccgcatttattacaccataaatatttttaatttaaaatttagtaatttttcaatcagaatttggcctcctatttttcgcaggtatcgcgtatttcttattttgttcgtccataataattaatttaccacaacccatcaatcgtataattcaataagagagaaaaaataaataaaatttccgggcatggcattcttccaaaagtctcaaatcaaaaattctgccaatctttcagctctaacagccacaaagacgcaggacacagtggatcgtggacttatctccgattttgtaatccttcaaagtacggccgtcctcaatctgctttcctgaaacaattttcatattagcaagagaaaaa

SEQ ID NO: 76251 - DNA, 1074 bp, Heterodera glycines
atggccttcaatgcgctcgattttggctttgatttcctcgatggtattgcttggaagggcatcacggagtgtgagtgttttgccggtcatcgtttttacaaagatttgcattctatgccaattctgtgcatggaagagggaaaatgtaataaaaataatcgttagggttgggaattatatttaagaaaaatcgcaaaatatacatatacatacataaaatatgtaaaaaattcttaaaaggattattttttggggaaaaaatcatagagaagagtgaaataggcacaaatgccataaaacgaccaaaaggcttaaaatcacattttaatacttgaataattatttttttgatatctcattttttaaaacgattttttaggggtacattttcaaaaaaaattgaatttttctcgagaaattcctataaattttcgttatgttaaaatgaaaatatgtatgaaaaatacgataagtccacaatatgtagaaaacagaaaatatttattaaataaaatcccaacttttgttcgcaaacacaaaaaagaaagcgtttttcctactaattatagcattgataatataagtatttaaatgaaatccatcccaaataaaattattataaaaatccacccaccatactgctggtcaaaattttttttacgaaactcacataatacgtataagagctaaaaacaaaagtcctattcgtgttcagcgcataaaattacagtaccttagaatatttaaaatttattcaggggctcacaaaaggaataagtacccattttctatcttttcgtccataaaaaatcaatttaccaaccaatcaatcgactcaaaaggaaaatggaatgaatcgaagaaaaacaggagagaagacatagtcaaatatcgggcatggcatttcttccaaatttctcaaatcaaaaattctgccaatctttcggcactaacagccgcaaaaacgcaggacgacaaggtgaaagatgtccccatctctgatgttgtaatacttcaaagtacggccgtcctcaagtagccttcctgaaacaattttcatataaaaagcgcaaa

SEQ ID NO: 76252 - DNA, 1531 bp, Heterodera glycines
atgcaaatccgtataaaaacattgaccggcaaaacactcacactccgtgatgttcttccaagtaacaccatcgaggaaatcaaagccaaaatcgagcgcattggaggccatccgcggggggagcaaatactgattttcggtgggcagtataggttttaagcagtgtttatttattactgaatgaggacgagtgccaagttatggatgcgtgccaaaggctcagctaattgttgtcggaatgctccaccacccacaaaagtccttccaaaactccaccgggtgaagtgacgaaagatttcttgctgttataatttttaatcggatcatatgcaggctttttaaacttcgattaaatttaaaaaatacagtaaaattttcgctcgcaactttttaaaaatataaattatttattttgcgctttttatatgaaaattgtttcaggaaggctacttgaggacggccgtactttgaagtattacaacatcagagatggggacatctttcaccttgtcgtcctgcgtttttgcggctgttagtgccgaaagattggcagaatttttgatttgagaaatttggaagaaatgccatgcccgatatttgactatgtcttctctcctgtttttcttcgattcattccattttccttttgagtcgattgattggttggtaaattgattttttatggacgaaaagatagaaaatgggtacttattccttttgtgagcccctgaataaattttaaatattctaaggtactgtaattttatgcgctgaacacgaataggacttttgtttttagctcttatacgtattatgtgagtttcgtaaaaaaaattttgaccagcagtatggtgggtggatttttataataattttatttgggatggatttcatttaaatacttatattatcaatgctataattagtaggaaaaacgctttcttttttgtgtttgcgaacaaaagttgggattttatttaataaatattttctgttttctacatattgtggacttatcgtatttttcatacatattttcattttaacataacgaaaatttataggaatttctcgagaaaaattcaattttttttgaaaatgtacccctaaaaaatcgttttaaaaaatgagatatcaaaaaaataattattcaagtattaaaatgtgattttaagccttttggtcgttttatggcatttgtgcctatttcactcttctctatgattttttccccaaaaaataatccttttaagaattttttacatattttatgtatgtatatgtatattttgcgatttttcttaaatataattcccaaccctaacgattatttttattacattttccctcttccatgcacagaattggcatagaatgcaaatctttgtaaaaacgatgaccggcaaaacactcacactccgtgatgcccttccaagcaataccatcgaggaaatcaaagccaaaatcgagcgcattgaaggccatccgcctgatcagcaaagactgcttttcgctggttgactaatttttt

SEQ ID NO: 76253 - DNA, 1877 bp, Heterodera glycines
atggaaatgcgcgagcaagtgcacaagaagatcatggaagagttcaatgccgaaacgggcaaaggcaatgccgatttctacctgcaaaaaatggaggcacaacgccaacacaacaagtcagttttagctttctttgtcaatcaacaatgttaattataatgaaagattttctgtttccctttttcatgtttattatttcttcgcctaataaaatttataaagttattttgttcaaaactgatgagggttctttaaatgcgtttttttgtttttgttttataaaaattgccgttattttgttcgactttctatgaaaatttactgcccgacaagggtgtatgtaagttgctgcgcgacatttttaaaattctccagccaaccccgaaaaatttttcggcgaatttcctctccgatccccgacttttctctcccggaggttatgggagcaacactaatctaaacaggtcttttttgctttttatgcctctacccattttctaaacaaatttttctgttcgcttcatattaactaatttttaattattattttcttaaaagattattcagacgaaagattttttcaatcaaatgctttttccagtgagaacagtcaaccggagccgtggagggacatgccgaacagcacacagttcctggcccaactcttcgagaaggacgccaaggatggactgccgttctccctggatttgctgctgtacaagccaagcgtggaggtccgccaagtgctggtgggcagtgccgacgaagtgccacgcaatgtgccaaagccagcgaaaggcaaagcaacggaagcggcggccttcaaattgccttatgtgagggcgatggaacgcggcaaaacggagccaattctggcggagaggtgaaattataagccaaaataattaaaatctgcgcacaatcggcacaaaatataacatgtttaagttaaaaaatacagtgctgaaaaagccaccgaggaaaaattaacaaatctaacggttttttattgtatatatttcccaacaaaatttttttgtttaagagatgttttaatgggcaaataaatttcctgataattgtgatcagattagaagatgctctgctgagttcaatcacaacaatttcaaaaattctatgaaaaaagcgccaaaaatttttaattttgcgcaatttttcgagttttttataccgtattcatagcttattttttgaattattttagcctcaatgatcagacattggccaagttgcgtgaattggtgaagccaatgatggtggagttgaacaagacggaacaagccaaggcacaccataaggaaccggtgcaggtggtggactgtgcgcaatccccggaaaagttggattaaattaaaaatatttaaattgaattaattttaataaatataaatccttatttccgtaattttaaaggctcaaaaataagtttaattctttattaattgtataaataattcatttaaaaattaaaatatgaattctctttgcttttgtttttaaatttttggtatttaaaaaaaattctgccgcaaaaataaataataaataaatttaataatttttatttaaggtgcaagcaaatgttctttgtcagcgagacggacatgctgaaggccatccatacggcacttttggacgaagtgatttcatcgggcggggacgaaattaacggggaccgattcgccgccctccggaaatttgtggaactgctcattcaggtaatcgtttcaaaaattaaaattttatttataattaataatttgttgttcgtttagcgattcccgaagaaaacatttgaacgaaacccgcaattgagtgcacatcccaaggggacggcactttcatccatcggaaag

SEQ ID NO: 76254 - DNA, 915 bp, Heterodera glycines
  unsure (1)..(915): unsure at all n locations
atggccctcgtcctcctcccttctgggttgaggattgncatggcaatttgtgccattttgctatgttgttccttaccgaactcaacagaagcggcactggccgaggttggccaacagcccaagggcaacaacccgttgctgtacagtgtcgacgacccaattgttcacttggacgccgacacgtttgaggacactgtgctgcggcccaaccgggaccgggcgtacatcgtcgagttctacaaggactggtccgtccggcatcgtgtgtttgggcataggggcaccgtggagacagaacagaacagtagcagtaacagaaccatcacaccaagaggaagggcacgcgctctgccagaaaaaaaatgggatatgccaaaattgacgattttttccgtggaaatgttataaagggcaggaacccatgagcttacaggtgcactcgtaatagcaaatttcttcaaaatggcctatcttggtggccaatttctaaaatatagagaatttttttatcttattgcttcttatactagggttgggccccaactcgcgctccccgatccccgtgacaatatgccaaaggatatttttcaaaccaagtccggttcttaaggtgcggttactgtcgccgctttgcgccctatttcaaagtgctttccgaatccatcaaatcgtggccatttgtccaagtggcggccattaactgcgccgacgcatacaatgtgaaaatttgcaaggccaacgacattcctacggtgccgaaattgaaggtacagtggaatatagtacttgctacgaaacgcctttcgttttttcccaatctgagtgcctaaatcgtggtgagaggaagtttacaaaaatatcaataacagaaatatttaaattttattattattttaattttgtttgctaaataaa

SEQ ID NO: 76255 - DNA, 142 bp, Heterodera glycines
atgcttctgatcagatcagtcaatccgcaatctctgctctctcttctgtccttccgcctttgtcgtccatcagtcgcttcgctcactttcatccaccgattctccaaatgggcggcgactaaatcacccccgaggggaggaa

SEQ ID NO: 76256 - DNA, 2844 bp, Heterodera glycines; identical to SEQ ID NO: 12596

SEQ ID NO: 76257 - DNA, 2655 bp, Heterodera glycines
attcttcatgatttacattcgatcgcttcatttggatctgcaaattctggctcctttcgaaaacgcaacgtgcgcgtgggtgataatctttgcatggattggtggcttgtgccagacacgatgaatggtcaaggatatcctagacgcgttgaaaagcggcgacaacaccgaggagtcgttcacgcgcaaggcgatcaaatttcaccttcgttttgtgagttaaaccataaaaaaaataatttacacaaatatgtaaaatttggctttttgagcaaaagtgattcttaattctctaattggtagattttaaaaaatcctgcattaattccatcatcccaaataggagttcgtcagaataccgatttgttttttaggcattggccaattcaaaataattttcaagcaattacttaggtttgaatatcgcccaaaaatgtttcttttcaccattcaaaaaattaatataccttagcagaattgtaaaaaaattcttttcttttagctcgatgtccatcccttctgggatgcaaagacaaaaattcggcggacccaccgacccatcattaaacacacactaattgattctaattgatcggtcaattaacaaatacaatattttttccgcattttttgtgtgcgtccatccattttcttctcgatttccgtgtttccatctgttgtctcttcccagccaattatttttcacttcccttctctttcttccctgcgtcatctatcactctcttctcgcatttttttattttttgatcatataatttttgtgcgaggtaaagaataaaaatcaagtcttaggaccgtcgctgtctcgcagataaattcaaataaaatcgaatatacacattaaaaaatattccacaaaaaacagacttccattcgaatccagaaacccattttttctcgtcctgaatcccgaactatttttttatggcccaaagtcacaaaattcaattttgtcagcaaacaaactgaaagagaaggagaagaatcagcacacaccattcgccgagacataatattgccaaaaatttttaaaactgatattttaaggaaattctctaaaaaaatttttcaataatttttttcttgaaaattttcttttgtaatttctcaggcgttattttggcgcccctacaaagtgtccaagcctcgaaatgtccataagggtaaaaatacgaaatgtccaaaagtctaaaatgcacataaaaaccaggaaaacggatctaatttagggtttttggagtcgctgagtacgaatatgacatttacattgccccttgtctatcccttgatccacccgaacatgaaataagttcaagaattattttaaatgtgtgttgtactgacgactttagatttttctattcatttggaccaaatgattcgtaataagcttgaaagtcaacaaaaaaagtcggaagaagcgttatatttcagacatttcaaacacaaatgaggatgccgtgaatttggaagtggaacttggcgaaccgaatgccgtgataactttcgacaacgctgaacaacagactttgaacgaggctgaagtctcagtaatgacctttgagcgcggaaaaacaaattttgggggacattgcctatggttgaatggtacgtttgaagcgacgcaaaaaaataaactccaaatgttcaggatttcgttacacacaccactcaggggaccgttggagatgcacaattcgtagttgctcagcatgtgcaaacatcacaaacaatgacgaaattggagctactggaaccttgggtcaaaaagaacacaaccacccccagcgcctcagaaacaacaagtttgtttaaatttaaaaccaaataattaatgctgtgttaaaggcggaatcaaggcgacagaaaatcaaagaaagtgtcctggccgagccgtgtctgaagaccacgcgacttttagcaaaagtgaggcgatcagcaacagatgaagcatttgtggccatgagttcaaacaatgcgttgacccaaatgatgcggcgtgagaagagaaagttgctgggaaacgtcgacgtgcagaacccactggcctttgtcatcccagcaacgttacgcgaaaagggcggtgaggacatcgtcttgtatgacagtcgcaatgtcaggcaaggcgaaaaggacgttgtccttattttcggcagtgttaaggtacattttttggctataaaattctgtttttattggcattcctttagactctggacattttgcgccaatgtggcacgtggcacctcgacggaactttcaaatgcgctccagcgatgtgggagcagttcttcgtcattggtgcgtcagtgaatcagaaaatgtgcatctgtatgtggtgtcttctgcctgggaaacagcgacgctactacgaagaagcactgaactttctccgtgaacgcatctctccggaggtcccaagcaaaggtcaaccctttgaaatttacaaaaaaaacaaatcaaaaatgtgatttttagttttgtatgactttgaaaaggccgaatgtttgtttaaatttatgcatttggtttccaaaaatttaaatttttagctgcactcgggacaacaatttcgaccatcaactcggaacatagctatgcggcttctcccatttttattgacggcatttacat

SEQ ID NO: 76258 - DNA, 351 bp, Heterodera glycines
  unsure (1)..(351): unsure at all n locations
atgaatcagtggatattattctttttaattgtattatttttaattattcaaattgaaattggagcggaaaagaaaaagtttgagcaaaaaacatttgacgaaatatttggagaaaaatgggaagaaaaagaaaatgaacagaaaaagagagaaattattcacaaattctataaaattaaggagaaaatcaaacaaaaagagagaaaatattcagcaaaagtatggagtaaaattaattcgaaaatagcgaaaaaattgggcacaaatcgccaatacatttacaaatggatcaaagaattaggaatatacaaatggcacaacaaatcanaaacggatgaaacaaaaatttaa

SEQ ID NO: 76259 - DNA, 708 bp, Heterodera glycines
atggaatccttcaacgaacgtccgatcattttcgcactgtccaacccaaccagcaaatccgagtgcactgctcaggcggcgtacaaaggcacaaatgtccgttattttgggggatttacaataattttatttttcttttgctattttcgccattataaatatgttccctaattataattttggtttatttcgttttaaatttaacttaagggctccgctcttttcgcctccggcagtcccttcgcccctgtgaaattcgacgacgggcgcactttttcgcccggccaatgcaacaattcgtacattttccctggcgtcgctctcggcataattttgttccaaattgctcacattcccgacaaattgtttttgatcgctgctgtggttggcactttcttttcttttttgaatatttgtccctttttaatcattttcagcaattggctgaattcgtcactgatgatgagctctcttctggcaatttgttcccctcaatgaataaaatctgtgaaatttccattcaaattgctgtcgcaattgctgaggagtgttacaaagtgacatttgtttgaataataatagataattaattattgttatccaattaaggatggattggcccggctttaccccgagccggcggacaaagaactgtttgtccgttcccaagtttacagcacagactatgaggagctgataccgaaaatg

SEQ ID NO: 76260 - DNA, 2107 bp, Heterodera glycines
atggagcgtagtgagccgaaacagcaacaaatttcgttgcgggaattgtacaaaacggagccaagcggaccaaacgcgggaaaaggacattcgcagctgaaggacaatcggacgaacaaagtcagtggcttttaaaggatatcagatgagaaactctgaaagttattggggtttaaaacttggaaatgctattttttgctttaattttacgaagaaaaatgcaaatacaaagtaaaaagccttcatattttttggttccagaaattttagaattatgaaaaaataacaaattgtaaatatcaaatttgaagggacttgctcattcgatggcggaacgccaattgttcggattggacggacttatgccgcaaggagtgaagtaataaaaagctaaaaagtcgtttgtcccaaatcaaaaacaattaattaatgggcgattaattaattaattagtggcaatttgtgcgattcagaagccaagaacagcaggcgcagcaggagatcaaacatttgcgggaactgaacaacgaaatggcaaaattcattcacttggaaggccttcgggtgaccgaccattagcaaattaattaacgaaagtaattaattaattgcccaaattgatttggaaaggagcggaatgagaagcttttcttccgcgtgatgaggcagtttcttggcgaactgttgcccattgtgtatacggtagaaatcataccgtaatactggttgtgaactgtttgtttgtttccatttcagcccactgttggcgatgcgtgcattcattttgagtaccgacacccaaagtaagcagcagtcccccaaattaattgtcccccatttgcgactcatttgcccaattaatcccaattaaagggcccttttcctcaacatcaattggcataattctgtcagtgaaatctgtcgcgtgctcagcaattggaaatgccaagtgagtcgaagcaaatgaatgactaatctggatttaaatgtcttcggtctttaggatgtgcgtgcgattgtcgtcactgacggagagagaattttgggattgggcgacttgggagttgggggtaaaaatagactaattattctggggggtaaaaaaaggacaaattattctaatttatttgggattggggggtaagttcataatcagcagaagaatacgaaatccacgaattctttttttacattttttagttaaatttccattaattaatgaattttaatcattttctttcattttgtgccgctcaaaatgcccacgggcaaaggacccaaaaacaaattaaatataaaaaagaaaataatattccaatagtatcttatgttgtttttggtcatttaaagtgtttccctcggttttctttgggtttttatcctttttatatttaattttgtgttatttgtctgtgggtcttttgtctctgtgatcctttgtcggtgcgtcttttgtcatgcaccttccaattgtccattttattacctgttttttaaattaatttaatacgtcttttttcttctatcaataagttaaaaagttcccacaaaattaactttttaatttatcatttttaaggtgttgaaatctccgtcggcaaattgtcgctttacgtggcgctcggcggcgttcagcccaagtggtgcctgcccattcagttggacgtcggcacggacaacgaaacgttgctgaacgacgccaactacgcgggactgagacagcggcgagtgcgcggcgaacaatacgaccaattcatcgacaatttcatggtggcatgttgcaaaaagtgtggtgcacagcccaaacccccccccccccaaaaaagtgtcaaattttgacttttttgaggttcggccacaaaatattggtccaatttgaggactttggcaagaacaatgccgaccgattgctgaagcgttaccaggacagatactgcaccttcaacgacgacattcaggtgctcggcaagcattgccaaagtgccaaaagtgtgccaattaattgcagggcaccgcttccgtttcggtggccggtcttttggcggcggtgcgaattacgggcaggaaaatttcggagtcgaagttccttttccacggtgccgggacg

SEQ ID NO: 76261 - DNA, 941 bp, Heterodera glycines
atgcgactgaatgtactgctcgcaatcctcgcccccctcctcctgctaattgcaacagcaacgctttgtggtgccaccggcaaagaagcggcggccaacaaaatcggtgtcgccgccgtcgctttgtcagaggcggacaattcgacgacgccggcgccaccgccgccgccttcgccgggtggcagcgatgacaagaaaaaggacgatgacgataagaagccggacgaggatccggcaaaaaagggcaacggaacggacacgggcgacgacggcaaaaaaacggacgaagcgggcggagcatttggcgcggggtccatttttggtgagtgattatttttggatgaattggccagaaatgtggggtcgcgaagcaagtcgaatttattcaactcgccccttttcctaagtgattgtgcggtttagggtcgctcgagactgaattttctcgacactaaaacgaagctttctcgactctatcccaatgagccaaaatttgttcagtgattagtaatatcaataaaaatcctctccaactatacatcaattggtgttaggctatgcggttaagggccgctcgagaccgaatgctcgacactaaaaacccgagactttctcgacccgatcccgagacgcccctctaccccaacgaaccaaaatttgattatatttgatcagtgattagtaataaagtcctctccaattacacctaatcaaatctgattaattgaattagcaatttaactttttagttgccattcttttcggcatggctttgatgttcggactgatcaaaatgtatgtccattgggagaagcggcgcgagtcggacccaccgaactatcagatgtattgaaaaaacatggaaagcattgggccaaaacaaacaaagatttccttatttcatttgttgttgttttttgcatcatttttatcacttctca

SEQ ID NO: 76262 - DNA, 1236 bp, Heterodera glycines
atggccaactttggcacagaaaatgccaaacatttcacagcgatcaaagaacagacaaagcaaatttgtgccactgaaaaaacacaaaaatttgacattcaaaaattaacgaatgcaataacagccgcttttgaaaaagaaggggcaaaattggtggaggccatgaaaaaaggagagcatacggtaacagtgaccgtcgacggggcatacggtactttgaccgaacttttgccaaaatcaatggaattccggccttattggaccggaataaacatgctatgcttgatgaatgaacagatggataatgggccgggcaaaaaagtgatcgcaaaatttttaaacgcgactacagtaaccggtgacggaagtgccatcgccaacactgtaatgcctagcgatttgatgaaaattatgatagaactatggcacattctcttccataacgtcacgggaatgggcaaaatcggtgggccaaaatttttgaatcaatcatttggccaaggcgcaaagagtgatcggcaggaaattccgaaacgacggaactctgatcagatcatcgttcacgggcagcaggtaaattcgggacaatgcaattcagttaactatatgtgttcatctacggtattgttcagtttggtcgtgccatccccgcaatcagtggccatccgttgcgtcgccgtcggcgacggaatttgaatattacggcacgacaaatggccaacttgttccacgcgctgactgttgtagtcttggcgctgaatttgctgcgagtagtgctccgaaatatggccgatcagttggatcagccgccgattttcatgatggtcgccctggccgcaacaattcgctatttcatgacgatggactgaatgatcttattattgacatccacccttcagtttgatcggatttttctttctttgattgggatcggaatggttcgggtattgataaaaaagggaaattctcgatttagcaatttgccctggtcataaaagaattataagtgatcaaaattgggtcccgaggtttgattgaaaagtgctgggttggtggttagacaggcacaacaaatttgccattttcggtctcggctttctaaatatttctcgagtctaaatttcgcggcaagttccggtctcgagtttcaattgatggtatttgttgatttcgagcagtagcacataacattttcctctgttaaattgttttgtactagtcagtcgagaatttata

SEQ ID NO: 76263 - DNA, 601 bp, Heterodera glycines
atgatggacaacccaccgccaccgtttcgaaaccgtaccccaccggtgagattcaacaatagcggcgcgtcattcgtgcaggaatacgatagtgccaatagagaaaagatgaaggacgaggagaagggaaagggaaagagtacggcacaaaaggcggaggagagaacggcacggccgaagaagcataatggacaagacgatgatgttaatgaggggaccatggccaaaatttggaaaatattcgcaccaaaacagcagttgaagaagcgagaagaaacagtgccaacccatgacaaagtcccaaaaaatgacaacagcagcaaaagtgttgttgacgacaacaatgtgccaatgccaattgattgtgccaactgcgccattcgcctcggaggaaattgaagacaatgttttgtaggtagaggagaagcaatttgaaattttggcacaaattgcaaattagcaaaaaatgatgcaaaacttgtgaatggaatagggaagggaccttacatcagcacacaaatgtttccttttgaatttgtaataccgtaaaagcgtaatcctttccttttcttggatactgtattagtctaaaattttgtca

SEQ ID NO: 76264 - DNA, 352 bp, Heterodera glycines
  unsure (1)..(352): unsure at all n locations
atgcgaaagcacacgtcggatttgngggtagccattaagaaatgtggaaacacttcggtggctgtttggttaaatagggaaaataaatatttttgctgggacataacaaattcagagaatgcgactttttacttttaaatttttcagcgtctcgaacaaagccggcaagaagacgatgacttccagcaacagctgagttcggttcgtagtgtacgaaaagcctttcaaagtttcaaataaataaaaatgttcaggtgctcagccgagtagattctgtgaggagcaaaaaaacggaaccgaaagtgaaattggagggcgatcagctttcatcgaattgagtgatacgccttaa

SEQ ID NO: 76265 - DNA, 1680 bp, Heterodera glycines
atgctaatccaattcaaagcgcgcgcttgtgccaaagatgacgacgaatggacagcattggaatatttgaacgagtttttgatgaacaccaaagggatggacaagcagcaggaggaaaagctgcggaaatttggcgacttaataaggcaccgacaagccgaaggtgagaacaaacggacgattaattaatggcaaaatattcccaagagggactctcttctcggacctttgaggatttccttgaacttctccagcaaaagaaggcgtcgcagcggaaaagcagcaaaacttctcagaacagtttcacttccgaatcaaatgggcagctgagaaggaaaagacggataagcgaagactccgaaaatgggaattattcgaaaagccaattgggcaaagagaacagaaacgcatggataagtgacgaggaagacgagcgtggggaagaagcggacagcgaagagacgcgaaatctgaaggattaccgccgctgcatcgtcggactaatgcgaaagggaaacggacaaccggcggagggcgagggcggaagtccgttgcgcactccgaaaacgccgccgcttctgtttaagcgcaaagaaatggcccctgcctcgaagagggcgttttcaacgaagcggttgtttttcaaatgattttcacaacgatttgtttacattttttattgtttttacgtctttttatctttggaatttaaatagccttgcatttataaggattaatttattaaagaaatacattcatcgaactcataaatgcgattccattcttctgatgtctttcgttgaagctgaaccgaatgcggacgacccgcattttttgtgggaggaattgtattcgaaggaaagggtctgccgaccagcgaaaacgctaccgtaattttgaatacgatagacgaattcagcgttttttaggttagatgagccgatatactcgaacaaggttcgtttcgtctgtataagtgacacacacaacaaattgggtgaaattctgtcgttgattccttatggcgatgtgagcatttaaacttaccccttttggttcttatcccttctcttgctaccatttttggttggtttttgttaggttttgctgcactgcggcgatttcaccaattttggagatggcgaggaattggaacagttcaactccgacattggttcactaccgcacaagtacaaaattgtcatcgctgggaaccacgagttgggttttgaggatggggaggacgtggaagggcgtcgggcggacgctttgatgtgggcgatgggctcgggtcgacgcggaacgccccggggctacgagcggtaggaggaaaagccagcggaagagaactcgaaaaccaaaaggttcagcctcaccaattgcatttatctacacgactcgtccactgaggtgctccttccgcttgtaccatcagtatcaatttggcctctttttcaggtgttcggtctcaccattttcggcacttcttggcaccctttgcccggcttttcgttctatcgtccacgaggcgttcccatccacaaagaatggatgaaaatcccaacggtacagccgaggccggtggtcgatgttctgatgactcacacccctccactcggtagtcaaatcgaatggcatttgagaaaagcaaacgggaaaaacaaaagtctccacaaatag

SEQ ID NO: 76266 - DNA, 459 bp, Heterodera glycines
atgaaattaatttggctgtctcttttcttttatttatgcttcgctacagtgacaagcatattgacacggaaagtttcattcagtaacatacaaaaaatacttgcaccgtaccaaaattcaacgcctccgcccgaaaatgaaaatgccgaaaaagttggccaaaacattgatggcactatgacggttgatcaacaaattgatcaaaagcacacaactaaaactgatgatagcccggcagcaatcaccacaagcaataataacgaagagaatggcggcacaacgattcgtcaaaaaaatgccaccaaaaccagcaatggcattttgccgccaaaaacgccgaaagaaatgagactgattgttggcacaacagtgccacaaaagagccaacaacaacaaccattgaaaggaaatagcagcgcaattagcaaagcgcttacttctccggcgcctaaaaagaaa

SEQ ID NO: 76267 - DNA, 1351 bp, Heterodera glycines
atgtcttctgcatacagaagcccaacaactgttttgttttgcaaaaaacgatcaagcatttggaaggtggatgaccaacgcacctgataggaaaattgcaacttagtaataattcattcatggttcttttctgctttaatgtcccaacaaattttttcttcaaaatttcgacttttggttcgaattcgggtccgggattcaaaaataggtgaattggctgctatgttcttaaactgacaccattaacaacccttcaaagactttgacatttttgctaaataacaaaaaacttgattatatcggggagaattaatccggcactgctttgtgagaaaaatttaatttcagtcattatgttaaaataagattaaaacattcgtttcagaaaacatttttttcaaaattcattggtattctcgctaaaaaaattccttcaaaggtcaattcttaggggtgtaataatcggatttcaaggcaaaatccgattacgattatccgattccgattatggcccaaaatccgattaattgcgattccgattacgattacgattccgattcggcacatccctggtgctcagccttctccttttgataatcttcgaaaaggcatttgtgtgatgggcaatcagtggtgcgactcagcaggcaatgattgcgttgtgtgcgaattcgtgtacgatattcacaaaactgttcgtctactttagcaatcctggcaccaaaggtggtgttgctggcacacttatgggatttgaaacggaattttcaaaagtggaaaaaaaagctaaggcaagaatggcatttgataaggcaagttgaaacataaaataaataattaattaattattgatatgcgatcagatcgatgaagacaaggacaaatcaatctcaaagaaggaggctattctgtatctgacctcattgggaaacaaaaaccttacggatcagggcctttccaaagattcgtcgtggtttgatgcaatggacaaaaaccaaaaccaaaaaatcgagccggaagaatttgatcagatactctggcataaatgataaaagaaaaaagtaacgcatccagattatttattcataatggtctttaaatcgtattttctttagaaaaattccaatcaattattatacccaaatatttttagtgaattttataagtaaaccacgcacttttcattatatgagttaatttcgtattatgtccaactacataaatattttttaatttttttgatgatgaaatgctaatgcgtttattaattaaacgcaaaatgaattcatttagtgatgtttgctgattcattcatcaatctatctaaagttatttgatggaaaaacggaga

SEQ ID NO: 76268 - DNA, 143 bp, Heterodera glycines
tcgtaatcggaatcgcaattaatcggattttgggccataatcgtaatcggttttaaaaccgtatcggatttttggccataatcggaatcggcgatttaatcggaatcggattttgtctggctcggcacatccctgatatgtat

SEQ ID NO: 76269 - DNA, 781 bp, Heterodera glycines
ccggtcccgggttttgaaaagctcaggtcccggcaagtcccggtcccggttttggcaaaaattcccggtcccgtggcactctactgaaaaataataattttaattacaaatccatcattggcttttcagtccgaaatgcttattccttctcccttcagatcagctatggtcactttgctcagttcgctgggcggcggttgcacttccattgtaatttcgttaattgccacccgaaagtgccaaatcgatttgctcatcgacggactgctcgcctcgctagtggccacaacagcaggttgccaactgagcaatagctgataaactagtgcatagtgctaattacctttattctttgcttcagcgtgtcattccatccgtccgttggatagcattgcggtcggctccattggttctgcccttgcattgtccgtctacccgctcattgaacggctcgaaattgacgacccggtgggcgtcatccccgtccacgtgatcggcgccacttggggttagcgatttgggcatctatttacccactgatcacttcggttggacttgaatattttcattggtggtgatcagagtggcttttcgtccatgccattttcgtcgctcggctttccctttctctctgatcgcttcccttaaggtatgctcagtgtcggcattttttcccaggaagacccgtatttgtccagcagaaatgtgagttggcacctttaatcaattgccatgcctgtgagttgcactttctgtgccgaaatgtctgttccttctctct

SEQ ID NO: 76270 - DNA, 980 bp, Heterodera glycines
atgccgcccctgcatcgttatgaacagtttgtgcaccgcgtcggacgagtcgggcgctcgggaaatgttggcgaggcgtttgtgttcttcaacccggaagacccaaatgacatgtatatggccgaatttttgcgagacgtacgttttttgggaggatagggaaaaatgctttaatacaatcccattttctttggatttgttcagcaactcgtccaagtcaaacagaatgtgcccaaatggttgcacgaattggtggaaacccaacacaaatggcaaaaaaaaaccgatgaaatgttgaccatcgaaaaggaaacaattggcagcaaaaggacgacgcaacacaaagggacaacgacggggagaaggacagacggagcagcaacggtcgggggggacgaaggagtaaactcactgctccatagaatttcctgagggggaactcattcgaattttttgatttgttgcaatttttagaaaagctcatatgattttctcaaatcgtccttgctgattatatttttttactcaatttaaattttgcaggagttggacgaggatcaggacgaaatgcgcgacgatgcctcatttgccaactcggactggaattgacttgacacgaatggcacttaattctcacctttttgtgcacgaaaacactcaaaatgccaatttattattttattataccattgaatcagggagaagcagcactttttgccttggctttttaattttccttttattttagttaaaattaaccaaaaaagggcaaaaagtgcgtgcatttcattcgttcgttctttcgcctttgactttgattgtttttctcgactccctttcctttcagctttcatttgttgtttaatcttgcctttacttttattaacttattcctccgtctatttaatgttgtttttcatgataattgcaaaaagtaaacaatcggatttttgctgaatgccttgcaactttacaataaa

SEQ ID NO: 76271 - DNA, 660 bp, Heterodera glycines
atgaaagctggaattggtcgctctcctatgcaaaatcccacgaaaatcaaattgttaagggagtttcaatggtacggcctgagaccgattaggagaataataaattttcatgccaattaaagaaaaaatttcaaaaatttgacaaaggaatgcctgaataaaatgggtttttgttagtggattccttacgcatgggaaaagttttggtcgagcggtgaaaaagggtgtgtctcacgagcttgagcttttaatttcacttaaatttattgagccattatttaataaaatccacataacccaaaattaagaatataaaataatgatcaacgaaatgcatgccaaatttgatgcaaattgttgccattacgtgtcaatggcctaaaacaaccctcgccgatttgaactcctcagaaattcagtgaggagaaataaaagaagaacaatttattttctggataaacaattttttagttgttggaatttttttaaaatttttttaaaattttaatttttagttttctatccgacagcataaatgttcgttggtaacccaatggttgcttgagaagaagcttggttttttattagttagccattcaattacaccattaaataactgatccttgttactcaattcaatcttttattaaacacttaaaa

SEQ ID NO: 76272 - DNA, 1132 bp, Heterodera glycines
tcagtcaacgtcgagcacaatgccatctccaaagtgccgtttggcatttttgccaaggccaataatctgtccaaattgaacttcaaagagaatgaattgaccgccttcccattgggtcggtttggttgaccaacggattttatatcattcaatagtatttctttccatccttcagatttcggcacttgggtgaccatcactgagctgaacgtgtccaacaacgaaatccacgaacttccgctcggtcagttttccaccttttctctctttggctttatcttttatccctttccactcattaagacattgacaaattggtcaacctcgaggtgttagttctgtccacaaaccgactcaaaaaattgccaacacaaattggaagtctgaggagattacgcgaattaggtggaggacggaaaagaatttagggatgacattttaatttcagatttggaggaaaacgaattggaagtcatcccttcagaaattgggtttctcacagcgcttacaaaactttggattcaggtaaaaccgttcgttcccttttacttacttatcaattcatcctcgtctttttttatctttggcacttttgcattttttccatccttttttctttgtttcagtccaatcagctcacttcgctgccccgcaccattggcaatttgtccaatttggttgacttcagaataggcgaaaatctgctcactttcattcccgaagaaattggtgagaagcgaataaaagtcaaatttaataatgtattatttcgaatatttcgcatttaatcgaatccaatttgtttctaaggacacttggagaatttgaagagcctttacttgaatgacatccaaacttgcacaggttcttcattcgcctgtttctgctttcgttggaatgcgttcatcttcccccccccccttcagtttgcccttcgaactcgtcctctgctcatccctcgaaataatgtccattgagaggtgtcccctgtcacaaatcccctcaggtgtgtttatctcttaatagtttgttttccaattttctttctccagatataatcgaaggcgggcccagtctagtgatccaatatctgaaaatgcatgggccctatcggggagttctcaacatgtga

SEQ ID NO: 76273 - DNA, 300 bp, Heterodera glycines
cagttcacagtgatcgctcaatacaaaagtttgctcaaaagtggtgaatatttagtgagcgcgaaattaaaaataattttttgtaagggtaatgagtgtaacggaaaagcgatttttatcagtgtcaaagatacccaatcgatgcggataaatacagtcaactcatcagtataagttaaaaattaggggcatcacatttttcaccactcattttttccgagccaacagcgccgccccgagaacgccaacgaccgcagcaccgccaaagccaacggtcagtgccaagccgagcaatccatc

SEQ ID NO: 76274 - DNA, 398 bp, Heterodera glycines
gttgccgaacaattcttcaaatgggtcggtccttaccagcgcggcttcttttgtgacgacgactccatcagattgccttacaaaagcagcaccgttcccgattggctgcttctggtctatgctttgtgtgtgccaccattcgttgtcagtgctattcaaatgggcgtgggggcaattgttgggaaggcgcgggacggatggttatcccttgaaaaagttgggatggaacccccggggatcttttggctgattgcccccccccctttcttggcaaaaccatctttttcatcggctaacatttgccgatctttcagttcgcttttggagagttcatttgtttgtccaaaccgcccgctttggccattcgtcaacgtctaaatgactttgagtttggggag

SEQ ID NO: 76275 - DNA, 1682 bp, Heterodera glycines
  unsure (1)..(1682): unsure at all n locations
atgaatgaattaacaggaggcaacgcgtggcgacttgtattgtactttgataacagacggatggagaggtgcactgatgattttcggagacaacgattggcagtatgatgcgtatatagaaaaggttctcactttttgcggacccgaatgccggattggactcgaaattttttgccaaccctgaaaatcctacaattaaaaaaatttggtccaagaaatttctcttaatttttttcaaatggactcaaatatttaggcatcttttcgaaaatatgttaaaatatttccaaatttttgcatgatgccattagcatccctggcctcaaaattcctttaaattttgaaatttcagccttattattataaaaataatcctttttatttaaatttttaaattcatttgttgcattttaaaataaaaattcccattaattttagcgcaccaactgcgagagtttgtcatttttgttgcttcacacagcaattgttgatttaattattcaaattaataacaattgtgaaggagtaaaaagaaaaacattttatttttttaacataagcatcacttttaatggtaaaattcaaatttatttagaaggggaaagcaaatgtgagcttactttcaactcgtaagttgtacataatttaaatactttattttattattgggttttaaaattcaaaagttgctaatttttggtcaaaaaatcacaatgatctgagaattgaaagatgcaaacgaattttcagtttttcattgaacaaaagggaatctctaatatcctattttcctcacacttttccccctaatttattttagtgaggaaaatgccaaaaaaggttgttcaattgaatgaccttacacataataaattttagtccaaagtgtttacggtattcaaaactacagtatgaaatgccttcaattttccttaataaaaacgaaattttcaatgctaatttttacgcaaaaatggatgtgttgaaaacataaaatgcgattaatcacgtactttgagactgtgaaaaaaattttttgagggtttaggcaagaaaaataatattaactgagatcaaacccaagtaaattgggcaattgaaataaaaaaaatctgcatatgatttctttactctcctttcacccttattttatgcttggctaagctctcactgaccagaaatgagttttctgatcaaaatctcattctctgtaggcgctctctttggtggccgagaaggccaaagaagcggttgaattggtgaaatgcaccttttgagtaagatatattaactcattaaaattcacagcattttaacaaaacctcgagaatttctcgagttaagaatcgttcgagtcgatgatattagcacattcctttccattctagagtgaataaaagcagcaatattttgaaaaaattttttttgaatttttcatttcatttccaattttattttattttaatatttaaggaggaagcgtgcaagaaattgtgcgaaagttcgtgccttgaccagcaaaaggcgtaagttggaggtgtaatgcctaaaataaatccaaacgtttaatgattgaaaaaataaaaaacattaattaattcaaattaaatcatttagctgttactcgaaatgcggcaacacaaagcaacaatgtgatgatgagtgtaccanatgctcagtaa

SEQ ID NO: 76276 - DNA, 128 bp, Heterodera glycines
caggagaagtccccggatcagagcgcctacatgtgagaagatgcaacaacgaccggcggatggatggacgaaacctgaagagcgagcgacctgtcagaagatgcaaagataaagaagatgtctcataa

SEQ ID NO: 76277 - DNA, 614 bp, Heterodera glycines
gtataaaaggcgacggttttcttcacttttcaccagtgccagccagccttcaactcaacgcaacatcaacaccagtgcgcgccaagctcgtctacacatttcgtcgcgacaactcatcacttcatcatgagcgacatgagcgcctacatgggatccggccccgccgagcctgcaccgtcgtccggcgccgcggaagcctctccatcgtcaggagtcgcgagcgcctacatgggatccggccccgccgagcctgcaccgtcgtccggcgccgcggaagcctctccatcgtcaggagtcgcgagcgcctacatgggagcctcgcccgcgtacgagccaccagcggttggtttaagggggacacgggagcaaaagcatcactaatcttttgtttttgcagcaggagaagtccccggatcagagcgcctacatgtgagaagatgcaacaacgaccggcggatggatggacgaaacctgaagagcgagcgacctgtcagaagatgcaaagctaaagaagatgtcccataatcgtgatctgtatttattgatgtattgtacatttgtatgcatatatcatttgctgtgtattatcactttatttccatctgtgttccgaa

SEQ ID NO: 76278 - DNA, 614 bp, Heterodera glycines
gtataaaaggcgacggttttcttcacttttcaccagtgccagccagccttcaactcaacgcaacatcaacaccagtgcgcgccaagctcgtctacacatttcgtcgcgacaactcatcacttcatcatgagcgacatgagcgcctacatgggatccggccccgccgagcctgcaccgtcgtccggcgccgcggaagcctctccatcgtcaggagtcgcgagcgcctacatgggatccggccccgccgagcctgcaccgtcgtccggcgccgcggaagcctctccatcgtcaggagtcgcgagcgcctacatgggagcctcgcccgcgtacgagccaccagcggttggtttaagggggacacgggagcaaaagcatcactaatcttttgtttttgcagcaggagaagtccccggatcagagcgcctacatgtgagaagatgcaacaacgaccggcggatggatggacgaaacctgaagagcgagcgacctgtcagaagatgcaaagataaagaagatgtctcataatcgtgatctgtatttattgatgtattgtacatttgtatgcatatatcatttgctgtgtattatcactttatttccatctgtgttccgaa

SEQ ID NO: 76279 - DNA, 3186 bp, Heterodera glycines
atgccaattgttgccacgaccatttccaccactcgcaacactttcatgctcacaaccgttcgcctcactctctcctccccttttctttttctgctcatccgaccgctcttttccgactcattgcattcgctgttttgtgccgtaagtttcaaatggaaaatatccgttctttcatttgtttttattccgtggaaaaaaggagggaagtgaagaaaagtgactgattgtgaaccgaaggaaaggaaatttgagctgtcttttccctttcccacattaaatcgaaacagtccgtcttttcttctaaaacatttattattttgatgagatttcatacatttattggtttgtaaaagcaaacaattgctaaccatatttacatacagattttgttaagagaacgatgctgaaaatcgtcagcttccatcgttggggtcgcacgcagcgattgcaaaatacagtagacagacggagacggaattgacggttgaaactgaaattggacggattgtccgtttttaaacccattgcttttcagctcaattatcaaaaattgttcgccgaattgacaaaatccacaccatcttcagaaaaggtttttgcgcaggaaaaactgtcaattgcaagccctgttaacactgaatatgaagcaattgcgcggatgttagctcagagagcgaagggcgttatacattttgtgaagttggccttcccggaattggtcgattgtccaacggatggcgctgacggcaaaactcttttgcatttttcttcccaggaacacaccgacgaagacaataatgcgacaaaaataacgaacgaaggagccgatgatgcggatacaatgaagtgcatttaatatattttgttgaacaattcgttttgtcattttcatttattctgcaggcaaatgactgaaactggacacgacgatgaattcgaaaaacgcgtcgttttcgacttggaccaattggcccactcacaatcagaaccgccactgctgctagacaatgatgacgcgctaaaaattggcacccccgttggggcccatttgctctttgagagtcgttttgagtccggaaatctgcgcaaggcaattcaagttggtgctgtgtcattaaaaagagatctcttgcttgaattgcaaatgaacattgtttaaaatttctgaaggtttcacccaacggttacgaattggttttggctccggacatcaaccaatgcggtgcccatttccaatggttcttcttccaagtgtctgatatgcgttctggcgttccatacacatttgaagttgtcaattgtgcgaagagtttttccatgttttctgaaggtgggggaattggattcattgacattatcagcagctttgaaaagaaacggtttttttcaggaatgcaacccgtgcttttttcggttgtagaagcagtccgttacaaaaacccatgctggtcacgcgtcggatcgtccatttgctactttcctaacccaaaattagaacacgatcgtaagcgatagtacacagaagtttttatctttccttcctttggcaatcgcaatttggacgtttcaatttattatcagtcgctaccccgaacaacgaggacatttctgcagacttccaagtagattctgtttcaagccgtactcgctcatccaatcagagtggcgaaacttcattcacttcaacaccatcggtcgcgggcaatgatttgtcctccaaaatgcaattgcgtcgacaacaaacagaaaaaaataatacccaacaaaaagaggaggcggagcacttattggatgggaaacaaagcaaagggaaaacgaaaaagacgaggacggcatcggcacacaaaatcgcagcagaaaagggggatgggaagtgagggcggaagaggggaataaaatacaaacgaaaatgtcaatacggaaaagaccaaaaaataaaggatgaatacatgcaataattaaacgacaatccatttaggaggaacttcactttgcgcttcaccatccaatttccgcatgaggccgatgtttgctacatcgcctaccacttcccctacacttattcgcgtttgcaagtccgctttcttattttatccgcttttttgtcattttccatttttaggcaactttggagcgtttcttttcttcatcgtcttctcacaacatttacatgcaccgtcaaagacttacgagcacattgtgctcaaatccggtcccattgttgactatcacagcagcaccattggaagtcaaatgccgagaatttgttctgatcaccgcaagagttcatcccggtgaagctaattcctcgtggattatgcacggtaaacttgagctaattcataacaattgcattttaagttaaggcgtcattagctttttgctctcttcccatccgctggctgttcgtgctcgcgagttgttcatcttcaaattggtcccaatgttgaaccccgacggcgttatcaatggatggtcatttttctttcttttcgatttaatttcgttattttaagtcagcgctgttctctgtccggtcatgatctgaaccgagtgtggaatgatccttcgccggcacttcatccgaccatttaccacgcgaaaggactcctacaatacatggcgtgtttcctcctaacatttctgaaataaccctttttcctttcaggacgatttggccaagaaacgaccgtttgccttcgtcgatttgcatgggcattcgcgcaagtcaaatgtgtttatgtacggcaacaatttggaagagtcgtggcgtcaatcggaccgtgacgcggccgtcgacacctccgctgtttttcgacaatccttcgcccttctcccacaaatcctagacgaagtatgccttcgccattttcttatttttttttatattcagatttccgattcttttgctctcaaagactgtgctttttccatcaccaaagccaaagaattttcggcccgagtgaccacgtgtcgtcagtttggcattgaacacgcgtacacaatggaatcaacttattgcggctttgaccagggttccaagatgggtcgacaggtatttgatgtgaatacaaagaaggtcaattaattaatcagatcaaaatggaggacatgaagctggtgggcgctgatttggtgaaagcaatggtcaaactatgggaaacccagcagccgaccgattcgtga

SEQ ID NO: 76280 - DNA, 168 bp, Heterodera glycines
cgtcaaaggtcatcttcgtcagtttgttcttgacatgcattcgggagttagttttattttcttttcttttaagataattggttgtttcagaaactccatcgtgagttccaccagtggcccgaccccacggaacagcccgcaccgaccaccacccaaccgccggcctcg

SEQ ID NO: 76281 - DNA, 139 bp, Heterodera glycines
atggaagtcaaattgaagccctattccgatccgtcccgttgggtggccatttacccgctgtacatcgatgcctccaagtcgttggcacagggtcgccgaattgcgaaggcgaaagcagtcaacaacccgacatgccaag

SEQ ID NO: 76282 - DNA, 1168 bp, Heterodera glycines
atgcctataaatgtactaattttacatgattttttaagcatggaaattttaagactaatattcgtgacttatttactctactgcaaaaaaaatgctaaatttgaagaatggctgcgagaatgtaaaaaaatgatttaaacacattttgagtcatagatatgaaattcgaaaatttgtatgggtggtataccctcatgggtatctgcccatgagggtacccgtggtacagaaagctgtcaattcgttgtcccctgcacagctcctagggtgtacgacagcgctggtctgagcccgaattcgtgatcggcacctttaaaaaccccttgaaactattttcattaattttgaaaacaaaaaatttcttttattaaaatatatgttaaaagtaccccgtaaactagaaaagtaccaataaccgattaaaaaaacagtaaaacaagataaatctttttaaaaatgttttttatagttggtttgtatcataatccttcggtcgctatgagcaaacaatgacaaaaaatgttgtttattattcctgatactacattattagcttccatattcatcaatttcctcaaaaacaaacatcagttcgccgccccattctcattttccaaatcaaatgaaaagtccaaatggtcatcatcactgaaaaggcgatgctcggtggaaatttgcgagagttgattgttttgatttgccccgctgacggcgagaggattttgttcacggttggtcgacaattcttcaactgattggaacaaatcctgcagccgaagttcactgtcgtcgatgccgttcacccaatgctcgccgatggaatttgacaacgaattgaaacgtgcgctgttttcgtctaaaaaagcaccggaaatgaatcatataacaatttaacgaaacccaaaaatgcgttgagcccggcgatgtcggccatttccgtgtcgtttagtaacatcccatcgcttagtgaaggtgccatcttaaaaatggaagtaaattatacagtcagatgattgattgttatgttaatcacatcttgatggacaaccggaggagttgaaagaatgttctgattctgaaattcgttgctggttgtgggctgctgatccaaaagttcggtcatcgaaggttgagtgtgtggagaattctgatgaggcagctacaagaa

SEQ ID NO: 76283 - DNA, 666 bp, Heterodera glycines
atggccataaaatatggaccaaaaatcgcaaaatatggacataaaatggcaaaaatctcaaaatatggaaataaatggcaaaaatgtcaaaatatggacataaatttttcaaaattgagtgcaaaatttcttcaaatttattggttgaaattgcatatgagatacatttccaaattttttgactcggtaaggcgctttgacaaagacggctttcgttttgcaattagtcggtcaacattcggaaattggtctcgaattttttcggcaattacgtgcaatcattttaaaagaaaaaaaacataaaagctaaaatttattaatttttttagcgcaaaatcaacaacaaaagcgaaattttcgcttttttgcttatttttgacataatttattaatttttaagaaaatttaaatttattcaatattctcgagaaattttggcgaaaaaatgattttttgaaaaatttttcgggttttgggctcaaaaaggctaatttagctgctgggggccgttctaatagaggtttttttgaaaaatgccaaaatatggacataaaatatggaccaaaatgccaaaatatggaaaaatatggaaatatggacataaatcgcgaaatatggaaaaatatggatatagaaatccttcctagaagcttcaaaccaagctaa

SEQ ID NO: 76284 - DNA, 155 bp, Heterodera glycines; identical to SEQ ID NO: 51421

SEQ ID NO: 76285 - DNA, 1076 bp, Heterodera glycines
atggcattagcggaccagggacgtatccaggatttgggcttgggggtgggggggggtacgatccgaaaagtcaattcttaggggtgtatttttgaaaattcttcgcccgattcttaggggtgtatttttgaaaaactttcgcccgaacgacctttttttttttttgctcataccagcgaatagcggaccaattatttttcaaaaatattagggctggaaaattctcaaaaaattgataaatttattcaaaaaaacccatttcttccaaacacaactaaaaatttacaaaatcaatcaaaaaccccaaaaaatataacaccatacaaaaaaaaataaaaaaattttgttcatatggtaattttgtgaaatgctaatgctacacattatggctgcttttgcgcccatcaacttctgtttttgcggagaaatgataagaatagcctaaagagtgggtttatcaacaaaaaaaggctttaaaatatcgtagttaccaacttaccaatacattacgcattacattgatcgtaaaacgtgagttatgcaaagttcgaatggttgatcagtcattcggtggcgagtccggggttcggaattggtcaaaatgggtgtcattttcgggatcggcatccctgaaaacaccctagaaatgtgtttttacgacttttataaactataaaaatttatttaaaaagaggtgtggcagcatctaaacgattaccctcccattttcagacagaaaacttcaaagaaaaaattatttgttaagttttttgaaaatttttcaaaaaacagtaatttatcttaaaattccagaaaaaaaaaattgcttaaaaattttcaaaaattttttctttaattttttttatttcaaaattttcagaattttttccttgaaaaaattctgtttgaaaaacatattttcttttttgaaatttctgagacgagattttgggcggcgagattttgtcctgccccctatttttggacatttaatcgcaaacgtcaaaaacttcgcggtgtatttgccgcaaggggtaagacgtacgcacataaccccggggagaattctgtttcga

SEQ ID NO: 76286 - DNA, 1165 bp, Heterodera glycines
atgatggaagaacatcaatcaaagaatttcctagaacttttaaaccgattagttttggtggaacaaaagattgtgactgttgcctttctccttcgcagcactccgttgaatgtttttcaaactcaaaggtaaggatacaatatttatttgttttcttttttattcaaataattttttcagccttttgactcgctttttggaatttaattcaaatgtaaccgccaattattatctgctgggaccacttaaagctgagcttgggaagaagcattgtgccattgtcaaaggggatcagttagcggatgccaagcgacgtttggcgaaagttgacatttgtaacgtattctccatacagacaaagcgtactgattgtgaggtggggggcaacttttatttacaacggacagtgcaccgacagaaactcatccaacatttaagtcgctcggagatgtgttcagaacggattggtacgaccaaaaagttccctctttgagcaaaggatttctgaagaattcgaaggtaaagagcaagcaaaaatggaatatgccagggtttcgaagaaaacaaattataagcaaaaagattaactaacacacaaaaattgacataaggccattaaaactaacatatggttctaaatcattttctgaagcaggtttaaaaacattcattttttatgttttccaatgttttgttggttttaggttccgtctccgtcggaatttcgcagtctcagcccaattctgtcgccatcgaaggacaaaaaagaggaagggaaagaaatggacgaagaggacgacagagaagcagaggaaaacgcgacggaagtgaaaaaagcgacgggggcaaaaacactgatcagacggcccatttcattcacgccgatttgcaaggaggaggaacaaaggaaaaagcaaccggtgactcgcattttattatttctgcaattaggcccatttttaacaacgcaattagaaggaagaaagagaccgaccgattgggaaacaacgcatcgaaagggatgacgaaaacgcaatggcacatccgccattgaaaagaccgacggcacaaaccatcaaaagggaggcgaaagtcgcgaaaacgaaagtgacggagaacggaggaagcaaacaaacgaccttactcagctttttcaaaaaataaa

SEQ ID NO: 76287 - DNA, 126 bp, Heterodera glycines
aaattgtacaaaacttactagtttttaaaaaaaaaattaaaaaatttacgacttttcatcaaaaatttcggaagtcggaattccgaccccaaaaatgtcggaaatcggaagtctttccgtgccata

SEQ ID NO: 76288 - DNA, 291 bp, Heterodera glycines
atggccagctgcaaacaagcaccaggggagcgggtgtatgaatttgccaatcgattaagtgatgcagtcagaactgcactggccggagagagtgaggaaataatcagaaagagaatgttcgaagaatttttggagaaattgacaccggaactgcaatttgaggtcaaagctggtcggccaaccagctattctaatgcttacgaaattgctcagcattttgagcaacttttggccgcaaagaggcataatcaagtttcaattgccgattcagttgcggaattgtcgcataag

SEQ ID NO: 76289 - DNA, 1978 bp, Heterodera glycines
atgctgagccgtagtctaaacgcaactgaaaaaaggaggaaaaagcgagcatatgcattcgttaacggacttaagcgggaatatgttattaatgaaacggacactactgtgacatggctcgaaccccacccagagatagaacagctccaatctgtcggattagtttactcatcgcaattggcagcacaacttacagctttaagtgccaaagtcacatttaatactcagaaattatttgccgaaacggtgcggaaaatttgcaacagccttcgatttttagctgatcagacactgacgttggcagaggcaaatccgacacttttggcacgatttttcttggctaacccttttttaactgcgagattggtgacaaaggaaatgttagagatcagtccctgttttgcgataaatgatagggaaatgcattttcaatggcaaaatggcagatgttttgaaagattgcctgtgactttttatttgcatagcagttatgaaacgaagaagcatggatttttggacccaaaaacactaatagtacatcacaattcaaaagagaatagttgtaaagaattccgatatttatatgtaccattgaaagggtcaattatgcaatatgatcagctcagcggagatgtcaaggaaattcctcccgattcagtgcggtatttggctagacaagggaaaattgattttccagaggtgcatattcaattgtttagaaataaggtactagcgaatttgtctgagctatattctcccgaaagttttgatgagactatcgaggttgcaaaaattgcaaaagaaattgcacggctgtcaaagccaaatgcttgggaatttaattcggaacgaactgataatatggccacaaatattgtttccaatgggttattttcatttttgagaggaggactgatctcaattaatcaaatgtgggtattcgtttgttgttgttatgttacacttactattctcttacaattaattgtaccagcgccattagcacaggcaatacagtatttaggagtgggaggaatactcctaaataaagtaagacaaatccgaaatcacatgggcaaaagaaaacaaagacagcccagggaggcaataaaaggtaaagctggccaatctgtcatagaaattgagaaaatagcgatggaacaaaccgctgctacacaaatgaaccgtgagaaagcagcagtgaaaagccgagaaaattcaccaattgtcgaaaagaaaaatgtaacttttgctattccacttacggagagatggccatcaccggatgtagctgcgtctacctcacagcaagctgtaagagaacagcaagcaggcaaaaatgggaaaaatgataaagtcataattgcggttgcgggaagtagtcaatgtgatgaaaagtttcgaataaatggagaagcgaatgagtggaaaatgagttttttgttagacactggcgcacatgtgactttgtgtaataaatatactgcgctgaaaatgggcatacggaaattgattgcatccgacatcacggctgttattgggatcagtgataaattagttccgattttgggaaaagcggaaattaaactgaaaatcgccgaatgtgaagtcatcacaaccgtttatgtagtggaaacaaaaattggaggcgcgggatcatacgaaatgattatcggaagaagcacccttcgccaattgccactattattggaccttcaagcgggggctttaatacgaaaaagagacatgaaagtgtttatttgtgagccaccaagtgatcgggccgatgcagaaatacaaaaaaagaggggaacaaaagacagagttggaatggtgccttgaaaagcataaggatgttttttctgtccacgattatgatcttggagaatgtaagttgaaagcacctcccatcttaacaaattcaaatgttcctgaaagagtaaagccgtatccggtcccggaaaaatatgaaaaagaa

SEQ ID NO: 76290 - DNA, 288 bp, Heterodera glycines
gagattattggcgaaattgaggatttgaagcgttccttgaaagatgcgtgtgatcttttgcagaaatatcgccaggaaaaggcggaggacgcaaaggaacaacagcagaacgaagcccaacgaacggagaacagttaacgaaatcaaaaatgaaattccgcttttcgagcttaaaagtcatattttcttcatgattaaaatacattatttttttatcggcaccgctttagctttttttgaaagcgcaattttctcaaatattttcaattgcaaatttattttaataaa

SEQ ID NO: 76291 - DNA, 277 bp, Heterodera glycines
atgggtctcattttcatggctcgtattaattattttcgtgctttttcttcaactgtttcaagatctttcaagcagggtaattaatccttaaaattaaattaataaaattatttatgaattttcagtaaagcataccgtccaggacaatgttacaaccattgaattagtcgatgttcctattgcgtcaactcatagagaattgaaggaatctgctgctactcaatctgtagttttctttttatattgcattagtttatttaatttatgtaatgtttaa

SEQ ID NO: 76292 - DNA, 70 bp, Heterodera glycines
  unsure (1)..(70): unsure at all n locations
tatggcacggaaagacttccggtttccgacatttttggggtcggaattccgacttccganatttttgatg

SEQ ID NO: 76293 - DNA, 125 bp, Heterodera glycines
atgatgctcggtgcccaggcattacgcacgaagcaaaaagcggaaaagcgggagaaggagaagcgcaagcagaagaagatgaagggactgaccaatgaacgggagaacctccagcgagcggcaaa

SEQ ID NO: 76294 - DNA, 84 bp, Heterodera glycines
atgccgtttccgtgggtggtgttgctggtgctgctcgtcaaccccgctgctgggtgctgctgggtggttgatgttattgctgct

SEQ ID NO: 76295 - DNA, 1617 bp, Heterodera glycines
atggaacaacaaattgtacgtcttttgggcgaacatccggaagaagggctcagcaatgcgcgacttcttcaaggtgtttgtgctgttgttttattttgctccttttttaaacgcacatttattgtcaattccgtacaaattgatacttaaaatacggggtttaatagttgacataaatatttgcgtttcttttaccacaatttaagcggttggcgatgattctgcggatggtacggatgcttcgtcctctgtcactgaacagctcggagcagccatcaaccggctgttggcccaagggaccatcgaaatgttacgtgagactgtgccaacgggcgaaggtgttggcggcgccggagggttcattttgaggctaaaacgaggcagtcagttgaacaacgccagcccggaggaacaattggtcagtcttgggaatgtattttttgccgttagtttttcctctttattttgttcgcatcctccaggtattctccatcattgaagagtcgcagcggatgggcgtttggatccgcgacattcgcgaacgttcgggcctcaacgaagtgcagctgaggcgcgttctgaaggcgcttgagcagcgaaaattggtgcgaagcattaaggcggccggcaccacaaagaaaacgtaaaattcggcgcaaaaaaacgaaacccaattaactaaaacagttaatttgcgtttaaatcgcttctatttttcaattttacaggtacattctgtccggtttggaggccgacgacacactgacaggtggcactttttactcggatcaacaactcgactcggaatttgtccaaacattgctccacgtctgcgtcaattggctgctggtacatgaacccaaaatttctataaaaacagtttcttttgtgtccttttatggttggcccgccgacttggaattgcttaatttttctcggcagttccatggcattcgaacattacttaagttctcattgtcagaaacccaacaatttttaattttaatttatcgctttttaaattttcctgcgcttttcagcagcggcgtcgcgccgcggaagagaaacacccgggcgacccttacgcgcagagggaggcgtcttttgtggagtcggacgaagtgcggaagagccttttgcacattttagtgttacctcaaaccaaaggatttctatgactaacaaaaacttattttaggcacattacttttcgctcgtctatttgttgttttttcaggtcgcccgttatatccacgaaaaaggcctttgtcgaatccaattgggcgtcgcggatgttgagaggtgtgcaataaacaaaacaattaaacaattacttctcacaatcagtgttttggacattgctgtgctggacggtaaaattgagaagcggttgaaccacacatatcggtaaatttttattatctcatattgtggcgaattttttgcattgatttcgtcacatttttcagtgcgattcgtaagcagcaactccatccgtctccgttggcttcggtgccctgtctgcaatgtccggtcagtgccgagtgcacccccggcacaggccatctcatctcgcccgaaaattgcgaatatttccgactccattttgatttatga

SEQ ID NO: 76296 - DNA, 1399 bp, Heterodera glycines
atgagaggtgtgtttttctctgctctctctatttattggttcatttctcttttcgggcactgtgttaagtcaatttcgatcatttacagtattttataatttttaaatagcaatatgcttgtgcttttttttggggttgggactaatttagttgcagcgccctttaagtattgttgtcagttgtcactccctccctctgttatgccttcactgcgtcgtccataaatacccacgtcgattgacctttcccgtcattttttttcttttttaaaacttgttttctcattccattaatattttttggtttgattattcctgatttatttttttgcggatggggcaactattctcttatttcaagtctttgtttggtcatcgggaaatgcgaatactaatattgggcctcgacggtgctggcaaaacgaccattctttacaggcatttttaaaattgctacagaaaaacacaatagtgggtggattatgttttgtaatgggttggatttaaaaaaaaaacaaagtttcgaatcggtcttccactttccaatgaaattgaagaagaaatctaaacaattttttgaacatgaaatttcgaaatattaatgccttttccttgttcaggctgcaggtgggcgaagtggtgacgacaattccgaccattggctttaatgtggagcaggtcattcaatgtcgtccatttaaaataaaacagcttactttctctctttttaggtgacttacaaaaacttgaaattccaagtttgggatttgggcggccaaacgtcgatccggccctattggcgctgttactactccaacaccgatgcaatcatttacgtggtggattctgcggacagagaccgagttgggatttcaaaacaagtgagtttcgggtgacaaaccctcacaaaagtttggttgcgataattgtaattcatattcaaggaattggtgtcaatgctggaggaggaggagctgaagaacgcgatcctcatggtgctggccaacaaacaggacatccacggctgtctgtccctggcggaagttcacaaggcgttgggcttggaggtctgtcgtccaaacttatttgtattttatattttcaatttaggcgatacgaaacaggacattccaaatcttcaaaacctcagcgaccaaaggcgacggactggacgaagcaatggaatttcttgctgcttctcttcaatctgccaaatgatcagaccaatgcataattatttccaattattgtattacagatttttacgttctcaatttatttattttttgcttggtaaatacaatgtcattcaaaatgttgaattggtatttagtatatataggtataacccttttatatttaacttgtgaagagctagcgcaactaaaattctcccata

SEQ ID NO: 76297 - DNA, 257 bp, Heterodera glycines
atggaatctgatgaagaattcactgaagtagtcggcgttgatgaagcggaaggaggggcttcaaacactggtaacaattcattcactcatttcattataattttgttattaaggttcaattttttcggcatatgaccattcttccttctcatatctgcatttatacagacctcaaacggatgttgttgcttcactcatatatcattcagggatggaaggcgttgaccgatatgaaatatccaagcactttgggataa

SEQ ID NO: 76298 - DNA, 1519 bp, Heterodera glycines
  unsure (1)..(1519): unsure at all n locations
atgggcggaggaatggcactaaagcgaatggactcggaggagcgaaatcgcaacgaaaagcttttatcggttggtgtgccatgactctttttggcactttgcgcttggcccattaatttgttgtccgtctgttcacnacagtgccccgattcagtcactcgcatttccgaccgttcgatgttttacaaaacttttgaattggtctcccaaattggccaaggcaatttctccgacgtttttctcgtatttagctcggagaaaggcgaaaaatacgctgtgaaagtgcgttttttgttgccaaagaaattaaaacagtgaaatttacgccgcaggaaattgacaaagaacgaatgagaagcaaattgcattttgtggagaatgaagttgcactgctgcagcggtgccggcacagaaacatttgccgactaatcgacgcctttgagtgccgacgggcgttctttcttctgttcgattatgcccaggtgctaagagagtcaatcagcttaaaatggcactgatcatgatgtggatgaatgcctttattgaagaagggcgaccttttcgagaccatccgacgcattggccgactgtcggaacgttcggccgcgcaaatcactcggcaaatctcttcggcactcgcttttctccaccgccgccgcattgtccaccgggacgtgaagccgggtcagtgtccaacacaaacagtgccgacaataccatgttcaacttcagaaaacattctgctcggggccgactccaccgtaagcgtacttttcggctgatcggtgatcggaaattgcttaagtctgtgcctttgttttaggccaaactgacggacttcggcctcgcctgtttttttctgggcccgctttaccgcagttaaaacatttaaatcactgcttttttcatttcattttcagtctgtgggaccccaacttacgtcgcacccgaaattctcactcagaaaggtgtttccgttggccaattgtattgtaaatcccaccgaaatcgtccaaataccgtaccgtatgtctgttttttcgcttaggttacggtgtggcggtggacatttggtcgttgggcatcattctgcacatttgtaattacttttccttttcttcccattgcttttgtcgccacttaaggcttggttggctttgcgccttttcacagctcggaaagggcccaattgttccagcaaattgtccatggacaattcactttcgatcaccccaattggagtccgatcggaacaagtcaaatgaatctttattcaaaaatgaaaagtacattttcgtatttttggcagaagctaaaaagctgctgcttggaatgcttacggcggcggtggcaaaacgattggacgcggagaaagtgatcagaagcgaatgggtgatggcaatgatggcacaaagtgccgatgagaacgtatgggaagcagcaaataaaggataaaacagggaaatggaaaagtcattttattatatgattataaaaaatgataatttggaaaattaaa

SEQ ID NO: 76299 - DNA, 357 bp, Heterodera glycines
gaaagtgatttggtggccacgtggcaagtgccaatgagtgacaaaatgcacaaaattgaattcgaacacggcacaacgacgggaaaacgaattttgcgggtggacggaaaggttcagggcatgtgtaaagattctgaaaaataaatgcctaaaaatgccaggaaatcctacgacacgaatggatgttcaaattggtgggcagggaaatgttcgaattgaacggcgttcgctgtgcggtcagtgctaaggaaactaaggcaaatgccaaaacaaacaaaaaaacagattaacatcgatgccgcgggaatattcgcctacgaatattcgctgaccgttggcggaaaagcattcgaaaaa

SEQ ID NO: 76300 - DNA, 253 bp, Heterodera glycines
atgccgactttgtttcttcacggcgcaaattctacatattttctggaggacgacaaaattgcgttaagaaaaatattctcccacgcgaactttgaagaaatccccgaggcgggccattggtcagaaaaaaagtaaaaataacattttaaattttattggttaaaatttcaggctgcacgcggagcaaccgaaaaggttcatagattcggtcacaaaattcctaaagaagggctattttacttatgacgagtaa

SEQ ID NO: 76301 - DNA, 173 bp, Heterodera glycines
acgaaggcaccaaaacgcacttagaattggccacggggagttcggcatacattttgtcggagagcagcggtaaccgccacatcggaatggtccaccgtttgttcgtcaacgacagtttggtaaagccgagcgaattggcggacgaaggcgaagagaatgaaaaaccgaaatga

SEQ ID NO: 76302 - DNA, 1909 bp, Heterodera glycines
atggttgaaaaaattaagcccagggggtactattttatgaaaaacggtatcaatgccaccatttttattagggttgcgtccccgacgtcggggtttgaaaattcggggttcggggttgtcggggttggaagtgtcggggttcggggtcggggttgccaaatcgttcggggttcggggtcggggtttttcaatttttgccttatgccaaatagtcaaaaaactttataaatttttgcttaaaaatatttaaatttcgtaataataattttatgtgctttttattattttttttatcataaatattttgtatagaattaattaaaagcacatacctaaggcatttaaaatggccaattttcagcgaaaatctgtataaatctttttttggcttttttttttgcggcgctctttttctaaagacgtttaggagaaatgggttcggcggtgccgataggcgccgccgtgaaaaattttgaaaatttggatgggcctgttaacagattttgtccaaaaaatgatagattttttcgattttgggtcaaatttttttaagaaaaaatagtttttttttgaggggccggcgatgccgataggcagcgccgggcgaattttgaaatttaaggtctattttgtaacattttttcacccaaaatttatgaatttccgttaaattttatttttttaatttttttgtaaattttcatgatttagtcaaaaaattgaatttttaatgaaaataaaattgggttcaatacgtctataaattatgccaaggatgattgattttaatgggtatttttggtttaaaaaatcttattaatcatataaaaataaattaaaaaggaaacagtcaaccagtctcgaactcataataaaagtgctatcagtgttgaagcaacaatcactaaaccacaaaaatataagaaaacatatgcaaaatttactatatttcataaaaatttgtcaagatggttaaaaaaaatcaatttttgtataaatgttttgccttttcccccacaaaaatgccattcttaggggtgaaatgtgcggttcgatggcctcaatgatttatgttcaattgttatcagaattttgaagaaaaaggacaaatcagcggaaaagtaaaaatgcatttactaattgattttgtttaattaatcaatctgtttcattcgtttaattaattaatttttttctttttaagttcatatcaatctctcatctctccggacgatgattttatggtggaaatcggtgacagaaaggtgaatattataaattcgtatttcattttatttattttttaaatttttgtgatgtttcatccgctttttcaggtgattttgtccgctgctcggcttcgctgcttctccccggtgatcgatcggatgctcagcgtggagatgagggagaagcagcagccatcggtcactttgaacgatttgggcattgacatggaccaattcatggattttcttttgtacatttcgccaaatgctctgagccaaccaattcttcccaattgtaaaatgatttttcctattatcatgaggggacatggtgttgatgaaattaaactttacatgattaatctacaagatttttcgaaataggcgtaattttgtatatttattattttgttatttttataccaaaaacgaaaaacaattaaaaaacccttaattatttcaatttttttttggttattattttaatctcgagcttattttaagaatttaattttgcatttggatgtgctcaatttgcgtgccttttcagggcaaatcatgaacatttgatgacttcgatcggcaaagaatttttgggagatttgacttggcgaatttgttgttgaattcaaattgaattttatcttatcacagacacttttcaatttaaaaagaataaa

SEQ ID NO: 76303 - DNA, 79 bp, Heterodera glycines
ttggtccatgtcaatgcccaaatcgttcaaagtgaccgatcgctgctgcttctccctcatctccacgctgagcatccga

SEQ ID NO: 76304 - DNA, 1818 bp, Heterodera glycines
atggatgggggtgactatttcaaagggggactgtattttaacaaatacggtaatcattgtctgcttttccaggtatatgttccccgtgattccgcttttgcccgtctttatgccatccgctgaacaacttttgcttgccccaaccccatacagtaaaaaacaaaatcaaataaataatgaaataaatttgttttcaataaaaatttgatatatttttgaatgttgatgggttgatgaattattctgcgatataatttttaaaaaaacgtttaaattttaacaaattaatttaattatttaaccgcggttcatctaaataaatttaactaaatacatttagtcatcggtgtgccggcttccttcttcccatgcaagggcattcaagtcccgtcagatgtgcttctggtcgatttggacactaatgagatttgtccacccaccgatccaaccattcgaataccaaaaatgccacagccggaagcaaataatttaagagtacaaaaatcaatttaaaaataataattttaaataataaaaaaaatttaggaagaatttttgcggtcattgggacggcaagctgttgaacataaatcaattgactctgaacaacaacagcaaccattgaacattgatggagaccaaattgatgtggcctgcagagtggctatggtgagaaaggcatttttttgattttttagaaattttatataaaatttcagatacatttttacaacggagcaaatatatttgcaaatttcagtgaggtgagatttatattttaatggaaaatgtataattgatataattaacaaaaaaaatagttaattaattacagtcatacccaggaaaaattcatttgggaattataagaactgaaaaaaaattttccaaaattttattgttacataagaaaaaagtattgttagtttgtccaaaaatgactcagttttaaataatattttggtcagatttttaaaatttaaggagaattagtctttcggcaaaaaaattgctatacaattttcataataaatctttttcttttatttttcaaaaagtctgtaaaaatttaaaaaaaatttttttttcattctttttttgaaaattttgggttttttaatttgtaaaaataagaaaaaaaacaatttgaaagaaatatattttcaacttttaaaactgaaaattttagtttttaacagtttttttcggtggggtggggcgagctactcaattgttggattagttttttaccttattaattaactgtagcatactcgtacaattcggctttttcctcggcctgttgttgcgcttcaggcggactcttttttgcgaagtcggccacaccaaagtgaattcatcatggatttatgcaagactcaggccgtggagtatgcaaattattttaattaatttaaaatttaagctaattaataaaaatcattttgaattaaaaacggacataaaaattttgtaaatattattaaaacagaaatttaacagatattttgctgaatgttcactttgtccagccaacgaagcatatgtacgggtccaagccgggtgtacgcaagcagtacaaattggggataaggacaatggttctcgactcgttgatgcctgtctcttttaatgtacagtttaaaaagtttttgttaaaatttggatagggtccgggattttgaaaagcctgaaaattttctaaaattccccccccccccctcttcaccgttaaacgcccaccactttctttaagaatttttcaaaccaatttcttcaaaaaaatattttaattttttaacaattttcagtgaaaaa

SEQ ID NO: 76305 - DNA, 563 bp, Heterodera glycines
atggaaaattttgggcagaaaagatgtttctcgcctacaggacgacccatattcggcactcacggatttttgcctgatcaattgttcttcggtcgaagacttcgaactcagttgtctctcgtccacccaaaggaagaacacgccgaaatcatcgacccagccaaaattcgcaaatcgcaagctgattttgcccgaaaaatggcacgtcaatttcatcagaaccacagagcaaaatcggttgagtttttgccaaaggatcccgttttgcttctaaacttcaaccgtagaaaacgattttggcttaatgggaccatgatcgaaagattggaaaagtctcccacatatcgtgtccacgttccggctctcggaagagtcgtccatcggcacgcgaaccaactgcaataccgttatcctcttgaaaaggaaggaaacggtacgataaggatcccagctgatggttacgccaatgcctgattgactaatgtccgcagcaaattgattgcgccaaaaaaacaacgcagtgactcaggtcatttggcggcgacttggctgaaaaactggaa

SEQ ID NO: 76306 - DNA, 1092 bp, Heterodera glycines
atgaggaaagaggaaatgatgagccaggactcgaatgatctaatcatcaaattttacacaattttgaacatttatcatttgataacattgaaatgtgatttgaattaaacaattttaacattatttttgagggtcaattgatttttattttaagtcaattttttctgctgactcgaatagccttaaaatgctttaaatattttttaacatttgaagctttgagcatacatttttctttggcttttttgactatttcctaccattttggtttttaatgacttttgctctttataattttttaatgcattttttcatttttggcaataaaatgaaaatgtttttaattaagtggtttaaaaacacattgtttaagtttcaacttttgagagcaaaacactattttaatttttattactttataaatattaattttttttcatatttaaaaatcaagtaattctgatcaggtggcttatccagatgaagccgataaaagagaggaaggagagggaatattcgttagcgaagggctcaaaaattctcgcgattaaaatattttttatgcggttcaatagtcattcgaaaactctagtctagaattttttaatcctaaaatcgtcacagctaatttcactccaactcgcggatcacttccgtcccgttgtaaaacagcgcagaatttctttgatcagcgccaaatagaagagttcgagtttaattggatgtctaatgagaaaagttgggaaaaaatttttttgttggaaaatcgacatatgaacgaaccgccagtgaccagcccaacgtcaccaaaatggagatgtaaactgcaaaactcgggttggaaaatgctttgattggcaaagtgtaaatgactgaaaaaattgggaacaattgtaggggggacgaaggatttagccaatttttaatcgaccgattttgttattaatttgtatttatgtaagagtacagacagcgaaaagtcaggactgaattcatattcttataatcattttttgttttacaaatttttaaaaatcaatttttggcaaattttttgaaaaaatataaataactactagaccaaagaataaa

SEQ ID NO: 76307 - DNA, 672 bp, Heterodera glycines
atggggggaaaatgggggacgtcacaaaatggggacggcacaaaaatgggggacggcacaaaatggggaacggcacaaaaatgggggaaatgtggagaaaatgaaacggcaggggaaaacggcacaaatcggaggacggcacaatttggggacggaacgggagtggtcggctcggcacacgtcaacggcacgggacgggcggcattgagcgggcggtgtgtcaaggcggtagtcgggcacggcagggcacggattggcatggcacagaacagtcggcgcacgaacggacagggccaagagtcgacggcacgaacggacgggcggcgcagttgtcggcggctgttgtcggcacggggggaaggggagggaggaaaaggaggacgaggcaatgcctctcagaaaccgttggtgtactgattggtggggggtttgtggcctccttttataccggcagtttctgcttgaacaattgtttgccaacttggcatgtccaaatttctgtccctaacatttgccaattttactaaccttttctcattttccagtttgtgccactttagccttttccgattttctaacattttactatttctttaatatcattcaaaatttgtcccattttaacatttgtttaaaatctgttatttcttttaacgttcaaattattcataa

SEQ ID NO: 76308 - DNA, 2454 bp, Heterodera glycines
atgaagcacacaaagaaaatggtggtcatggttccggaaaccgaatacattgcgcttatgaacatagtgaagagtatgggtagccgaggcgatcctatacaagatgaaaaaacatcattagactcaaatatacataaaaatttgaatgataaaacaatcggagctgatattaaaatgaaacgacactcttggctgtacaaacggagacgtcaactcaaagagctgaaggaaaataaaccacagaaagtgatcatagaaggaaacccgagttctgcaataccaaacgttgctccatatatgggaattcataaaataccaaaaatagaaacagccgtagaacaagagaataagcgacagccgatacgatcaataagagcatcacgtaaaaagaaaagtgaaaacgtgtttgaatcatcggcagattattcttcggctacagaaggtagcagtagtacgccaatacgttcccaagacgtaaaattaagtcagaaaaatttttcaaaaattatgaatattattggaaaaaatccggacaaatttggaatcgatatgcaatcaggacaggttttgaccaattttaataagccagtcaccggatcgaattatactgaatcgctgaaattattatcaggtgaagatatttcttcgcctcgaggtcatacattttttgttcaacgtttgaagagggaaccggaaattgcaaaatacttatttaatttacaacagggtaaaggaaagaagagaagaactaaaagaaaactagtccttgtccaggttaaccctataaaaacccaaggactaaatagagaaaaaccaccatttaaaccagtgttatgggcaaaactatagaaagtcaacttgaacaggtttattacaacctaaattcgccggccagctacgtaggaatgcaaaaggtgctagcagaagcgcgaaaacgtatccccaacctaaatcttcacgatgtacagaagtttcttcataaacaaaggacttacacacttttcaaaccaaaaagaaacaaattcccacggttaaaaaatataaagacatggaacaacaaaagcgaataccaaaattcaaaattggtgatatcgtaagaattacaaagagaagggagacttctccaaaggatattttccaaattttactgacgaattattcaaaattgttcgggtaaactcgaccaatcctacgtcataccgaatcagtgatttagaaggtgaaaatataaaaggaattttttacgatcaggaactagtaaagactgttgctgctgaacagacaactcatcgagcagaaattttgaaatccagggtgcgaaacggtgttaagcaacattttgttcgttggataggttattcagaaaatcacaataagtggattaaggattcagatctcgttcgttaggcatggacgatttttatattgtactgccatcaaatgttccctttccgggaaatacggcatcccattttaccgtaagacttccacataccttagagcaagactcaaactggtccgttgcgctttcctccatcatctatccacactcgttcccttccgtaggggtggatgaggacgactttgtcaacataaaacttctcaatcctgactataaaccagaggtacaggtccgactactgtaactctgaaggtaaaaattccaagcatacagtttcacagcgtagagcatatgcaaaaatcattgaacagcattattcaatcggcctatgatgtaaagtttccaaaagaaaaaagggtaaaaagagcgacggctgcttctgcagacaaagaattggaaccagaaacgcgaccagaaccggataaggaactgacacgtgaagtgtcttcatctaaaacattggataaggaactgatacgtgaagtgcctttaccagcaacatatgacattgaactaccacgtggagatgagccaaaaccattggagaaggaaataggacgtgaaacaggaccagcgcaactttctgacaaacaattgggtgaattagaaggtgaaaaaccgcaaaaggaacagatgccagccactcccattgttgaacatggtgaaatatctacgatagaccaagtgcgcatggacttagccaaacgagtaacggaacaatcgtggaaagagaccgttaaattggctgctaatgcagccgatatcgcggaaaaggctaaaacagccctcaaccgagctgaacaagcccgcaaacgggcacctaatgctccacatgtaaagaaatggttcgacaggctatcaaatatggagaattatttgcgtgaacttgtggaaaagatttcacaagagtcgaaagaggcggccgaagcaaaacggaaattagatgtacattatgattcctgcaacaattgtttagctctccaacagtctgataattttttgtatcctatatttatgtataaataatgtataaccatccataggtacaccga

SEQ ID NO: 76309 - DNA, 939 bp, Heterodera glycines
atgaacagaaacaacctgaaacgattccaaatcaagcctctttcggcagagtccaaaggctccgaggagcagccaacttcacgcacgaaaacgcttagcgaagtcaaggagttcgactcggctggcactttttttctgcgtgcaaagcttgtaagcgtgttgttttgcatttacaaggtgagatggacaataaatccctgcgaatataactcttacatcattatgcttccaatttagtcctgcccaatgagaagtaagggtattccatgtcgtaagaaactcgacagtgaagacttttgtgtttcgtgcgtccaccgtgcgaaaaagcccagccgcaatttgtacctccgtgttgtactccaagattgtgatgacgaggaatgcgagcaggaaacaacagcattttcctatgcagccatcaactttttgagcattgccagcgtggaagctttttacaacctgtcagagaacgcacctaataagttggaatcgattttgcagtcaaaaatagatcaacccgtgctcgtcaaagtcaacatcaaggtgggttcatgttttttttgctaggtgtttatcccacattagctagtccattgtgttccatgcaaaaattatgtcagctaaaagacgcatattttaaggaaaataatgatacggcgaagcttgactggattatttcttccatatctgtggaaaaaccggtgtcggtgaaggttttggatgacaaaaacaacgatgatggagttgaggaagaggcatcttcaagcgagccgcctaagaagcgaaccaaaaacaatcaagtcgagcgtgctattgatgaagatgctgacgacatccatacgattgaatgacgagtgcttgcagatgtcaccaaagtggtcagagaaaaaactgaatggattgctgagctcagcaataattgattggaaacataataaa

SEQ ID NO: 76310 - DNA, 547 bp, Heterodera glycines
atgacaatggacgcacccaaagtgaaagtgagcgaaggaacgaagtcggccagaaacgcccacgagacgaaactgctcaaaagaatggacagagagacggcgaaaccctggagaaatcagcagaaaacagtggcaaatgaaaacgaaactggggagggaccgaccaccttcagaatgttgtccgcgtatttgacgacaagcgcaatcacaagcccaccgtaagcctacaaaagcaaaagcaaacaaacaccgtaaccaaactcaccgtatacctgcagtgcgataactgtccaaattatctgaatgtttggggattacgaaaacaaacgaaaaaaaacacgagtcatgcccaattgtatccgtggaaaaagccccactgctgaagctgagcccagtcgcaaagcaaagtcattgcaaaggcaccaaacatgctgaagaacgctgaaattggaaaatgaaaagggaatttgggaagcggacggaccaagctgcaaattgcaaacccaaagttggactcgcgaagtctttaggattttctccaaataaa

SEQ ID NO: 76311 - DNA, 514 bp, Heterodera glycines
atgctcacattcttgcgtcattcaatcactattttcatcattgtttccgatttgcccattgcgttaaagaatcgttctgtttcttcctctttcacagaaaacaaaagttataagtgtggcaacatcattatggagaagaagatagtctacttcaaactgttgcaatttgtgctcactttgaccatcatttggcaactcatttcactgcgccaattctgcggcacttttgccgacccaaaagtcaattgcatttaaattttaaattccacataaatgatccataaatgatgtgctttttcagaccttcctctgtaaatccattggcaattgcgattatacgctcattggacaggactcggaaactggcgaatttggctcaatgttcaacaaattgtacaagcaattttttatgaacagcaccaatagacgaacaaccggagaaccgaaatacgcattattttacttcttggtctcaaaattgcctcccgccggacaccattgcattccgatcacg

SEQ ID NO: 76312 - DNA, 301 bp, Heterodera glycines
  unsure (1)..(301): unsure at all n locations
atgagagcattttgttggaaacattccctttatataggcccatatagcattgaatcggtgtgtaaacgaatggaggaaaaattaggcagtgtgagaaaatgtataaaaggcaacatttccactcttttaaaaaggggttttggttttaattagataattacttttgccaaattttcaggacttttttgaattatggcattaattttgaaaaatcaaagttttttttttcaattcgttaaacttattttctttttccaaaagtgtccattcgtcgtcatcccttcgcttattttcccccana

SEQ ID NO: 76313 - DNA, 1121 bp, Heterodera glycines
atggctgtcgtttcctctgctaaatcttcttctgcccacaaatgggtttcactgattgtgctcattggccaaacaacggcgctcgtgctgactttgcgttattcgcacacccaaaaatcgtatccctccgacgggcccaaatatttgtcgtcgactgccgttttgatggccgaaatagtcaagtttttcacatgtgtcgccgtcttagggcatcagaacggatggaattttggccgtttgttgcgcgattttgactggaaagatttgctgaatgtcggcgtgccggcgttactttatgtgaacggttgcggcttttcgtccattgtcagcagttccctccttttcaggttgtccaaaagaatttgctgtttttggccctttccaaattggacgccgccacttaccaagtcaaaaaagtgatgcatttggcgaaccgttctcccattttatttaggtcacttaccaattgaaaattctgacaacggcctttttctcggttacgatgttaaacaaaaagttggacctcatcaaatggatgtctttcattttgcttacttttggcgtcgcacttgtccaggtgactcggaatgttcctccggcacttccaaagcgcaaatgccaccaccctttgtttttaatttatgcgagtcgcttattgctaaagtattagcatttgcaattagtagctaataaccacaagggaactgctggttcggaaatgaattcgctcttcgcaaattggattttccaattttcatttgaacttaaagctcccaaaaagttttccgaaagtccgtcactcgctgccgatgaaaacgcatttggtgctgacaatcggccgcaacaatcgaccggcgatggattcgtcggactttgcgccattttggccgcctgctgctcaagcggatttgccggcgtttatttggagaaaatcctaaagacttcgcgagtccaactttgggtttgcaatttgcagcttggtccgtccgcttcccaaattcccttttcattttccaatttcagcgttcttcagcatgtttggtgcctttgcaatgactttgctttgcgactgggctcagcttcagcagtggggctttttccacggatacaattgggcatga

SEQ ID NO: 76314 - DNA, 1182 bp, Heterodera glycines
atggtgagtgttaaattatcgggggttccaggaccccaatcgaggaattgcctaaattttgtataaataaaaattcccaattttttaaaagtggtgatcggggaggggctcaacggaatttcttaaaatcatctgtttttaatcctcaaatatttgtttcccaaagagtttcttccaattatgaatattctaattctttcataattgcttctgttgaaccatttctaaaatgccaaaaaaggtcatttttatggcataaaaaatcccagcccaaataccgtttttactgaattagaaccacgggggttactaattcagtaaatactgaaactaaaattgaaaaagatatccaaaaaaatattttcaaatttaaaagcacaaggcacttcacgcttcttcttctgttgttctctgaaacatttcttctccaaattgtttcttccattttgaaatggtcgatctatcaattttcatcattttggcaaattctttatcaagaatttttgaatttttgctttttattttccaataaatttttattttttccattttttcttcctccattagtcttttcttgctaatgccaaattgtttattccattttttaattatgaaatggctaactccaattttcttacaaatttcatcataattttgttgccattcgatgtgcgaatattttcttttttgcttatattcgtttgtcagtttaataaattttttgacaatttcaattttttcttcatcagtttttaatttatagcatttcgttttttgaagaccaaattctttgatccatttataaatataatttcgatttgtccccaatttcttcgctattttttgttcaatttttccccattctttttttgagaattttcttcctttttgcttaattttctcttttattttataaaattttgcaattatttctctttttttgagttcattacgtttttcttcttctttttcttgccatttttctccaaatatttcgccaaatgacttttgttgcaattttttcttttctgatccaattggaataattagggcaatcaaaaataaaaataataaaatacagaatttcattttcaagattttattttatttttcttcaattaaatggcaattcattttttgaggcatttaaatgatttttttctgattaaaaaactgaataaa

SEQ ID NO: 76315 - DNA, 465 bp, Heterodera glycines
atgatagataccatgaattattatttgtgtgtttatgacaagtcatgcatttttatatgtcacattattattttttatgcccacgttggcggatttacgaaatgcccacgttggcggatttacgaaacgcccacgttggcggatttacgaaacgcccatagtggcggaatttacgaaatgcccacgttggcggatttacgaaacgcccatagtggcggaatttacgaaatgcccacgttggcggatttacgaaacgcccatagtggcggaatttacgaaatgcccacgttggcggatttacgaaacgcccacgttggcagatttacgaaatgcccacgttggcggatttacgaaacgcccatagtggcggaatttacgaaatgcccacgttggcggatttacgaaacgcccacgttggcggatttacgaaatgcccacgttggcggatttacgaaacgcccatag

SEQ ID NO: 76316 - DNA, 1064 bp, Heterodera glycines
acaaagatttacaattatttgaagccaatgcattcattgtttaagcaccaaggagcggctgagctgtgccgtcccctccctgtatacggtatgcaagcatctccgctgtaccgtaacggaggcgttggccgcgcacgcggacagtggcggcaaattggtggtgccgttgctgttggcacgggacgaggacggcattttgtacccgacccctcacacatttccctaccaattgcagatgccggcggtgcaaagcgaaaggcaaaaactaaaaaaaaatccgccaattaaaggcctcggaaaatttatcaaaaaatttggtacttttttgagggattttcggggttgctgactgattatgaatatgacatccatttagaccaattttcgaaccccggacgagaattcgaacaaaaagtcgaaactccaaattttcgactttcacacttttttgaatttttgactttttgtccgaattcgggttcggggtttgaaactagtcgaaatggatgtcatatttgtgatcagcgaccctgaaagtcattttttattcatctacataattgcgtaataaaagaatattttttttgtaaaacccgaaaaaactttttttcaattttttgctaaaaaattgaaaataaaaatgaggggatttctgagtttatcataaaaacttttcttttttttcaaaattcatcatcacgaatccaaaaataaaaatttaaaataaattggcaaaaaaaaaaaaaaaaattttgcgccatccctaaaaatttcacagaaaattcgaaaaatttcggcgcataaaaaaatgctcccccaatttttagttcagcggcgacaatgaatggtggtggtggcaccgcaaaaatttgtgctgctgattcctcggcacttgccaaaaatggcggcacattgtgcagtttggagggaaccgttccggaaaggtacaaaaaaaacaatttgaaaattcgaaaattttcatttttttcaggtttttcgcggaaaaccgcagcaacggaatcggcgaagcccaacaactgttaatgatgcacaatgccaattga

SEQ ID NO: 76317 - DNA, 116 bp, Heterodera glycines
gaatggtgctttgcgagcgaacattttcactgtcagagcctttgctgcccgaaacaatcaaattcatcaaggagagcttggaaaagcaaggcgaactccatttcgaattgccccat

SEQ ID NO: 76318 - DNA, 1182 bp, Heterodera glycines
atgcgtaaacgaaattacttgtcgacaccaatcaaacaacaaattattaaagcaaaggaggcaggtcaaactgatcgagccgtctccgagcagttcaacatcagcaattcgactgtttcacgggtgtacgcgcggcacagacaaacaggcgacatcagcacaaagcccaagtctggacgtcctcgaaaaacatcggaatggcaggacagggcaatcgcaaggcaattgaaattggatccaaacaaatcggcgtctgaagtggcggcatgggcgcgtggcactttcggggtcaaaatgagcagaaggacggcatgcagaattttaaaacggcatgggctgtatggacgaaggccggcaagaaaattctcctgaccaccaacttttgtttctcaccaaaaaaaggggggttgtttgggtgatgatcaattttctcgacgacaaagagagaatatcggggcacttcctggctggacgtacagccaaatggagaaaaaatgcaattaattaattgaaataattaaaatgaaataaataatgtagagaacaagcattaattgttagcgcaattctagagttttggtctaaagttttgactttcaaaaaaacgtatgaacaccgttttggatgattatgcttttttttatcaatttgaaaaaaatattaagtcttttttagagttaaatatttttttaaattattttcttaaaatcccttttttaggtcactcggtcgcacagccacgcgccgtcctccacccgaattgaggtgctaatcgccaaaagtgacatccgtcgggcggcagtgaacgcaattagtgcaacgcctggggcaatcgttgccaatgcgctggagggcatcagcgacgcggcaaagcatcagttgccgaagattgccaatctgaaaaagacggccacccgacaaaggaagggcattggggacggagcagcgggtgagaagggaaacggactatttttcaaaattgataaaatcaaatgaaaaatggaaaaaattttcattgggattcctttcaaattaatgatcacttgacaattagttacttcctttaagaaaatccgctgccaagcagagaaacactgcgcaaaagattggtgcaaaactatcgcaacggcagtcaccgacggacaaccgttacagtaccaatgccacaaacatcgcattacg

SEQ ID NO: 76319 - DNA, 1351 bp, Heterodera glycines
atgctcagttcgttcgtcagccaattggaggaggtcgacgcggtgctgcggaacagcgaacgcagcggaggcggcggcgcggaaatggcggcgcaaatgcggaaggaattagaacacatttgtgcccataaagaagatttggaggcgtatttgatggccactgaaccgatcgtggaatggatcgaatttttcgaagtgaatcatggaggaaaaggggacgagggagggagtgacaagcagggagggcggtaggtaattagcggaattaaattacccaatagcaaatgcgaggggagagggagtatttaggtgaattaaattatccattaggagatggaaggggagaggggtgttttttgaggggagagggggtgttttttcaaaattcctgaaaaagccaacaattttctccaatataaaactcgactccctctatttttttccctagatctttttttaaacattttttaagtttagctttttcccaatgttttttaattactttaatttttctttttccatcctttaatcttccggatcacttaaaacgatcactttcattcacttgcatttgcctcaagaaaacaatttccgttttaattaatatcatacataagtttatgatcattttaacagtgtccattcaattatttataataatttcaggaaagtgatcagcccaccatccatcgcgcgttgcccgcgttggcgggcattgaaagcggactgaacacgctgcgaatgttggccatccaaagttgtgacgggaatggcacaaccaataattgtcaaaccatgtccaactcggcggtgcttcagcgcgaactgtgcgaagcggcactggacgcactcgactggaacatctctccgctgaggggcgcgaagagtgagtttttacagacagcgaacggttggcatttcctgccaaatttttactcggcaaggacagcctgactcaaggaaaattattgaatattttatattgtcatttttttccaaatgccaatttaattagctgctttgactcattaataccattaagctgttcctaaactaggacagctgtgccattggagaatggaaatgggattaatgatttgcccaaactctgaatttgaacgccgaaagcattcatgcttaattaaaattttgcttgatagtgcccgcaattcattcagtcaacaagcatttgctgtgcaccgctgccgcattgaacccgagcgcgtggcgtcgtgaattgcccgcggtgttcgccaaagtcgcgcgttggacagaggaggaggtgctaatgaacgcagaaattaaaaatggaattctgctgggagttggccaacaggagaccaccgtgtag

SEQ ID NO: 76320 - DNA, 898 bp, Heterodera glycines
atggagccggacagagccatggaaatgctgctattcaacacggacatagccatgaactcaagcagtagcagcaacgcaagcgaaagcgaagccaatggagccgaaacggtgccacaaacgacgggtccgaacagtggcagcagcacaaccacagcagcgattagagagggcgaggagccggaacaacaggcggagctgtactacaatgaacggttcaacttcgacgacggtgagacgcttttttgaaatggaaaatcgaaagcattcatttggagtgagtggcatggaagtgatcgagtggctggagaagggactgccctaccccatcctgcaggtggtcgagtacctcagcgtggacaggaccggctttctgtggggcaagcagtaccgactggccgggtactacactcacgccgtactgtggtgagtttggccggacaacggattgggccataaaccaaacatttggccattgtttcgctttgtcctcgagtgatcactcctactgattgatctgctctttcccattttcaggttggcatttgccatttggctgctccaaattgttcttttgggtgccctcccccaccgttttggttcggtaagctcaatttaacctttgtctcgtccatttccaatttcaaattcgcttaggtagcatttgcctgcggtttggccattttatttgctgatttcgtttacttttgtctgacccccggcgacctttttttggtcttttttggccccgacgaacgttcccatcgcctcactttccatcccgccctgtgcttttacgcccctttgggagcaggtgaaaagcccaaatgattttacgtcaattaattaatattaattgattatttcagtgaaaacttcttatcttcaataaatttaatta

SEQ ID NO: 76321 - DNA, 203 bp, Heterodera glycines
gggggaggagaaaagaatgaaatgaaatgccatgtaaaatttaaatttggcattttgacgacggtttgccttgacaatggactgatattttgttggcatttgtcctttctcactttacttcgtcgtcgagaggtgacagcttttttcattcagctggagcggaacaaagtcaactcactggcagaaaggtcaaacccttccgg

SEQ ID NO: 76322 - DNA, 687 bp, Heterodera glycines
atgccacaagggattattatgaacggaaaggcattggcggcaaagtcggcattggcggcgcaaaaagccaaacgcgcgagttggacgaaaactttcgtgccattcagcgacgtgtgtgccgacgacggcaaacggtggcgccggaaggcgctgaggttggtgcgtgaaaatgaaattgaaatgacatttcaaatttggacaaaaaaaaatcaattcgcaaataaatgcccccaggggaaaaaagtttttccgccaaaaattatatttgatttgcattttgagccaaattttgaaataataaataagttttaggttaaaagtgccgacaaatgtcattggtctagattaaacaatattgatatcgaaatgttttaattttttccatgtgtttcttgttaaaagatttttgggtcaatttttaaaattttagcaaatttttggggatatataaggccgcacctaaaactgacaattttatggcatatatcagttaaacctcaccagataagtaaaaattatttcccagtctgttgatcatggccaatcatcgcgctctgctgatgctgatcagcaggagaacaacaacaataacaaccgaagcagtagtggcgccgccgcaagacggcggcggcgccaaagtcggcacattgtcgcgcatgacaacgcgggggacaaaatattcaagca

SEQ ID NO: 76323 - DNA, 778 bp, Heterodera glycines
acggtgtcaactgatcagacgaattcggccacatctgaccctcgtcctctgcccgttgtcaccgagtcggtgccggtgagtcaatagcagttactgaaaaaatgtaaaaccctaacaattttaggaagaatcgacttacgatccgccttgggacgaccgccctctgcgtttcatcaaaaccatggctgctttgcaatcgcaccgatcaacaaatgtaattgatatctctcctatctttagttgctttttaaatgttctcaattaatagcaaatttatttttcttttattgcatttttgataaattgtgtttattttaggtgctgcccactgttccctcaacatcggccgattcggaccctcgtcctctgcccgttgtcaccgagtcggtgccggtgagtcaacagcagtttcctcaattgcaaaattttagaaaaattttcaattttgaaaacagcctttgtaaagtgtaaaaatgtttatctgttgaacaatggataattttgaatttgttttggacccgggcccagccattttatggccgtcttgtttttattgaatcgcagtgtaatttttaatctttcttttcgactattaaaatcgctcattttattttagacatccgatcttactgcccttttcgcggagtttttgcgcaccaactgtgttggacatgtgcccaaagagtttcttgtcaaccatctggaggaggccatcaaaattttgaaccttggcggcggacaaagcgacgacaattccaaaatgtccaagtttcgcaag

SEQ ID NO: 76324 - DNA, 604 bp, Heterodera glycines
gaagaatcgacttacgatccgccctgggacgcccgccctctgcgtttcatcaaaaccatggctgccttggaagcgcaccgatcaacaaatgtaattgatatctctcctatctttagttgctttttaaatgttctcaattagtagcaaatttatttttcttttattgcatttttgataaattgtgtttactttttggctgccctcctcaaaacggtgagtcgacagcagtttcctcagcaaagttttataaaaattgtcagattttgtaaacaaccaaaaaattactagcctaattcggtcgtgttttatttagatatcggatattgttgctcgtttgacggctgtcgtggacgccaacgagcttacgcgtttgccccccgacgttgtagggcacctggatgcggctgttacccacttggaggcatcagctcaacggctgaaccttggcggcggacaaagcgccaacactcccaaaatctcaaagttccgcaaggtattgtttcattcattactcaataatcgaacaggacgggcccaatggggttttaccgggtcgccgggtatcactttcttggaccaaccaccgggaagggccgcccgataa

SEQ ID NO: 76325 - DNA, 928 bp, Heterodera glycines
atggaagtgaaaaatggtcggctcaaccaacttgttgtcctgcagaactccgatccctcaaaatgtgcaactgtttattctgcgagtctttcattgtcggtgagttatacgaacctataaaagcatttggccattcgtcattatttgctttgagggattattctgtctcctctcacaatcagtttcctagcaacgtttccttccttatgtgagggaacaattacaacattcgatttactctttataaggccttttttggaatcttattatttagcaccttgaaaaatgtggcatttcgaccaattcgtgcgctgagttggaatgcatctcatcaaaaataccccaacaattttcaacgattgcacttggcagtgacttattggacaaaaaagaggaagatgacttttctcccgaagctgctctctcatcaactccaggctcacttttggacagtctcgtaattgaccaagacgaacaagacaatgacaagggaatgaccgaaacagagaccaacaaacacgaagttatgtcacgatctttgacggtgactcggattgtccgtgaaacaccctcacttcttgccgtttagaaatcttcggttcagatgccaaatagcagaagaaatgcttctctgtcgcaaagaaatggcgcttcatcttcgtctaatgatggaacgcttgtaagaagcgtttttttacagaaccagactcacaatcagtattcatgtaaatgtaataggtatttcgagatccaacgacgcatttacaaaggccgagtcggctcataatcaatgaacataaaaatgcaagccaactttgttcaaacaacaacgacaggtatttaaaaggttcccgggacatttgtcaatggacaatccagcagaaaattgattttaagaactcaatattttattccaacattaaaaata

SEQ ID NO: 76326 - DNA, 64 bp, Heterodera glycines
ggcttcgattcgttgggaaccctttgaattggtttcgcagttcgacctttcgcatcagctgcat

SEQ ID NO: 76327 - DNA, 207 bp, Heterodera glycines
gagccttcgactcaataaaccattcaatgtgtccattcaaactcgaaaacttcggtgtgtatcttcctgcatggcataaacccgttactaaccgttacgggaaacgtaatattgagggatgggattgcggaatcaaaatgtaatgcatcttaaggtaaacgtgtggtaagagaggctgggggcatggaggtccccggagacacggag

SEQ ID NO: 76328 - DNA, 680 bp, Heterodera glycines
gtacaagcgacttctaaagcatttaccgatttgaaagaaaagacacaaaaacttgttgaagctgagcaacaaaagaaagcaaaagacatgcctaaatctcagaaagcaagcgactcccaacgacaagtgaaaactcacaatagcttcttggcaaaatatgccaccaaacgaacgcatagtccgtcgcccaatttaactaatcggctaacaaacccgtcgtctgtgccaatcaaacagcgaaaacaggcggaggatgcaacaaaattattaccgaaaaagatggttgtttcacaatcgaaagaaaggatcgaaccacatggttttaaagtctgaaactaattccatttcttgatgcttcatttattacaaattaaggaacgtgccaaagtcgagacattgtcaaaggaaaccatcaaaactgaaacctcaccgaaaaaggacctgttttacattcccaaaagaaagccgttacagggcgctccatcaatctcaccggcttcaactgctacttctactcccaagacaatttcgccacccatcgtccgtcctccttctgtggaaagcaccctccaacacagttcttcatgctcaccggaagactcatttgggtcaatgactattccaacgaaaccaacaagggactggtctcgggaatttacaatgatcctaaaccaggatga

SEQ ID NO: 76329 - DNA, 936 bp, Heterodera glycines
atggcgccatcaattcttagcgaatgtccatcacttcgttttgtcattttttatgccggtgatctcttcgccgaattccctgccgatgacagtgccgcggcatcggatggacaaatgttggccaaatggcttttcactccacgtccggacgatgtgccaaaagtgctcaaatgctggttggacactgatgatgggaatttggcatcgaagattgaagccttcaaagcggtgcttactaataatttgtttatttggcactttggtggtctttgggattcgttgataaatttttataaatttttcctcattttaggcatttctcgatgcgtcttcccccgccaatttcatttttgtcatttggtttccgccgtctgctgattccgttgtgccatttgaactgatcaacgaatttactcgtgaacaattggcattggaaaggattaacaatagcgatcgttttctgctgatccgttgtccaattgtacgaaatgcgagcaaatggacaaaatgggagaaggaagcatttaattggcgaatttatgatcagcggaacagaattgacattgaaatttataatgaggatgacatcggcgatcggtcagcgaatagtttttcaaatttgtttatttcatttttatttttaggcttctcgacgaaattcccgacccgagtgatcagcagaagtgaatgaatgaattgttaagaaatgatcgaccaatttggattatggaattattgacgtgatcataaacattgttttcttttttgtaaattggactgttcatgtttggttatgttatgtcattatgatattttgtggttttctaaaacaaaacatacgcttcaattttcaatattttccccagcaaatgtgttggaatgatcaacttggatttgtgttattatgtcattaggataatttactgattttctgaa

SEQ ID NO: 76330 - DNA, 863 bp, Heterodera glycines
atgtcagaccgccgaaaagaagcggaggcaaagatggcaaaagcaatgtaaaataattaaaaatgccaattttcaatttcgattttaaattttgtttcctttttttcagtttcatttccgccgacggttggctcaaagtgttcgatttgctgccgccttcccaacttggacttgaaattgcgacgatcagccaccgttttaacgcctacgtggacgaacatttcaagacgcgaaaatgggcgctgaaatttattcaaattcgacgcgaaattggaaagaaaggcacgaagaaattggaattggccaatttggatggagaaaaattgccaattccgaaaaagccgatgccaaagaaagtggtcggatttgaagcaatttcaataaggtgagatggaagaattttgttgttttcaaatgtgtaatgccattttcacagatttgtcgacctaaataccctctcttttctgcgccgttttcgtcgtcttttcacctcctcgccaattgtttttgccatcggttcgacgagtgagcgcattttgtttttgattttggaattgatttggccaatgttcgcgaaaaacattggttcgatgtatttgatggcggacactttcatgcgtttgcgaatattcgaagcgtcatttctcagcaaatgccaatctcttcgcattgtcaaattttgcgatgacgacaatttcttcatcgaattcccggccgatgaccatgccgcggcatcggatggacaagtggtggccaaatggcttttcactgccctccctgacaatgtgccgccgaagatgttgaaatgctcgttggacaaggatgatggctttttggagtcggacattgaagacttcaaagag

SEQ ID NO: 76331 - DNA, 2942 bp, Heterodera glycines
tgcacaaagcaaggcgtcaaagctgaacatcaacgtgaacgcgctcaacgccctcctgcatacactgaactacaccatgcgaccgggctgaatttgcaatgtattgcgttgtcagcatgtccataaactgtcataatgccccatattgtaattgtcaataccccggatcacttgaagccttattttagccaactctataaattgatttcggtctgatcacttggattcttaaacagaatttgctttatgagatttacgctgatcaatgcgtgcaataagttttattttcgatttattatggagagaatgctatttcgaagttctgtatcataaaaaagtatagactttttactttcaggtgccgataaaacggctctaggaaaatccgacactggaaaatccgacacaagcagataatccgacactggaaaaaccgacattacaccaactttaaatttaaaaattttttttgattgtttgggttaaactagagctgcgcgggtccgggtacccgaccgggtcccatacccggatacccggttttttcactacccggacccggttttttgaaaatccaatacccgacccggtaggaccgggttcaaccgggtataaaatagactggcaagaatgggggtctgggtgaaagttgagggaaataaaaaaattgattaatttttttttatagcaataggcttcgaaattggttttcaaaattttattacttgacaaaaatttctcttttagcttatctggtgaacttgtcgaaaaaattttgattataaaagcgaatttggaccagcttttgcttgcacctaatactcaattgcaggaagaggatgatgaagcggttgatgaggaagtgattgtcgatgaaaaccttattgaagattttggagaataatcaactgcttatttatgaagatttttgattgaaatatctttttagtttatattttaaaggcattttggtaattattttgaaaaaaaaataaattgaaaaatttttaatacccggttttacccggacccggacccggtttgaaaactggtacccggcttttcaatacccggtaatacccggacccggtttttgcccaaatacccggacccgtgcagccctattatataccacctacgcattaagagaaattctttccatttttttgtcgctgtgttttttggttccacaatgatgccgggcgatgacctgaacctgttgaatatcagccatctgactgaagtcggttggcacattccattgttggcataattttatagcgcagaccataagccttagaagcagctcccccccccctttcatatatttcctttggaaatttttttaataagaagtttgaagacaaaaaattaaaaaaaatttattgaaaatttttgatgatttacaagttttttcaaaaattcttacaaaaatcgctagaaattttttataaaatcgggtggcggggaacaacgatacagggcgaactcgtccgcgaggggggggggaacgtattggatcctgtaccggaacctatttgcttgcgaattttcattggattcgtattatttttagggggttcgacgccgtggcgaagtatcccaagctgtggtgttggcactgaagacatatgaaaccagcaacagcagcacaaatgacacggaagagcagcagatcattgagcaagccatgggctttgaggtgtaaaagatttaataaatcttttttttaattaaaaaaaagattttttttgggaattgcacgacgaaattgcgatcaaaggccaagcgcgcgaaaatctgatttttgcagtggaggaaaagccattggatgaacgggttcgcctctcgcaagccaaggacgagttgatcctcaaatgctcattcaatcaacatgactgtgatattgaaaagtgtgaatttttccaaaatttactgtaataccgtaaatgaattttctatttttttatgattaaatttatgaaaattcataccctcatcagggacttcaagttgttccacgatcccacctatggcaattgttacaccttcaattgggaccgtaatgctcaagtgacggcccatcgggcaggcgccaattacggtaaatacagtacatgcaccctattagattcttgcatgaataacaaatttaaaaaattaaacaacgtattaggccttcgtgtgctggtttacgccaacgtgtccgaatatttgcccatcacagaagctgtcggctttcgcatcactgtgcatgacaagtgggaaagattaggcggggtggggaaatagggaaataaaggcgcattaactgactaattcatgaacaattttggcattgataaattaactcaattattttgggcacttttccgattaattttggtaattgatctgctgatcaaaggtctggccatttattaatgagcctctgattaacttttggccctaataatgcttgctgatcggtgatcactttatttcccagatggactgtgccgtttgtggacgcgtttggttacaacgcacccaccggcactttatcagcatttggcgtacgtatggtatgccaaaaaaatgcttaaaaattaaaaaataaacaattaattaagaaaaaatttttccgcctcgagcacccatacggacattgccgcgaaggcggagaacgtgccgaatggtacatctacaacaaaaaagaagtaggcaaaagaattaattaataactaaatgattttaattaaaaaaattttgatgcaaaattagtaaactaataattttagaattacaattattcaatcgaaggttgtcatcgaagttgcacacaacgtgaggtgcaaaatatttgaaattagccaattaattaataaaattaattaattaatgagtatgtgtatttgtaggttgtgcgcgtttgtggttgcgcagatccaatgttcccagtc

SEQ ID NO: 76332 - DNA, 774 bp, Heterodera glycines
atgaacactaaaattgtgctttttcttcttctcccacttctcataattggttgggtcacgccgacaaatacgacgaacgaaaagcggaccgataagggaaaaggattacaacgaagtgcagaaggctctgcctttagcgcttatattaaatccgcttttcgtccgtataagcaaaaagacaatggcaaaaacgcgaagaatgaaactgatggccagcagcgagcggatgtgataggagacaatgagaagttgcaagcggttgcggcagaaaatgttgatgaacagcgcgcgtatacaacaggagacaatgagctgttgcgagcggtttcgacaggaaacagtgagcagtcccgagtagttgcggcacgggatgatgatcagcatagagcaatttcggcaggcggtgttgatctgcaagaaatggatgcggttgccgaacccatggacgtttcagcagatgggtcgcgcagtgcgaaaacgcaaaagccaagcggcggcggagacggaagcacgacgtcgatgcgcaaaagcggtgtaaatcagtcgtcgcttggccggcacgaggacgcgcaacagtccagcgaggcgacattatcagcggacacgccaaatgcggggaataatggcggcgccgaaaatgacgaccacgaaatggccgagcgggatggcgaatcgcagaagaaaacgccgaagaaaaggcgtttaatcaaacagaaaacaatggaaaagtccagcaaacggtccgctgccgaaaagaaaaagaatgtggacagt

SEQ ID NO: 76333 - DNA, 1919 bp, Heterodera glycines
atggagcgaagtgtgaattcgaaccctttcaaaagtgcagaagatgcgccatcattagcctcaacgagccaaaacaatttgctggaagcgcaagtcaaagagcaggccgcacaaattcaaaaactgacggaagttttaaatgaactacagcaaaaagtgaatgttggcaaagaggaagggcagcagagcacacaacaacctcaaacagtagcagcatcggtggaacaacaacaacaactcctacaacaattacatctgtcccaagagccacccgaacaacttggacaacaacaacaacagttgcccatggcacaacaacaacccgttgctgatgttcctttgcagccacaaaatgccgccccattctcagttgctcaacaatcgcaaccacaaccatttgcctctgttctagacccaattactcgtcagcgtctttcagtccgaatgataacagctgggcaactgttagccgatcgtcaacaacagcaacaacaacaactacgaatacagctacaacgacgaatgcagctacaactgcaacaacaacatgagttgatgggttcgccaccggcgtcacgttcgtccagcccaaaccgactgaatatacaacatttgcagcaacagcgaccacagccagccgctagacccctgacaagttccaacgtaagcaaccggctaatgtcagacttataaaaaaatacttacaaaaaatgaaaatccccggatccggaaatgtaataatagagttggatttaaaaagtgctataataaccgcccaaaatttaaaaaaattttcactagacttccctaaatatgaaaactttcctatcaaattaaaaaattgctaaaaaaatcattgtattttaaaacgactcctgttttccctcttgtaataaatattttaattgaatattttcataaattattttttttttattaaaaaatcgggttttaaactatttatttgtttttgtttttaaattattcatgctttgttaaatttttttaacgttttgggattttttgtcaataaaagctgaatgtaatataataaaatttttcaaaatcatagctgtccccgatatcaaacgcgcgacgtgccaaggagcagcaacggaagcaacaacacgatgctggcaccagcagtgggtcggttgctggtgaagtgcaacaacaatggcaacagccgcaaggtgactatgccattgatgcaacaccgctcagagcgtctataccccttcgcgaaggacaacccaaccaagttggcacttctggtgccggtccgtcgggctacagcggtgatcagcagcagcagattcaacatctgcgcatgagtgccaatgtaggcggaaatttagtcgagagtcaaagaagacattcgagagttgaaaaggcaaaagtaatgttgttgcattggtaatttattcaattaggataaatcgttttaaaaaagtttaatagccgtcagggctttcgctttcgcaaattttgtactctcgcgtttcgcatttaggcatgaaatgcgatattacacactaagaatgagggatgaaattcccctaaaattttcaaatttggccaacaaattggcaattttcactgaaaaccttattaaaaatgggcaaaatttccaatttttcaccgatggcgtctaacggcaccgcaggaccccaaaaactcatatttttttttaccaaaatggcaaaatttggtaatttttggcggaaatctgttaaccaattgatttattttcatttcgcttttttgcttgcgcaaattacgctttttgcattttatttttcgatttggcccatccctacataaaagatgcaccaatttatgtttttaacttttattcatataagtttttttattttatttttttaaattgattcactaattgagaacagaaaatccca

SEQ ID NO: 76334 - DNA, 777 bp, Heterodera glycines
atgaatgataaaatcgactggctcggccgcttcgcgccctcgcatcattttcttggcttttctccaatctctgggactcaacccaccagcaattcaatctctgggactcaaatctgcggcattctaaacatccaccatcatttaatcactgggactcaacccaccaacattccaatcaacgggactcaaccctccagcatttcaatcattgggactcaattctcccgaattcaaatcagtgggactcaacccaccaacattccaatcaacaggactcaaccctccagcattcaatcactgggactcaacccaccaacattccaatcaacaggactcaaccctccagcatttcaatcagtgggactcaatccaccaacattccaatcaacgggactcaatccaccagcatttcaatcagtgggactcaatccaccaacattccaatcgccgggactcaatccaccagcatttcaatcagtgggactcaatccaccaacattccaatcgccgggactcaatccaccagcatttcaatcagtgggactcaaccctccagcatttcaatcagtgggactcaaccctccagcatttcaatcagtgggactcaatccaccaacattccaatcaacgggactcaatccaccagcatttcaatcagtgggactcaaccctccagcatttcaatcagtgggactcaaccctccagcatttcaatcagtgggactcaatccaccaacattccaatcgccgggactcaatccaccagcatttcaatca

SEQ ID NO: 76335 - DNA, 830 bp, Heterodera glycines
atgtcgtcaacgcgttcgcgacgttcgggaattgtggattcgggtgggctgaacccatcaacgattcatttactcccaatggcaagagtcaagaaagaattagaagctcgcggtgcgcattctttttgttattaattagttaatggaccttaccattaaactttcagggctggatacaaaaggcagtgcagctgatttggcttttcgtctccaagaatatgttagacttgcaggaggatttgtgtcaaaattcgatccatcgcccgcctcagaaccaacaacacctctcaaaaagcgaaagaggaaggttcgtttatctgcttctttgcgcacaggcaatttaacatttatagttacatatttacaacaatttttgtctttctttgcttattttgacacaatttttagcaactcgatgttgaagttgatgagaatgttgctggctttgatagacaagaagcatcttcgccagttgccgccaaaacatttcgacacttttcttgggcaattgcacccccaacggcgccacaccccgtgaaagaggcgaaaaaagaagaaataatagaaagcggaaatgaggaggaaagggacgaagaggaagaagcagaaaaagagcaaaatgatcaaattcaaattggacgaaaaattgaggaaactgaacggcagcaaaagacgaaagtgggcggagaagaggagggagtggaagaagtggtccaacaaccgcaaacaacgacagaaaaacccgcggacgcaacacagccaacagcggaaccggcgaaaatccaaggcaagttggacaataatgaaaatgcgaatggcagtgccaatag

SEQ ID NO: 76336 - DNA, 463 bp, Heterodera glycines
atgcgagagctcagaggcccgcttgatgaattgctcaagaaggaggccaaatgggaatggggagctgagcaacagaaatcttttgagaaagtgaaagaaatcacttccaggccaaagttgagtaattgccgatcacggccaaagaaattgctgattcatgaaaacggacgacttccttcaaagatcagcaaattccccgctcaagaatggccacaaaaatgcacagacactgatttaatgccatttatcaaaaaagagaccaaataaccgaaattgatggctgtctcacgtatggggcgaccgtggggtcggggtcacttcggcgcggaccatttcggcgccgcaaattttgaaatgctataacttttttatttgtcagttagctttagccaatctggcatcatttgaaagctctatgtgtgctctatatttacatgtaaaaatagaaatgaatgattcaaaa

SEQ ID NO: 76337 - DNA, 504 bp, Heterodera glycines
atgtccgtcggttgggggtcgttaaacacagaccacctggacagtcgaccgtcacgggtgacaatttggtcgggctgtaaccaaactatggcgaggtccctgcgctccaattgggcaagtgacccaaccgaacgattggactgggagaaggaatcgtcgacgaaaaattggtcattttttctatttaaggaaaagtttcagaaaaagcaaaaataagcaatttattccagtaacaactcattcagcgccataaaaatactgaaaataaaaacggcaaaacccactcgcaaaacgccattatctcgtgataattctgactgtgcattattgtctggtattcatcaatcggcgcataatttgacgaatttgctgtggtcagtgaagaaggactgagttgtggcttaaacaatttcaaatgataggagtatgaaggcccaaaaaaggaagtgatggctatattgaattttaggctcccaattgttgtgtatttactacaacaataaa

SEQ ID NO: 76338 - DNA, 1270 bp, Heterodera glycines
gggcagcggaattcgcaagttcttgcaattatgggcattctcacattcattcctccatttgttattttattctctgctgtccttctccccatttacctgtttaataaattacttattatttgacaacatttggatttggtcgaaggtcaaacattttattgttgtagtaaatacacaacaattgggagcctaaaattcaatatagccatcacttccttttttgggccttcatactcctatcatttgaaattgtttaagccacaactcagtccttcttcactgaccacagcaaattcgtcaaattatgcgccgattgatgaataccagacaataatgcacagtcagaattatcacgagataatggcgttttgcgagtgggttttgccgtttttattttcagtatttttatggcgctgaatgagttgttactggaataaattgcttatttttgctttttctgaaacttttccttaaatagaaaaaatgaccaatttttcgtcgacgattccttctcccagtccaatcgttcggttgggtcacttgcccaattggagcgcagggacctcgccatagtttggttacagcccgaccaaattgtcacccgtgacggtcgactgtccaggtggtctgtgtttaacgacccccaaccgacggacattgagcaaggtcatcctccccaattcgcatctcgtcatgttccattgtttaggtctgcttggcaattgttggcttttgtctgcgttggctgtcattgccgaacgacccgacattctcgagaaactgttcattacgaaggagtataaccatagaggggtctacgaagttaggtttgtggcaacataattttggtcttatcggtctttattaggctttgtattgacggcatttggcaacgggttatcgtcgacgattttttcccatgtcatcggtcagatcgacgcctgatttttgcggttgggaggaaaaaccaactttgggtgtcattgattgagaaggcacttgccaaagcttatgggaattatgccattctgcgagctggacgaactgtggaaggcatcaattttaaatggttggggtaattaccataacattttgttcttcattaggactttcaactctcacgggtcagccgacactttccattgaccttgaatatttggacatggaccaacagtcccggaccgctgacttggacatcgcttgggctaagctgataagtgcgagagaagcgcgctttctgatgggatgttcttgtggtgctggtcagttt

SEQ ID NO: 76339 - DNA, 458 bp, Heterodera glycines
atgaaccaaatgcgcaaaattttaaccgaaacacaacaaatggatcaatcagaatctgctcattttacggattttagtgaaagtgatgagagcgctttaaaatgtaaacaagaatgaaaaactttaatttttatttaaaattttagtggacatttggaacagtaacccaaaatctccttgctgttcatcaattacgccatcaacactttctggagaacctgcccccgccgttggcaccaaaattgaagctcaattagcgctttacaaagatgttgaacgagttggaattgatgctgacatatttttgtggtggaaggaaaggacttcgctttcctgagttggcaaaaattgctcaaattgtgcattcaattcttgaacctgatcctatcgatctcattgattatgaaaatgaaatgattaatgatgattaaaaatattgagtcatttacctgaataaa

SEQ ID NO: 76340 - DNA, 759 bp, Heterodera glycines
atgtctgaaatatggtctttttataaaaaatcgcaaacatcggaaacggcattatgtaacctttgtcgcaattctttttcgtgtaagaaatcgtcgactaagggattatgggatcatttaaagacgatgcataatgacgaatttgaacaatggcaaaaaaacaaaggaaacacaaataaagaagtactaaatttaaaaggttctgtgatttataaaattttttaggggcaagaaaacaaaattacgaaattttttcaacaatctgatgaccaaaagcaaaaggccgacgaattggttctgaaattaatgttgcggacaaattcatcttttttaatcaccgaatcgcctgaattgagagagctgtacagcaaagcatttcctggatttgaagttattttttctctttattattcctaaaaaaatcattttttgcagctacatagtagggaatatttccgtaaaattgttctaccaaaaatggcaaatgcaatcaaggagaaaatttgttcacaagtttcaaacgattatttcacaataacaacagatggttggagtcaaccgacttcaactccttcattattaaggttataaattctctttatgttatatttaagttaaaattttagcattactattcatcatattgacaatgaattcaaccgaaacgattttgttttggaagcgagtacctatcgaatcacgattctggcgacaacgttgccgactcaatttatgatgcacttgatgaaaacggattaa

SEQ ID NO: 76341 - DNA, 561 bp, Heterodera glycines
atgaatgaatttgggttagtttgcgaacttagcgaaataaaattgctttacattcaaattaaatgattagacccgcccctctcctccagcagattcttcagactcgagtttttcttggttaaattttgacttcagcagtataaaagaaaattgccgaaaaaatcattttaaatacaaaaaataaatatcagttttcaatcttcaaaaatgtttaaaagagctaaccatgagaaagaattgaaactgagaaagaaggaacagaaacaaagagattaaccactaagccacaggagcaattaaattttcattaatttttcattcctccaactttgctcaaaaatttgatccagaaccccattcttaccagtgtacttttggacccggacctaccgggtcgggtaccgggtttgcaacagggttgccgcaaatcacccgaaaccctacattttctcgacccgaaacgcgacccgatatttttctcgacccgcggcaaccctggtatgcaatagagagactctaaaatttatattgtctatgagtgaaattattgggccaaataaa

SEQ ID NO: 76342 - DNA, 1470 bp, Heterodera glycines
atgtcctcttcggtcgcttcgacccccgcttcgcccatttctcttacggccgccccacgccgcgcctcagtttttgccgaccttttgacggtattccggcgcaagagtaccgccaccactgcgcttagcacacggcgtcgttccatttaccatgcgccggtgccgtcgtcgtacacggcacggaaccgacgcagcggagcggcaaaaaaggcggaagagatggaactgttcacggacagagacagtctccagtaaaaagcgaaaaattatagaggggaaaatataaaaggatttacaaaacaaatatgttaaatcgaacttagatttttgattaattaaaaatttgatcatataaaaaagaaaatacaaaaaaattcaaaatgatttttttttaaactatccaatccatttgcatgtgaataataaatgtcgtagaattgtttaattgtaaaattggctaattgaccaaacgatcgctaatcctaattaactaataattgagctatctaattacatccaaaaatcaattgccatttttatttgtcactttttcagtgaggctgatcgcggagaaaaggacgaggaggaggagacggccggcaaaccgttgacacggcagcatttgttgaacaaaattcgcgaaaagaaggaagtgatcaacaaactgcgctgccaggcatggaacatgaacagaaagagacgaacactaaggtgggatacggtagcaaagagaagaggaggaaaagaaaaacagtgtactgtataagcggaggaaaaggaaagaaatatgtactgtagaccaaatgtaatttaataggcgccaaaaatggaagaaatattcgcaatttttggacatttataataaatccaataatatttaaattttgttaaattatttcccaagtcaataaaatacaaaaattcagacttgcccagaaatacttggagcagaacgagtccaaagtgtccaaaacgcatttgtacaaggaggagttggtgaaacggtggcgctggttcctccgttggttgagcaacattggcatttattttgtgggaattgtgccactttttcagtgttttgtgatttattttcattttaggtcccttgggagtcgcggataaaacgaattgaaagtgaaaatttcatttaaaactgagaatttaatttaaatcaaaggccaatttggctcagtcgtgtccagttacttcacattccttcgctgggtgatcttcatcaattttattatcactgtaagttcttcccctttttcaaaatacctttgattattattattgtattaattaattatttattttttacatttcctcagtttatactaaaaaaagtaattttaagccatttttattttaattgtttttccagatcattttttattactttttaaattatttttttgtcattaaattattaatttatatttcattactattttctttcttttataaata

SEQ ID NO: 76343 - DNA, 1053 bp, Heterodera glycines
atgcgcagaaaaaatatgcaaaatcatacaacttataaccctaattataatttgttcaatttggtgaggtaataaatagtattctccaatttaccaaaaatgtttgcttcttccaactataaatgtttgctttttttccattttcctctcattataaaaaatatttctaacacaattattcccctctttgtgtgacatccttcgaaatattgcaaattgtgctaattgccacaaatgaaccgacggtttggaatttctcttcaaataaccaattttaatttagcctaactattccacaatttcagttgggtttgcagcgatgtttggttggacattttccctcattttgaccgtcctcaactcggcttaaaattggcacttctttcgaaccgttttaatgcgctggtggacaaacatttcgatggcaaaagggaattgtcaatttggagtgacattacaattggcaagatgggagcaaaagcaaaattgtctgtggagaagagcaatgccaaatctgtgcgctttccattgcccggccattcgctgcccaacaaaattcgctttaattaccttcagattgagtaaatcaaacaaaattcaaagaataattaactaataaaagcatacccttacaggtacattgattacgccgtcatcaaatttctccgtgccaaccagcaaatttttgccaaaggcaccgatttggatttgcatgtgcctttcccctataaggccaaggatgtgcagaactttgcctgtgaaatttggcccgtttttgcgacaaacattcgccatttgagtgttactgatggtcgtcatcttgaaaatttgcgtcgccacacttcgccgacaattctctccgacctcaacattaatgccatccattccgatgatttgttgcccgatgcaattgctgacgatgggccaaatgcaactgctggccaagcgctgtcaaaatggttgaacattccgagaagcgatggacagccaaaacaattgagttgttgtggtgctgtgtcaagaaccattaaattggtcaacagtttcaaagag

SEQ ID NO: 76344 - DNA, 396 bp, Heterodera glycines
gcatttctccatgccaccacttcttcggccagctacataattcgacttgaagattttgaaccaacggaaattgagccatttgaattggtgaacgaacggaccaacgaaatgcttacattcgagaaagaagacgaccatcaaaatactaataatgttgcttgtctgttgaagcgatttcaaattggggtgacggcgacgattcattgggtggacgaaaacctggacaatttgaacaatgtcaactttcatctttatgaatttgggtgaattgggcaacaccattttcttttgtttcaaatttcacttcattcatcaggccattgtctccaccaaaggcgggccaaatgaagtcaaaaagtcatcggaaaatgaaactcgggcccagcggacagcgaa

SEQ ID NO: 76345 - DNA, 2409 bp, Heterodera glycines
atggcagctctggtcgcctttcgccgggaattcttcgaaatttcacggcgccaagactacgttgatgggattgacgacaaggagaaccacgacgggatcgatgtgttgcgtgagtgcatgaccatcgcaggggcatgcatgcgacacttccgcacaaaccacctgcccgacgagcacttggccattgtccccgagcgcggctatgacaacgcgcagaaccaaagcctaatcgccttacgcttcttccacgggtacgccaaggagcatggagtgcaagtgcagacagcccacgcggctggaggagagaagattgggccctactccttggatgggtggattgaggcggaaaggcgcgcaattgaagtcaatggtaattgagttaattatttttcaccattattataaaatgggcaattttaaggctgtacgtggcacgggtgcaaaaggtgttaccccaacgacaacatgctgctccccaatgggaagactgcgggacaagtgcgcgaacgggattccaagcggatggaatttctgaggggaaaggtcaaccggatggacgtctactgggaatgcgaaatccatcggatgctggagaggagcaaagaaatgcgcaaggcatttgacgactacgtcgatgatggcccgctggtgatccgcgacgcgtttatgggagggcgaactggaccactgaagctgctgcgcaaggctggaccgggagagaaaatctcctattatgacttcacatcgctctacccgtacataaagtgagcacagttaaagttgtaacaaattaacattgtttccttcacagcttcacaacccgttaccctatcggacagccaaacgtgcatgtgttgaaccaggaagtggattggcgcagtgcagcggacaacccctaccctttggcactgctcaaagtgtgggttgtgccaccccgtcgcgtcgacgtgcccgttctgccggttaaagttggagagcggctttgttttccgctctgcatcacttgtgccaaagagcatccgactggtggtgtgaatcccaactaccactgcgagcacaatgacagacagcgggggtgggtgagcacgtgcacctccattgagctcaacgaggcgttggacgagggttacctcgtcacaaaggtcttccgcgtgttggagtatgagcaaagtgacgacaagctcttccgcccgtacatcgctgagtttatggcccagaagatccaggccagtgggtttgacaacagcatcagaggcgatgcggagaaggaacaacagtttgtgcgggagtgcgcagagcagttcgacatcaccatcgacccaaccaaaatggcggtcaacaaagggaagcggtccctggccaagctctgcttgaacaacttatgtgagtactgtcgtccattattattatatatttttaaaaaattagggggtcgattttcgcttcgcaactttgggctcgctcaaacactcatcactgacgacccagcgactttggcggagtacctggacaacaaatccatcgaagtgacatcaatcgacgagttggacgagcagcacatactcatcacctatctgcagaagaaggactgggtggatgagcactcatgctccaacattggtgagacacacacactcacaataaattgttaatttttataaaatttcagtcatttcactatggaccacctcagcagcgcgcctcgttctgctcaaggcaatgcagaaggtggtcagatcaccgggctcggatctgttgtacactggtaagtcaaactacaaaaaaaattttgtgcacaaacatttattttagacactgacagcctcatcctcgtccacccggaggagcggtgcccgctgaaaactggcccccacttgggccagttcaccgacgaataccccgaccacgacattgtggaattttgcagtggcggagcaaaacaagtgcattttcagttcatttttgtttacttcaattttaccaccttttagtacggtctttgtctgcgacgcaagggcgcggaggcgggagcccaattggaacatgtgctcaaagtgcgcgggctgacgctaaattatgatgtgatcaacaaccaggggatgcgctatgagaacttcaaagaggaggtggtccgttacgcgacaagtggtgaatacgagccgataatcatcacataccccaacttccttcgtccaaacatcagggagggaggtcgggtggtttccatgcctatgcaaaaatgctatcgcccatttgtgggaaagggaatcatcggggccgatttcaatgtgctgaattttggacacacattgtaatttgtacattatctatcacacacacacacacacatatgactgtttcttttgtacctcaaattgtgtacattttatgccattttattagttttta

SEQ ID NO: 76346 - DNA, 853 bp, Heterodera glycines
atgaaaagacgcattgctcctcttactactgctactgctcctgctgagcaacataaaataattggtcccgagtcgcccaagccacatgaagagacggccaaaaatgttgagcctaaggatgagttggcaacgaagaaacgcaaagtggacgaccgagagttgtggaaattggcaaaaggcaaatttttgctgaccacctatttgtgccatggtaataattaataacaatttcatcaaattttaatttgaatccataaattttgagatgattggaatcgtctgtacaacaaccagcagaaagtgaagcgcctggagggggaccgttttgccttcggctttgagatgtgtgaggaatgcgtgtgggccaactgccgcgcaaccgaccttttggcgccaatgaagaaaaagtgaactttgaccaaaagacaataatggattttgatgatgcaatccataatttgaattaatatttaattctgcacaataaacattttttgagacagtccctcaatttccttttttgtgtttgcttcagatgaaatctggggtgatgattaattggcttgccgaatttgaatctggcaaagacactgaggggggggggggggggggagggggggcacatggataaggacaaagcgagtggaaggaccattcatgtcttattacacaaaccctctaaaatataaaatgtccccgcgcaaatcttcaattgcaccatcgctggttggaatagcaagtaatatagttttgtcaaaaaaatttttgaaccaaattgttctgttgaaggatgcggcgagtgccattcggcccggtgcagggtgtgcgaaaaactgagggaacggaattgtga

SEQ ID NO: 76347 - DNA, 1278 bp, Heterodera glycines
atggcggacaaccaattgcggcggaagcggatgaaaatgacgacacaattgggcaagcggtaatttttcacaagatttttcaaaaaatttattcctttaatttgaaggggaacaaattgttgcggcgggcggtggccaatcaacgcattacatcgtccggctcgcgcagcacagtctcgcgcacagcgtcgcccgcactgtcttccacttcgtcaaatgcctccagaagacagaggaaaaattacaacaaaagtggacgtgtaccggtaagaaaaaatttgaaaattcacacacaacacacacacacacacattcacttcctagataaatgtgaatgccgattgcccaaatgtgccgcccggtgtactgccgaacccaaaatcgcgccagtaccaggtcaagagcgtgttggcacagttcactcatgcatcggggaggaaatgctatttcttggagtggctcggtgagtttgatgatgaaattgaaagaaaaaatgtgtgaatgaaaaggtggacggatggataaggaaattgaaaatttattgtaaaattccaaacgtgtgccgagttaacctggtttagcttcgccactttcggaacggaataatttgagggtgtatgccgagttaacgcagtttagcttcgctacctctcgtgctatttcactttaaattttctttttccttttccattcaccaacccattttcttctctcattttttctcgcaattttaggctaccgcggccgcaactcatggtgtttgtccgaggacaccgactgtacagagtacattgaaagatttgggaccgtggcaacagtcgatgctgtactgtttgcgctattgggcgaaagcgtcccagcttcgatagctgatgagctccaggccaaccctaaatttggacaaggtgtggagagtgaggggaattaaaaattgcataattttttgttagtgttggcaaagttggatgacattgaagatgaattcatattgaggacaactcagtataatattttgttcgcaaaagggcttatggaaagccccgagggcaaaaccataattgaggatgtaaggcacacaaatgcacttttaaaaaaaaattcctttcctaaggccaagagtaaactgggacgcttcgtggccaaatgtatgagctgatgagtgatgagtgcactggccggccgaattgaaccttttcacaatttaaatttcaccatttaaattttaccatttatttcaccatttaatttcaccatttattttcatcatttaaaaataaa

SEQ ID NO: 76348 - DNA, 910 bp, Heterodera glycines
atgctgctccccagtgggaagactgcgggacaagtgcgcgaacgggatgccaagcggatggaatttctgagagagaaggtcaaccggatggacgtctactgggaatgcgaaatccatcggatgctggagaggagcaaggaaatgcgcaaggcatttgaagactatgtcgatgatggcccgctggtgatccgcgacgcgtttatgggagggcgaactggaccgctgaagctgctgcgcaaggctgggccgggagagaaaatctcatattatgacttcacatcgctctacccgtacataaagtgagcacagttaaatttgtaacaacttttaacattgtttccttcacagcttcaccacctgctaccccattggcactcccaaagtgcatgtgttgaaccaggaagtggagtggcgcagtgcagcggacaacccctaccctttggcattgctcaaagtgtgggttgtgccgccacgacgcatcgacgttcccgttctgcctgtgaaagttggagagcggctttgcttccccctgtgcatcacttgcgccaaagagcacccgacaggaggagtggacaacgactaccattgcgagcattccgacagacagcgggggtgggtgagcacgtgcacctccattgagctcaacgaggcgttggacgagggttacctcgtcacaaaggtcttccgtgtcctcgagtatgagcaaagtgacgacaaactcttccgcccgtacatcgctgagtttatggccaaaagatccaggccagtgggtttgacaacagtatcagaggcgatgcggagaaggaacaacagtttgtgcgggagtgcgcagagcagttcgacatcaccatcgacccaaccaaaatggcggtcaacaaagggaagcggtccctggccaagctctgcttga

SEQ ID NO: 76349 - DNA, 1439 bp, Heterodera glycines
atgaacgagaaaccgtcacatcttttcattttcccatcgaaatacgaatcttctctgtttctctctcacatatccacaaaattgttccgtaagtttttttccattaaaaaacattgtcctattttctctcttagccaatgctgcaagctcatcagtaccaacttcggcaaggtcatcgtcgcgtttctgctcgcagcattttggcccatttcggtttcgaattctcgaacgactaccgacttggctgcggacattacagtaaagtgtacaaaggtggagtaaggggcagagtagttgtgtattttcgcagatcaaatttatcttccaggctatttcaaggaagcgcaacgcacttttgccatcaaagtcaccgacttggaaagcgtttccgagaagttcaagcaaaagtttctgccacgtgagctggaagtttggcgggaattggaccacccgaacctcgtctatttgtacaaagatttccagtggaacaattatcagttcgcagtgatggaattggttgttggtggtgacttggtaatttcctcttttgttttatgtgtgttgcattacttcaccgtttactcttcagctttcgttcctccaaaaatgtggccacgtcagcgaaacgacctgtcacaattggatgctccaaattgttgctgctttggattatctccaccgtaagggaatcgctcatcgcgatctgaagctggaaaacgtccttctttgtgaaaacggcgtcatcaaagtcactgactacggattctctaagcaggtggtgaaaattgtttttgcttatttgaagttgattttcagagttctgatttgtcttcaacattttgcgggtcgcgttcctattcgtcaccggagattttgcttggcatcgcttatgacatgttcaaatcggacatttggtcaaactctgttgtgccatcctttttatgctgatcataatttcaggtcattaggcgtcaccgcgttcatcatgatcacaaacacaatgcctttccatgaagacttgcccaaccagcaaatcgttgactcgcagcggaagcgccgttacaaatacccgtcatggcttaacattacgaagcaatgccgcactgccatcgatgccttgctgacttaccaaccggcttttcgtccggtagagttttgcttttaattcgcttctcattttctttcccattcagaacatttccgaatgtgccaagttggaatggtttgctcaagattccgcctctttgtgttgcggtggtcgtcgtgccggtgttggagtgatgggtcaagtgcgtgggcgatgataggccatgtgatgaccaatggacagaagatacatttgataggattaaatccaagcctaagcttttcttcattttgtatgcgtatctttagtctttgtttgtacatacacacacttgttaataggaataataata

SEQ ID NO: 76350 - DNA, 170 bp, Heterodera glycines
atggccattgctcggacttcggttctgtccccgttgctcctcttcatctttcttctgttcaactgttgcctttgccagccaaatgtcttttcgcctaatgatttcgcttgcgcgaagaaaaatgccatttttcacgatggactgttcactctcactgaagacaatcgact

SEQ ID NO: 76351 - DNA, 488 bp, Heterodera glycines
atgcgaccacactttggcccctctctcctctcgcttttcgttttgtctcttctgatctttgccatcgcttcgttaaacgccgctgacgaaatgccgggaacagaaggggaggaaataatcatcccttgtgagtaccaaccatcaattgtccttcgtctcatccaccaatgatcatgactagggatgccaatcatatggatatccatatttttttcctggactgttgagggcctgaaacgcacgaaaaacatgtttttagcttggtttgaagcttgtaggatggatttctaaatccatatttttccatatttcgcgatttatgtccatatttccatattttggtccatattttatgtccatattttggcaattttcaaaaaaacctctattagaacggcccccagcagctaaattagcctttttgagcccaaaacccgaaaaatttttcaaaaaatcattttttcgccaaaatttctcgagaatattga

SEQ ID NO: 76352 - DNA, 155 bp, Heterodera glycines
ttcttcaaatttattggttgaaattgcatatgagatacatttccaaattttttgactcggtaaggcgctttgacaaagacggctttcgttttgcaattagtcggtcaacattcggaaattggtctcgaattttttccgcaattacgtgcaatcat

SEQ ID NO: 76353 - DNA, 1662 bp, Heterodera glycines
atggacgcggtggagtgcgcggtgggcaaagatttggcacgcgagttccaacggatggacgagaatccgttccaaatgcgcggcggtgcaatgcttcgactgagcggtgcgtgccgctaattagttattaattagtccaacatttaaaatgcgtaaaatgggggtggcaaacaattttccgggcacacagtttggcgccagtgaacaaaacagcgccaatttgaaaacccaccgaattttagaccaccaaaaggcggcgctgagcgcagcggacattgaggcggacatcaaagagcagttcaaaaaggagacgctgctcagggacgaacacgaagagatgtgagtggtttgttgggtatttttggaattttgaagcctaccaaaattaatttggatttggcaaatagcccccaaatgcatcgctttaagaacatgagatgtgtgaatttgcacgccttttttgcaaatttttggtgtgcaaccccaaaacaggaaagtgccggaatttttgtgccttatgttaggttcctggaaaatcctttacctcgggggtggaaggttcggctatttcctgtccgggtgctctcgataatcttacgttttaccggctaactgtttctcataattcgattgatggactctctggcgctactgtaaatgttaccgattttgaaatttttttcacttttttttcatgcaattttattttctattttttattaaaattagcattattaatcacaaaaattataattacaatgtaataaagcaacaaaagccttaaacagacatgaacatttacgtgagactcaaagcactattgtgaaaaaaacttttgtcgcgcactgttttgaatggatgacattggtgacagtgccactaaaaaaaggacttaaaaaaagatttttttcaaattacttcaaatccatcctttacaaaaattgtaaaatctcttcagaattttgggaaaaaagccatctcaaatttatatcgtccaatgttggaaaagcgatgagtgacagattgttggaatcattaatggaatatcttgaaactttaaccatttgctaaaaaaagtttaaaaagcatttatagaaaataaaattgcatgaaaaaaaagtgaaaaatttttcaaaatcggtaacttttacagttgcgctgactctctcatatctcctttcatcattggacaggcgtcgctatgtggagacgcgaattgcctccgagtgcccagcagcgttggcaatcgccgccgcaaatgccaaagagagcgccggcgacggcggtggcccatcgacggccaaaaaggtcaaagtggcgggccccgaggacgacattctgtaccgggcggccgagcaggtcaaacaccacggcagcaaacgcaacgaggaactgttgtccaaccaaatgctggtcggcatccccgaagttgacctgggcattgagtgagtgtttgttggttgtgtagcatacattaaaaaatgggtggggggtcgattttttttttttgccgggatatggggttggtggtcaatttttaccaagggtccggccatgtaaatcgacgaccttttttaaacaatttttttgcggcgcgtttttattcagaatttttgggagttgtgggtccggcggtgccccaggggaaactgcaacttttta

SEQ ID NO: 76354 - DNA, 318 bp, Heterodera glycines
atgccgagcaacgcgttcgccatggcacagtcacagtccgcgccgaccagcccggcggtgacggcatttgccatgtctgaacagcacccactgctgctacgacaacagcaacaacaacaacagcagcagcagcagcattggtcacagcagacgccgatgacaacggtagcaatgatggcacaacaccaacaacagtcgtcgccgtgccggcacttctccgccagcccggacggcatggaagtgccgaacatttgtgtgaccggcaccgacgggggcgacattgactgcttccaggtgcttcttttggcaattagctaa

SEQ ID NO: 76355 - DNA, 318 bp, Heterodera glycines
atgccgcaaatgtcagcgccgcaagtgtcagcgccgcaagtgtcacgccgcaaatgtcagcgccgcaagtgtcagcgccgcaagtgtcacgccgcaaatgtcagcgccgcaagtgtcagcgccgcaagtgtcagcgccgcaaatgtcagcgccgcaagtgtcagcgccgcaaatgtcagcgccgcaaatgtcagcgccgcaaatgtcagcgctgcaaatgtcgcatcacccatcctttattggccaaatgaaacatttaattatttagaattttattatataaattattgaattctactattcattgctactaataaa

SEQ ID NO: 76356 - DNA, 626 bp, Heterodera glycines
atggaaaaataccataaccatctgtccgacggcatactgtacccactgcaattttcgaatcggaatcgatgtttttacgatgcgaattggaactgcgtttgctcggcaacctttcaaattgtctctcgaatgaatgatgaagctaggaattggactgacaatttcagtgcagcttttaacaattcaaataagggctggggattcccttctttcattacacttgcggtgagtttgtttcccttaattgacctaattagggacaattaaggaattgatggacccgaacaatggcttttatgacaaagacgaagacaaaggcacattggccattcatttcattataaacccaaatcagaaagctggccgtaaattccaatcacttttggacccaaaataaatcgagaaaaatttgatcagatcatctttctgctgatgaacctactttgttctatcatttgcacattttgcctagtttgtaaaatcatttttggatcaacgttttgctcaaatgtcgtggacgggtttggggtcctaacctcttaaaagcaaacaaagcggaattggtcagaataattgtttcataatatccattaaatgtgtcgcccgttcaattaaactaaaataaa

SEQ ID NO: 76357 - DNA, 1203 bp, Heterodera glycines
  unsure (1)..(1203): unsure at all n locations
atgtgcgttgtgtgcaccgattcggcagcgaggtgatgaaaccaaaacattctttaagcattcattcctccgactaatttttttttgttttcggcaattcaaaaaaaaacttaatttgccatatgtcatagaaaaaaacagccataaaaagtcatttttaacaacgaattcttaagtctaatggagctttgtttcagctctttggaatggcgttactttatttattttaaatccaggtccaagttagacaaagaaaaaagaatttggaatccctcgataatatttttagaatttgttgtttcaagcgacccttttaaaatgtatttaaatatattcttattgtcaattagatgcttttagattttctaagcaattaattaactttttcaaacgttttttctttttaaaataaatttcaaaaaaataaaaactgtaaactttaactaccgtgtttttttttaaatttcattggaaataataaaaaatattaaaagggttaataatcaaactttttgattttagaaaaacttctaagaaattttgaaaacgaaaaaattccagagctgggggggagggagctggtcctgtttttttggcttttggcgcatgccaatgtcctcggcctttaacaatctgaaaatgtttttctttttcagtttcgttgtgaccgaaagcgatcgactgccgatgactcccgcctttttctgcagaaaatgtttccgtgcttttcattacgacggggagcagcgaattggtcaattcaaagctttccattttatggaccatgccgggacggagtgaatgaattctttttgcttttatttttctcattgtcagcaaatgacacgcgtttaaattccgatcacttattttttgcataaatttaatatatattaaagttagtgccactcggtcagtcactcttgcaggggcgatggtcccagagcttggagagggagggcaccaaaaaagaaaatcggaacttttcaccatttccctcttgattatgctgctgctattcaactcactcggcctcttctcttggttttcgaaagaaaattaaacagaaaaaggagggatttgggacggaatctgttgggggtggggtcaattanatattattagtgcgtttggttttcgtgcagaatgccacacaataggcagcgttaaaagtgcgcgggatcataagtgccaaagaataaa

SEQ ID NO: 76358 - DNA, 57 bp, Heterodera glycines
ttataaaatatcttccaaatctcctatatttcacttatgtgaaaggacctcgggtct

SEQ ID NO: 76359 - DNA, 1088 bp, Heterodera glycines
atgtctgctttcactacgacggcacagcgtcaattggctgaaaaacgaggtaacaaattctgtaaaatttatgaacaaaatttttgtaattcaacagttttcgctaattgtaagtgagatatttgagtgaaattagttaacagattttgtccaaaatgaccaatttttggtttcgagttaagaaaataaagaattttttgggccaccgagtattaaatcggtccctctattaaagcggccttttaatccctaatgactgaaaatttttctaaaaattaatattggatagttttctcgaaaatattaataaaaaacgtttaaaaattggaaatctgtgtcaaaaataagactaaaaatggaaaatttatgctattttttagacaattttttcaaattaataattttaactttattttgatagtttcttatacaattatttttaaacgtatttagctattttcgagatttaagcttaaatttaattaattttaaaaaatttcaagaaattttacattcaatttggaataatttatgtgcatatttttcacttttatatgcatatttcgctttaatgtataatcatgtgcatatttctcactttgatgcgcatattttgcgattttatgtccatatttttgaaaaccctattcattaatttctttaaagtgttcataaataggcaaatgcaagcagcaacatctcaacaggtcgtcgaccacaacggcacaaaaagagagccgacgacaacagacaatgaaggcacgagcaacgtggacaggggccgagcacgacgaaggcagcacaacatcacgactgctccgtgagttatgcagcagtttctgttgttgttttttttttgctattttttaattcaaaaaccaatttctaacggtttgaaaaagttttttgacatttttttgagttttaaaactcatatgtctacttttgcatgttttgccaattttgttgggtatggccttttcacagttttagaagtaaatttatttataaggttttaaaatgttcatgcgaagtgtctgttatcttcccaattaatctccttttttaaagatactgcttaaattaaa

SEQ ID NO: 76360 - DNA, 166 bp, Heterodera glycines
atgaaaaaacaattgcacaaattaagaaatgaacaagagtcaaaaattatttcccaggggcaaaattcagttaacaaatttattagaaataaattatcaaaagttaatgaaattcctacgttaattgatagtgctggaaatatgttttccagcaatgttcaaaaat

SEQ ID NO: 76361 - DNA, 1518 bp, Heterodera glycines
atggaacaacagtacggcgttttcggctctctgttccgaagcggcacgcgcacctcatttttcgcttctcaagtgggtgttagttgaattgatgggtcatggctagggatgcgatttttagttaaatacctaaaattttgcgcatttaatacgcacagataagcacgaaaaaagcattttccacttggttttgggtgtctacgatgacttttataatacctatttttacctattttggagtttttctacctattatacctatttaaggattttcagaaaattccttaacaaaaatgcaataaaatcaaaaaatacaccactaagaattggaaaatttttcccaaaaatttatttgtttttttatgtaacaaaatttttaatttaaaatgtcaatgttttctaagaacatattaaaaatatttaaattattcgtttacaaagaaatagaaccaaaattttccccttttgtttgcttttttccactaaaaatcgttaataaaaaattttatttacctattttggaatttttgtacctatttaatacctattttgagatttttttttacctatttaagtacctattctgggatttttcttacctaaaaatcgcatccctagtcatggcatttgaatttggcatttaattacattataaaaaagtcccatggttcagcgatgccatgccaactcattcagattttttttatgaaaaccgcccccaccaaaaatgctcgaagaaaatttaaaaattttcaataaaaaattgaattcttgaaaaaatcgtcatggtttttcaaaagggaatttttattttcttttttttactagaaaaaactctaagaaatttggaaaaatttccgaagggagggcggaaaacgagtggggtacgtgttaagacatttgcggtccggacctttgcgcctcggccccgggtttgtttcgctcatattcttttcctcctcttcgttgcttccagttgggtgtgggttataaaagttttttttaaagacttgaatcggcttacttgaaaacccataaaaaatcggttaaattggatggaaaataattttctgacgtttatattttttggggtcgaaaaagctgagccgcaaatgtcgtttttggctgtggacgcaaatgtccgaccacatttgtcgggccgcaaaatgtcctataaccgtggggtattaccccccccccccaaaaaaaaaaaaaaaattttttttttactgggaaaatataaattattccgatttttaaaaactttattagggcgaggagatcccttccttgtaaaactgactaaatttcataacaaaaaaattttttggatcaatttttattttcgcccttttcaggtggaacggtatgccgatttgtatgccggctcctgcctcaacttggttcattatccggtcttctatttcttccgcgctccaatggcactgatgccgcacgaatcgacggtggaccatggggccgcaataccggacaaagggtcacgccaaaacatggacg

SEQ ID NO: 76362 - DNA, 649 bp, Heterodera glycines
atgtcgggtaaccggattcaggtaaggaagccaagaaaataattttcttgcaacatttgttcctgcttcggcttggaaacgagggatagattcaaagaatttctaaaattaagggcaatcatacaattttttagaatttgcctcctttccgtcccctttttgccatggcgaaaaaccctaacacaaacaaaaactacaacgcactgttcgaatttgtcgaaaaagtcgacaagccgtgtgatcaggtatgcatccggcaggttgaacaatgtgttgagcacgtaaatttggcgttccgacaattgcacaaatttgttcgggtagcaatcctcaacctctttcctgaaaaaaatttttggaccgaaatatgcattgaaattttaatttaataattttcaaaaaaaaaaaattccaatttcagcgttaatatcgtaggcataacttttattacatgaaaaaaatcgggtgcaccccaaaattttgccgacgaattttttaaaaaattttcaaaattagaaaatttcaagaaattttttttttagcgccatgcgattttcctataatcatgagattttcttacaaaaaaaaatctaaaaaaattttcgcgacacttaaaaaggcataaaacgctaaaatttatggtcttaaa

SEQ ID NO: 76363 - DNA, 689 bp, Heterodera glycines
  unsure (1)..(689): unsure at all n locations
atgcatccgacttcatgcngtatccagagtccagaagattacatgagtgagtacatttgtgcggacgtcccttctatgccggacacgcgacttcagtcagcagaagaggcaaagaggatgcgtgaactctacaaaacaatcaccacaaagcatacccatacatactcagcccaacgttatcttgttgatggaaaatgcaaaaaacattttccggttggaaatccttctttgggtaaaagataatattctgtatattaaagaagccattctcttatggctatgtctactcggaaaatgcgtatccgtgttatttacgccgaccgccagcaccaaacgaaaccatgcgtcaaaagcatccacattgcatttctgaagtcgaatgactttacatttttgccaactgcgacaataggaattgctgcagaactactgtatgagggccaaacagtacataagcgaatttgcgtcgcaaacatgttgattcttcaacgccgattatcttggactacgacagacaatttgcgaacttttacgtcgaacccatggcatgaggaaagaagaacgaagaaaaatttaaggagatgagattttgagtatttttgcgttgtaagtcccattagtttcacaatgtttgtttgccttgttgcccgaaaacactcgccactttttacacagaatcactgaataaa

SEQ ID NO: 76364 - DNA, 340 bp, Heterodera glycines
atgacaatgagatttatgagttttcatccgagagagaacttctctaaaagattacatttaacattagtaatattctccaattctccaacgttaattatagatcttataagaagagttctggtatccaaattgttttccatataaatgctagtcctttctatatactgaaagaacttttttggaattttgcagggtaatagtgcatctgaagggctttcgaatgataccaagaatgttgaatttggttggcaaagaaaaaagttatagttcaaaaactccgccccacgcgaaatcggcccacgcgaaaacggcctggcccgtaatatgttaacagaaaata

SEQ ID NO: 76365 - DNA, 516 bp, Heterodera glycines
atgactggaaaattgagtacatataattttacaaagtttatgaacaacgcaaacacaccgcgggtatacagaattaggcgttaaaagatgtatccgaccttaaaaattaacatacagtacccataaaaaaactagggcaactaaaatccaccatttcttggtatctttcagatctatgagtacaacatatgggttccctcaaaggtttcaaaacatgataacaaaaatgcgaaaaaatcgggtttttgaattctttcgttttttcctgtccaattttttatggtccggtgaatttttacggtcgggaaaactgcaatagaaccgccctcaaattctgttttccgaattttctggttttcccattttttcagctcaaaccacatacaatttcacttcacacactcaacactgctcccatctgcttcaccaaaaacgcaacgccatggtgctcttcgcattgctccctgtccagctgatgctcgtcaaatgaatatatttgaaaatttaattattaaa

SEQ ID NO: 76366 - DNA, 1861 bp, Heterodera glycines
atgcaacaagccgctccagtccagcatctccaaaatgacagaaatgaacaaccacaaaatatagaaaatcggccgattaacaccgctaacactggggttgccgaaaattctgtaaacgatggcgaaattttagcacacaccatgaactacgaccaaattcttcacgccgttttgaatgttgggtcagcaaaccgacaaagtggacatggacaagatgaagaaaatgtggaaaatcaagatttggcaattcatccgaatttgacgcagcaacatggaggtttgagaatgcgtttcagacgcttgccaaatttgggagaaaacagtgaaagggaattgtggcaagctgggaacgaaaacaatagtggtcatcacagtcatcacattctaaatcgaaattttctgcgcacatcaacgcctaataacgagcacattattcatgagttgcatattcagcacccgcgtcaaaaccctcccaatattcaagcaaatcctaattttgtgcggcaaaatttgcaaaaaactgtgactgataaccagcgccaggccaacccaaacgttctaattcctccacctcaagttattcaacaaccaattgcggtatatccgccagttcagccaccaattccggaaacttattggggatatcccgcaccttactatccacatcccccaccacctatgggttacccaaatcagcaaatgtttggaaatgcgaacactaaggtgccgcaaccgacccaaattcgtcaccaaagtccaacccaaataaatggccagcaaacagctcttaacggcctcgaatgcgttttaattctggacaaattgccggacattaagggcaatgaaggaaatgacagcattaaatcttttttcaaaaaattttcacagtataccagcgattggccgaataaaaagcgcattgattccttggaatcgaaactcagtgggcgcgcagagcgagcatttaattcggctttggccaatgaaccgtttatatttgaaaacataaaaagacacattctccaacaacttgaggcgacggattgtcatgaaatggcagcatttgatgaattaatgcaaggcattcgccgaaagccaagagaagggctggatgatttggccgaccgaattgtgagcctggtgcgaagggcctatccgggactgacgcgaaatttggcggacgagtattcgattaaacacctaatccgcagtttcgataatgccgaacttgccttgagtttggagctaaatcgtcggccaggaatgagttttgatgagtttgtagctctagctgctcgtgccgaaacgacccaaaatgcggcgagaagggccaattcggacagaacgcaacaaaattttggccgtagccagccacacagacaatatgatggaccgatggccaaacaaagcacaaacgcatttgagccgaacaaattccagcgattcaatgaaaatcgaatcacgtgccaaagttgtggaagagagggacatgtggcgagaaattgttttaagcgttttgcagatcaggatcagcgtcgatattttggccaaaatcaaaatgcgaccggtgccaatagagcacaaatggcgacacattcaaatccgaatgtcagccaaaaatccgaacaaaatcagtttgaacagcgccagcaacaccagcaatcacgaaattttctaaaaaaaaatttcctggtcgaacagaacgaaaagcaagttgagtcttccaatgttcagtgtgacggtgttatcagcaatacacctgaaatgttggattttttccgaaaattttggacaaaatgcgatgaaacagtggatgacggacaaaaagaagcatttccaatcggcaaataatggcaataaa

SEQ ID NO: 76367 - DNA, 983 bp, Heterodera glycines
atggtggagcctcgccacaggagccctgccttggtgatcgcaggaactccccagccaggtaagtttaaagagcagcagcaagtccaaggaaaggaacgatggaaggatgagggggagatggggtggaaagtgggggaagagatggacagaaaaagagcgatgagaaggcactctttccacaggcacactcttttcttttccccaagagccgtgcactatttccttcccatgctcgtgtgtcctttggatgaaaacttcttcactcttttgctcgccgtctttttctctccctccaaaaggtagcaacagtcagacaaatgcacagctgggcaaaaaaaaggaagagataataggagaggagggaagacaaagaaatgggagatgtaaagagagtgtgtaaggaaaagaaaaagagaaattgagagatcgctaatttgtaagctgtgcctcgctgccatttaaacccatcacaaaagttgctcaaaattctcttctttcatatataaggaaaagctgttccgtttgttctgttcattccaaatggacatatactaaaattggaacaatacagagaagattagcatggcccctgcgcaaggatgacacgcaaattcgtgaagcgttccaaattttttgcctttttttatttcaatgccaaaatggaattcttttaattaatgtgtttttttatgacagagaagaatgaatccagaatagatttcaattataatcttttgattttttatataataattctccaaaaatgtccactattttggaatttttaccattaaaataatacgtcactatttttgccattattttggttttttagaaatttcataaaaaatgcaataaaaacaaaaaaatacacccgaagaattgaaaattgaattacggcaaaatttaaaaaactgatccctaatttcagaaatatgaatatttgatcgatttctatggcaaaaaaagaactataaaataaa

SEQ ID NO: 76368 - DNA, 1016 bp, Heterodera glycines
gacgccgtggcactgtgcgcactgctggaacttcgtcttccattgctggcacttcgacacatccgaaacaccaacatcgtggacatggatctcaaacaactggcacggcatctgcttctaagcgtatgttttggtgtaccaaatttctatttgatcattcaccattcgtttttaaggacgccgtggcactgtgcgcactgctggaacgtcgtcttccattgctggcacttcgacacatccgaaacaccaacatcgtggacatggatctcaaacaactggcacggcatctgcttctaagcgtatgtttgatgtaccaaatttctatttgatcattcaccattcgtttttaaggacgccgtggcactgtgcgcactgctggaacgtcgtcttccattgctggcacttcgacacatccgaaacaccaactcgtggacatggatctcaaacaaccggcacggcatctgcttctaagcgtatgtttgatgcaccaaatttctatttgatcattcaccattcgtttttaaggacgccgtggcactgtgcgcactgctggaacgtcgtcttccattgctggcacttcgacacatccgaaacaccaacatcgtggacatggatctcaaacaaccggcacggcatctgcttctaagcgtatgtttgatgtaccaaatttctatttgatcattcaccattcgtttttaaggacgccgtggcactgtgcgcactgctggaacgtcgtcttccattgctggcacttcgacacatccgaaacaccaacatcgtggacatggatctcaaacaactggcacggcatctgcttctaagcgtatgttttggtgtaccaaatttctatttgatcaccatgatttccgttttttaaggacgccgtggcaaaaaagcagaagggcaccgccaaaacccagatgagccaggcggcagccaaaacgcagatgagccaggccgtcaaatcgtcgatgatgagcaactccgcaaacatgcttatcgacaaatacctttaa

SEQ ID NO: 76369 - DNA, 1351 bp, Heterodera glycines
atgacgatggatgaagaagaggaagcagcggcagacgcagattttgttgaagataagaataagcaactcatattagctaaatttataatggtaagacgaatgggttttttaaaattaaattcagataagggtaaatgtagaaaagcatttgaacgcattatcatggataaacgaatgaaaaaataataatgaaaatagcggtggagcaaccacttttatactatttttttttttgaatttttttttcttcgttttcattttgtaattttttgcctatttttcaattccattttttgtgactataaaaatgtttaatttttccatttccctctcattattaaattatttccaataagatttttattcattcatttcccaaattcattttcattggtactttgtgtctcttctgttggtcggctgtggcaccattctttggttcttttgggacaacgtcaaaaaacgacgacgccccaacaaaaaagaaatgtaaaaaacaaaaattaaattaataaatcttcttttttttcagcttcatctctgccgactgttggctcgaagtgttcgctttacttccgccttctcagcttggcctcggaatcgctctgatcagtcgccgattttaccgccgcgtggacaaacatttcaaagaacgcaaatggatattggacaccgaattgcgaattcaagagaaagagctttggtttggcaggaagcaaatggaaattgtcaatgccaattgaagcgtttgccaatcccacaaaatccgttgcccaacaaagtcatcggatttaaacacattacgttcatgtaaaattgacaagtttcccattggtttgagataactttttcttgttttagttacttcgaccacaatattctcaaatttgtccgccgttttcaccgctttttcactttaattacaacatctttaggcattatgagtgaaaatgttcgcatttttgagttcttcctgtccaccatttggccaatttttggtgactccattcaattaatgtggttgaccacttctggtttccgtcgaatgcgccaattagtcccgtccattctcaacgactgtccatcccttcgtttcgtcaccttcaataatttccgcccgatggcagtgccaatgcgacggatggtcaagtggtggttaaatgtttgttcacgcctcgttcgctaaatttgctgaatttccggaaaaaaccgaaaaaccaaaatacttgatttttaaatttttgataaattttctagatttttttcctaaaattagaagaaaaaaaaatttgcggcgacgtttcggcggcgggcgacgttttggggtgtacccgggacggacggtgccgaa

SEQ ID NO: 76370 - DNA, 1506 bp, Heterodera glycines
atgcccttcgggaagacaaagtgataaattgaaatagaaatggaaaatgaccggaaaaaaatttgaaatcagtcaatccaaaaaaaaaaaagtgaaaattcaaatgtgaaattaaaaacttaaaaaaaaaacggaatacaaaatacagtaaaaatacagtaggtccttcgggaagccaaagagatgattgaaaattacatacaaaaaaataaaaataaagaaaattataaaaattataaaaattaatttaaatcatatacagtatacaaaagggactacagtactcaaaaaaaaagggggaattttgccggacatgttgatgagcaaagtacgctcacagcttgcgttatcgttttggcccatctgctgagaacattgctcacttaacgttagcactgcgctctctctctttcttcccccccccccggcgctgctctcttttgtcaatcggaagatctgttgcaattcgtagcgtcttttcacattcatcccttcttcgttgctcttccttcttccccccccccccccggcgatgaagggcggaggatggcgtcgcttggccattcatttatgagacgccaataaatatgcggatttgcagcgcatttttcattcttcactaaacaccatccttcattttgtgtcattcatttacgtcccatttgttaggaatatttactaatattttcaatgtatattaatttgtttttttcattttaggcattcaaattttcaacttctaacaccaattaactcttcacttcaaatcgttgaatattggactcggcatcggcacacttctgacacaactcaacaaggacaattggcaaggacattgcgcttcggcatctctctgtgagtttacagtaataggtactgtactaattaagaggggaggatttctcaagcctttgggacccttattggactaaaaaatggtgagacttcttacaattcgtaagtcttattaatcctggtaaccctaaaatttggccaaacaaaaggtgccttttacttaatagtctctggtgataattcgactctcaaattgtaaattagtggggtccaaaaggggcataataaatcatttatattgtgctttgtgaattataggggttttaactacggtaaaccgtatgtcaagtaaatgacatttattgatatttcgaatactgtttcgggttctaccttttctggactctgctggactgtgaactgtggactgaattagcgtttgcttggacagtttggacggacaattacgcattgcttcggcatttttctgtaagtccaacagtactgagcatattgtaagttatgaattaatttttcaaatgtaagctaattaaatttattgatcgcgttaattaattaattattacagattcctaaaaccacagtaatcaaaattgggttaatcttttcaaatgtacagtaatttccctatgcttttggttttctttggtcaaatttgagtattattggttcaaaaacgatgagttagca

SEQ ID NO: 76371 - DNA, 1224 bp, Heterodera glycines
atggactcacttcgcttcgcttctcttaatgactacgaaaaatgggctttctccgaagccatttatttggcagcagagacacaaaggtacggaagacggaaaatctgtccaaaaatgattcttttttaagatgggaaatggcacttaagctgagggaattgggcgtcgggtggccaaatgtcggcttttggatggatgcgatggaatgggccatggacagcgatgatcagcggaagttgacgcagctggtggacgagttcgggacgacattcgcaagcgaattgacaaaaaatggggagaaaggcagaatggggcgggggaacagaaacgacggaatggcacggatgggacaattggtgagaaaatgggggggggtcgaaaaggcgatcgggtcaagtaacttctttaaattagcaaaatggtgttccttttttacttcatcttctttttttctgttctctctcctctttctctctctctttctttctctctctgttccccctctattctctctctctctctctctctcccctctattctctctctctctctctcccctctattccccctctctctctagcttttccgtcttctctcctccgcgtcactctcttccgtccgttttggtgccgcgcgtgctctctcttcgctttttgcgcaactccaacggcattcgttggtccattttgagagggaactcaacgcctttttcggctcctccacggctcctccgccgtccttttctccgattttgccaattgacccgaaatttgtcgactcgcccgatctgtccgatattcgctttcgcttcagcgatggccaaattgtttatggccatcgcattgttttggtcaatgcttcggaggaatttcgccggattttgaagttacaattgaaagaatgacttttagtcgtgcacaaaaatgcgctttttatcagcagaaaacccaacggactgttggaaatgagcgaatgcgacgcgaccattttccgagtactgctcgaatttgtttatggtaacatagccaagtgcatgagcgaactgctcaaattggacattgacaagcgaatggaaatggtcaaagcagccaaacactttgggatgcggagattggacgaaagtgcgcagaaagtcactggagaggcgatcactgtggaacactttgccaaagtgtacacttttgcgcgggttatttcaacttaaatataattatttaaattaaa

SEQ ID NO: 76372 - DNA, 712 bp, Heterodera glycines
atgtttttctcttcgcatctcaccgccctcgcccctttcggctgtccaatcgctgcgcccactaattccgtttcttccattgctattgcccaattcagcggagtccatccaaaaaaatcagggaatattttcgagtcgatcggaacggccgatgatgttagttgatgcgaatggcattcagtgcccaaaagaatggcttttgtagcggcacaaaaggggagactccacgaatgatcatcagcgaaaagttgggaagcagtgggaggagggcaatcgaagtgggggagaagcaaacgagcagcccaaaaagggaggggagaagggcattaaaagtggcaaaggaaaagccaaagaaaaagccaaatggaaaagccaaagaaaaagccaaaaggaaaagccaaaggaaaggccaaaaggaaaagccaaaaggaagccaaaggaaaggccaaaggaaaagccaaaggaaaagccaaaaggaaaagccaaaaggaaaagccaaaggaaaagccaaaaggaaaagccaaaggaaaggccaaaaggaaaagcattggaaaaagggcaaaggatgataattaatcggaaaagggcgagtcagaagaccaccccacctgaacgatgtcccagggccgaattgttctcgcgcgtctctgaagtgcgtacaatacgccctttctcagccactgttccaatggcggtgccgtttttgtactga

SEQ ID NO: 76373 - DNA, 402 bp, Heterodera glycines
atgtggcaaagaattggccaaggagttgagcaattcagagacagaaacggactcggaggagaagggagcgcaatggtgcagaaagtgggaaaggagaaagtcgaaaatggcggcgaggaacagagagacctgccgatgagaggggaaagaatggcaccgaaagaatggcacggggagaagagaccttctcgtcaacaatggcaccaattcgagagtcggtcatccaccggagaaagagtccgccgtttaaatgcttcaattggcttcgatcactcagcgattgccaccgctttgactgatcagcgactgttcggacgaaatgttcggaggttttctgagcatgacgaatcgcatgccaagcaagagaagtgggcaaaaacagctgaatttggtggagagtga

SEQ ID NO: 76374 - DNA, 485 bp, Heterodera glycines
atgcttaagcaaaatgtaattgatgccaaacagaaaaacgaagaatttgatggaagttccaaaaaggagaaaggaagagcaaaaggcgaacaaagcgatcagagttttacacggaaaatggagcgatctatgcgaaattggttttaaaataattaaataaaaaatgaattatttcagtccaggggtagagcacgaacgtgatctgcaacatttttttgcgcagttcgcaacctttgggtttttagcataatttttaaaaatgaaaatttatcgacgcgattgtttcaaatagggttaagccccaaccccgagcccccccccccacccgagacctttttgggacctattccccgacccgacccccgacatgtcgccccccgaggtccccgacccccgactcgtcgctaccccaaatttaaaaaattcaaaaaattaaaaaaaaatcaaattttaatttatttcaggtgaaaatattaaataataaa

SEQ ID NO: 76375 - DNA, 107 bp, Heterodera glycines
cattgcttcttcattcaattagtgcctctaattggctcatcaattgctgtcactttgcaacttggcattggaattgatcgtctgtttggcgttatgttaccactatg

SEQ ID NO: 76376 - DNA, 2503 bp, Heterodera glycines
atggtttctgatccaaaaagagtgcttctaatggcgaaatacgtcacaattttctccagaagaaatcctacaaagagaattaggattttggtcttctttgacccaggttcgcaagtacccatgatcaaaagtgctgtagtgcgagccgtaagcttatataaattgaaagatggccagctagaagttagcggtttccacagcgattcacttttaattttccgaataaagacctggtatggaaggaagggcagcccatttctatgagtaaatttggtgaaattttttgccacttttttagtaagctttcttttttcaatgccacgagtggacccaccaggggaaattcgtggttagacttagttttgccggcaaatgatcaaattgtaaagcaatgtactattgaaggtggtgttttttcatcggatcatttagcgcaaattttcacattgactattccaaaaacactacaaaaaacaaacttcttttacaatcgacggttttttccgtcgaatgtttctctttttaatattatggtttcttctagaattagcgctttatctaacgagcattttagtatgaacgaaaaatacaacgcctttaataatacattgctagaaaccttaaacgagtgtattccaatgaaaaaaattaccaaaaaagatttgacccctaaatatccaacgcatttattggcctccatcaaagagaaagccagactgtataggcaatgtaaaactgacccaacaaaaaaagcactttatgatagcattagtttacatataaaaatacaaacaaataaatttcactcgcaaattgagaaaaaggctatttcaaagggaagaaattccatttttaaatacctacaaaaatacgatgttaatccctttgaaataccgaatttagtctttgaaaacaaatgctatcatgatggtgatgaaaaatgtgaattattagccaacttatttgcaaattcgtttaacaattctgatgttgacccaggctacctaaacttgggcaatacttttgttaatcaatgttttatatcagatatagactttaacatcatcgagacacaaaaacttttgaaaaaacttccgaataaaaacgggacctccccggataatattagctataaaatattgaaaaactgccattcttcattagcaactgttattactgacctattcaggatttcattagactctggttctcttccagatatctggaaggaatcaatagtttttcctcttttcaaaaaaggggacaaatttaatcctgaaaattataggcctatttctataacctgctcactttgcagggttatggaaagaattcttagccaaaatatttacaactttctcctaaaaaacaataaaatttcggaataccaatttggttttgttagaaataggtctacgacaagtcaactaataacagttgtggaagattggtacgaggcaattataaatggaaaaaatgttgactgtatttatattgattttcaaaaagcatttgactcagtgccccataatttacttttatacaaattggaaaaaattggtataaagggcaaacttttaatgtggataaagggctttttgagtaataggacttttcgagttaaaattggggattctttatcctcaagtaaaaaagttacctctggcgtcccccagggctctgtcctgggccctttattatttttgatttatattaacgatcttcctgatgctttgccatcaggagtgaaaataaaattatatgctgatgatgataaattatatatttgttataaagcaagaaccgacacagagattatgcataaagcattgcataatttattcgaatgggcaaataaatggcaaataaaagtttcaatgcaaaaaacttttgtattatatttgggttcaaaaaccccaaaagaaacatataaatttgatggaaatacaataaatgctgtggatacaattagggatttaggagtaaacattgataacaaattacaattttccgatcatattaaccaaataacaaggaatgcgtatttacgtatgcgttccttgtttagaataattaaatccaaatcgtctaagatttggattacgttatataaaacttatattaggcctttattggaatacgctccagaggtttggaatccgtctcttcaaaaaaatattaaaaaaatcgaaaagtgtcaaaaatatttcaccaaaaaagtattttttaaatgtagccttccgccaattccataccaaaatcgattagaatacctgcaactgccaacacttgagaaaaggcgaaagctgtttgatctgttcatggcgcataaaattgtttatggccgaacagatctgaaactattttctatttttaatccatcagcacgctttaacatccccttttatagatttaacacaaaatacaaactgggcaaaaaattcattccctttgctgggagggtaacaaaattgtggaatcaactagataaagaactaataaa

SEQ ID NO: 76377 - DNA, 376 bp, Heterodera glycines
atgaaagcgtctcaattccacttcatcgttgttgacatttgccatggcattaactcagaatcgccaggaaagtgtccccaggatgaattcacggaggagaaaacggtcaaggaattgagcaccaatttggccgagaatggtaaggcaacagaagaagtgccaaaagcattggccaaattggcaatgactacgataaaattgtcaggtaccattgtggtcaacatcttcacattggactcaaaatccgacattccgacagtaatttaaacactttttgcttttatccctttggtgttcagcagcatcaaatcgccaacagagcacatcggatgctccaactctaccagaaatacttcaaccattgcttctttgttaa

SEQ ID NO: 76378 - DNA, 1525 bp, Heterodera glycines
atgtttttggcgcacgcgagtgatcatttcgtgactggaccgcccgcgtgtgatcatttggtgactgtagcacctgtgagcggtctcattatatttgtggcgtacgcgtgtgatcatttggttactggaccgcccgctagtgatcatttgttaactggagcgctcgcgagcggtcacattatgtttgtgtcgcacgcatgtgatcatttggtgactggagtgctcgcgagcgctcaattatgttcagatcacacgcgtgtgatcatttgttgaatgggccacccgcgggcggtcacattatgtttttggcgcacgcgcgtgatcatttcgtgactgaaccgcccgcgtgtgatcatttggtgactgtagcacctgtgagcggtctcattatatttgtggcgtacgcgtgtgatcatttggttactggaccgcccgcgagtgatcatttgttaactggagcgctcgcgagcggtcacattatgtttgtggcgcacgcatgtgatcatttgacgactgtaacgcccgcgaacggttacattatgttcctgtcacacgcgtgtgatcattagttgaatgggccacccgcgggcggtcacttaatgtcggatttgccctttgtgatcatttttcagcaggaacgcacgcggtcggtcgcttaatgactgggccgcacgcgtgcgatcctttatcttttgtgcttaagccgcggcgaagcgcacggctccgtgcgcccggctacagacccctcttccgggtgatcttccatcagtcgtcgacgaccggcgacccggcggcggagcgtcgtaagcagcaacgccgctccagcagacgctgtcgacaacgtctgttgcggagacgtctgagcactgaacggcagccattctggcgactgttggagcacgagtggggcgaagacgagcgccaccgggcgctggaggaggatgactggcagctgtatggcgaccagttggcgaccacccgcgacgtgatcctggccgacggccgaccattggacgactggattggtcacgacgagaccgtcgacgaatggaccccgctggaccattcggagctaaaacaactgtccgacggggtgcaccggaaggcggacgtcggggccgaagcgtgtcccatctgcatggagccgttggtggaccaggtgctgttgtgcacgggctgctgcgctcagcgcttttgcagcgtttgtttgtggacgcacgcatgccagagtcgggcgtgcccactctgtcgtcgtcatatgctgacgggcgaatcgttgaccgtcgacgccagtggtgctgacgacagcaacgacgatgtcgacagtatcgatgacgaccacggcggagctgaagcgacagtcagccctcggcagcagcagcagcacattcgtccgccagggcgtcgccgtcgacatggaccagcgacggaggccggctgttctggctacggcacctggggttcgccgtcgtccaacagcacggagggctcatttgtggagctgtccgagtggcacgacgaatga

SEQ ID NO: 76379 - DNA, 608 bp, Heterodera glycines
atggggactgacaagtccattttcggaggaagaaaattggtcttgaagtttgaattggaagtgacgcagctcctcaccgtgaaggagtgggagcggcatgatcgacccagcgagcttgcccgtgctcagccgcgcgaccgtgtccaactcaaccgtctcaacgttgtcaccagcaaggccggggccacggtcgaaaacacgttcttgttttccactacgtacgggcagttttcaaccatgaacatcatcgcgcatgccggccacggtatagttttggatagcgtgtggggatgccattcattgtcactgttgcctaattaataatccaattacagagtggacgccaacggggagcgcgccattgccacagaatgttttggcaattgcaaattttgaaggtacaatgccaacaaattattgccattatgaaccaattaacagatgggactcgagttggcacttcgggcaccgccaccgtgaatctcgcgcaacagccacaactacaaccgagaaacgaagtcgatgaaaatgaggaagatgatgatttgttcgttttctctgatgaagtccgagaagtgcgaggcgatcagcagacctcggtgagctga

SEQ ID NO: 76380 - DNA, 1188 bp, Heterodera glycines
atggcacataagcaaccttctaattctaacaacgttcaagtcccttcttgggatgaattcaatttggtgcaagaggaagcaaattcaaatcggctttctgccaatggatttgaaaatgaccagcaggaaattggaccaatttacgaacctggacatgctgaagaatttggaccgaatttaccaccaggtttgttagaccgagtattttcctacattaactttaggatttgtccttggtgaattacaacaagaggattcggtttctgtcggaatgaattgtgatggcgcaaatgacgacttttctatcccaatcggtttttgcttttttattttaagttcttagttttttttagaagcttatgaccttgatgacccagaagaccccctccagggcggcgcagctgcacagaaaaaggcgaacaatttggaggttcacaatcatccattggtattgccgaaagttgtgcaccaaaaaagtggtcggtctgtcactttgcgaacagagtttagcatttcttaagacgaacaatgttcgctcccttctctgagcatttcttcggggcaattggccgattttgtgcccgtggaccaaaggccgtgcagcagttcgaccatttttcagtgcgacgatgaaaaaacttttgggccggcacttcctcccgaattcgtttctatagcgtcgcaacaatttgatggttggtgaataattaaaaagcaacgtttatcaatctattattttctaacacttttcattgtttgttttgttcagaatacgatattggaacgtcgcttccaccggatgagccgcagtgttcaatggacttggcaaagaaagtgccggaagggactaacattcatcgcaaaccaaaatcgattctcgaacggacgaacttcggcccgactttgccgagcagtagcgacgaggaagaggaagagaaaaaggaggacaaaacggaagacggaggaaacgaacattttgggaagggcgaagggactgatgagaggcgacacgacgtggggtgggaagagggggaggaagaaacggttgggccaatgccaccgatgcccgggaagacggaggaggagggacacgccgaatatctgggcagactgacagaatttgaattcaacaaacacactcaggtcatttgaggtcccaaaagaagggacaaaagcaattatgactaa

SEQ ID NO: 76381 - DNA, 2054 bp, Heterodera glycines
gttttcttcacatttggaccgtttcgaccgtaattggcgtgacgaccccttttggcgcgatttgtacccgcgttgggccgagcccatctttaaagatggcatcgacgtcaaagtaaacaaagtgccgattcattgactcactcctccattttcttctctctcagactaacatcaccaacgacagtaaccgtttcgcagtcgaaatggacacttaccaattccgcccggaggaacttcaggtgaaaacgatggacgacactttgctgattgagggacggcacgaagatgttcgagacagagacaattacaccaaaatggtatttattggaagggaaagtgacggcacaaagagagagagaagagagggttgagagagagagacgggaaagggatgatgagagagaaaaaaagagcactcttttcagtatttcgtccgcaaataccaattgccggccgatgtggagtcccactcgatcagcagtcacatcgacagttctgtgagtttgccgccccaccgcccaattagccattcccaaagggccgtctgagcgtcgaggcccaaaagcgttggcaggccgtggaaggcgaacgttccattccaattgagagcggctcgcgtcgtcagggcgggggctacgggtcgcgctcgagctcatactcgccgcgcgatcgctactacgccgactcaggccgagggtcggccaacgattattacagggctgagagccgtctgaacggagcggcgaacggcggcggtggttacctttcgccaaacccgcgatcggacggatatcgaacggaattcgagaaacgcgaggtcagccaatgtgccgggggaagggatttgactttggcaattgtagacggacgcgaacggaatgcgacacgaagcgagacgggaggaattccgcgaggaggtgggccaaatggaaaagcgacgccccccccccccgcccaaccctttcgtccgttcagttccgtcgcagcggatcggccgctaatgttcttccaccggcctcgcctatgctgcgcaccgagtcgcgtttgagcggcgcggtcggcgccaatgcgtcgtcaggcgaagaacgccgcgaatcgtcgcacttccgccgaacggcttcagccgcctcgcgcgagtatcggtcgggtggcgctttcgctggcggaggtttgttatgaagggcaattatcagccgttcaaacaaattgacagaaaatcttttgcggccggcggaggaattgggcgggcgaagttcggcatttggcactcgaaacgtgccaattcaccgtggataaagccaatgtgagggggaagcgcccgcatggacgacacataagacgaacgaacagacaaaagacgaaatcactcccccccactcactcatttgccttagagtgtcaaagggcagactgactgataaataagcccgatcactttttattgcttcaaattaaaaatgtacccattttccatgctaatttagcctcattatcagtaaggtgcttcttacaatacagtcgaaatagtggtaatatcaaaatgtgcctttgctattattgcccatggttttgcatacggcgcactgaaagcggaatttttccataaaaaatacattgaaaaaggagctccgcagggacggtcccaggattttggcttgggggggggcacctccccccgggcgacgaccttttttttttttttttgcttttcacacccgttttttatgtggcgggtttttgcaaaaaaattttggggtacagggggtccggtggtgccgataggcgccgccgggaaaatttttgcggttttaaatgcggtttgttaacagattttgtccaaaaaatgaccaaattttgtgattttgagctatttttagcagattttcattaaaaatttgtggattttttgaaaaatttagcgacatttcttggaaaatttgggcgaggccaggtctgtggggtggggggtaccagcccagcaaggaaaacctaaaattttcagccaaaatattatttttccttaaaaatttttggacccggggggctcttggggc

SEQ ID NO: 76382 - DNA, 216 bp, Heterodera glycines
atgctgacgaatttcattgtatttcatgcaatgtggacatctcactcggagcagcaggaaaaaacgcaattattcgacacatatcaacggaaaaagcacaaaaataacgcaaaggcggcaaatatcagccagggcatcgcagagtttgctagcagttcaacaacaccaacaaattcaacaaaaaatgaattacttttataaaaataagataataaa

SEQ ID NO: 76383 - DNA, 163 bp, Heterodera glycines; identical to SEQ ID NO: 55995

SEQ ID NO: 76384 - DNA, 1277 bp, Heterodera glycines
atggcttcggatgtgagcagagttgccccaaggcattttggggcgtcggctgttcagaaaagtgcctttgtgatgcgaatggtggcttttgtaaccccaacgatggcacatgcggtaggtaaaactgccgattcgattgcctaaaattccgtgtctgacagagtgtgcgctcggattcaccggcaaaaattgtgaccaaagtgaataaatttttaatacacaaattgcataaacaatgtattttttactaataatgtcaattttaaatttcccacttaataatgcgtcgttttgttttctttttcagaatgtcctttgggcacttggggtttcaattgttcccaaaattgtcgcctttgtttgaacggtagtttgaatttccaaattttgctattctttcattttcggtacctttttttcagtgacggccaatgcaaatgtccgcctggctttgaaggcgatttgtgccagcgtcgctgttcggaatggacgtggggcgtttcgtgcatgaacaattgcacgtgcagcagcggccgaaagatttgcgacgcgtcgacgggactttgtgaatgcgcgtcgggtaaaaaagcaaaattttatcatttgggggggggggggggagggagccgagccagttttttacgaaccgatttataaacgtagtttgggttcaatttaggactgaaaggcgacaaatgcgacgagtattgcgatgacggattttgggggcctgactgtgtgaagaaatgctcttgtcgagaagggacttctgcttgccaatcagtcacagggcaatggtaaggacagaaggcagtgaatgctttacaatttgagcaatttcagtgtttgcaacaccggatatttggggaaacgctgcgagagaagtattttcaattttcaatgctttcgagtacaaagcgaaacgcgccttttgttcagcatgtcctgctgggacctttggcaaggagtgcaaacaaacatgttcaaagtgttccgagggtcaaatctgtgacccggcggtcggctgctgctctctcaactcgggactttgcggcattgcctgtacattttgatttattattccatttggcaaatgactgttcaaataacactttttcagatgctgaacagcaaggcgtccaacgctcctccgtctccgcttatcttttgccgggccttttgcttttactggttacttccgtcactttgatcgcttttgcgctttattatcgccacaaataccaaagggcgcgcgaccctccgcttccgactgttag

SEQ ID NO: 76385 - DNA, 606 bp, Heterodera glycines
caacttcggaacaattctgaaaagtgcaaaatgattaaaggattttttttccgacaaaattattgggatgccaatgtttgtcataagaatctcgaaatcattgacgacaaaagttggactgtccatcacaagggaaaggattatggtattttcgaacaatttgttattaatcattttttttcctcaaaagattggtcttccgtctttgcaaaacatccgattttgctggataataattcgtccaacattttttactatgaaatttcggtaaaaaataaaaaagggtaagaaactttatttttgagaccaaattatcagaaaattaaattattattataattattaatacttaatcctttattattaatttttcagttgggtcttcttcggattcgccttcaaacagcatataaaattggattggataattgaaaatattggcacttatgcatatgaaaatgatggcgaaattttgattaataaacaaagaaagggaataaatgccgaacattctaacggtgttggtgataccgtaggaattggcgtcaattcgccactcgcagatcatttcacaaaaaatgatcttcgtttgggttggtaaataaa

SEQ ID NO: 76386 - DNA, 1305 bp, Heterodera glycines
atgatgcctatgtttttctttttcgtcttcatttttaattgtttctttaacaacaatggcacttttggtggggtttgcgtttcaaaatacgacccaatgataagtgagcaaatgccatcgaaaaaatatcagtcgaccaattccatgccaagaatggataacaattctcacatcaacattaatggtatttgtatattttaaaattaaatccaattattgcaaaggcttaaaatagcaaatttggaattcacgagattctcgaaatagaaatgagtgagctttggccatgatgtgtttgaccattaaacccggaatattgaaaatttagtttttaattattcaaaattcaatataattcaaatggcaaattttaaaaataattttcaaattaaaattatttaattttcttatttgaaataaaaattcagtttcattttcagatgcagttaattacgctaaaaaaaccaacacaccgggatatcaatcaccatattatacaccgacgcgaagccctattaaggttttctctcttaaaatatttgaataaataaataaataaataatttttgttaaaaaaatatttttagaatggttttccattcaatcacagagaagatttgggacaggtaaaagctaaaattacataataaaaaataatagaagatttttaattaagcagctgacaaatgattcgcttttttgaagttttaaaataaaaataaatgttttagttttttgattttatgaataattacaaaaatattttctaattgataagtgattttacatcgaacacccaaacaccaaaaatttctgaaaatgctcgtgaaaaacttttaaatattgtatttaattattcaaaatacaaatttaattttagcgtgactcattcacaccaaatgacaaagaaaaagtaaaagaggtaatttaaaaaaaatcataaaatatttctgcttcgttgggtcgtttaaacttgaatatttatttgctattatatgtacaataatcggtctacgtcagttgggcgccagcatgtttttggactataacttttttctttatcaaccaaatccaacattattggtatcattcgaaagcccttcagatgctctattagtctgcaaatttccaaaaaatttcgtcaattttgaacaaatttatggccataaaagttggaaaatctggttttttgagttgttctggccataatttttttgaaacttaacgaaatttttcaaaattttgcaggctaatagaagacacttagggctttcgaatgttaccaacaatgttgaatttggttga

SEQ ID NO: 76387 - DNA, 630 bp, Heterodera glycines
atgagcttaagccattcgggcaagtttaacagtgaacagccagaagagtcgagacaagaatcagaagaggaagaagaagaaacatcttcatctttggacgccaaaaaggtgagcaaaatttgccaaaaaataagcccaaattaagccatttgaaaaataatattcgaatttttcgaaataaaattattaaaaagggaaagttcgaaattgaaaaaatcaaggttttgaatttcaatcatgctgatcaaaatggacagtataaagagaagaacactgtgctggacagaacgaaagaagtgacaaatttacactacaaattacaaattcaatttattcgatataatgaaaaggtgtcatggcaactcgtaaactgttatacaacgataactcttacaattgcttaggtaggcctaggctttaagcttaggcttaagctttaggctaggcataggcttgcttgggcttagacttaggctttattttgtaaaatacgagttgccttttgtacgagtttattgttataaattaatattttttttatcattttaggattgcttaaccctcgactccccagctgtttttgagaagatatttgttgatgaaagaatgacggatgttagaaagaaatga

SEQ ID NO: 76388 - DNA, 601 bp, Heterodera glycines
atggaaaaaaaggcactaaataagagaaaaatgcctgcaggtgagacaaatatttaaatgcccccggggatgaaaaatgaaaataaaaggcactaaataagagagaaatgtctaattgttgcctgcagatgtactaattgccgatggcagcacaaaataaaacgcaaaaagtgccaataattcctgcgaaaaatgcctgcagatgagacaaataaaaaggcaaaaattatgcttcggcagtttatatccctccggaggtgacaaaatacaaaaaaaaaaggaagaaaagaacaacaacaaaaagaaaagaaattgggcataataaataaagagcaaacaaaattagaggaaaacaattcataaaagcccacagaataaaaattggcttaacaaatcctaagcgccaacagagaaagaaaattgagtttaagaatcataagcgccctgaaatctcattaaaaaggaaaaactaatatttttagcagaggacaatgcctgcagatttagcaaagtcaaaaatagtagaacaaaagcaaaacggaaaaaggagagggatttggcttcggccgtaaatgagttaaaataatttgggactagcaaa

SEQ ID NO: 76389 - DNA, 438 bp, Heterodera glycines
aaaatggtctaagtaaaaatcgtaattacgctcaaaaagcttcttaaacaattttagcgcttccaattccttctacaatcgcctttatacatcacattatgagcgctaaaattatcagagtgccgaaaatcgcatgtgatctaagcctagaaaaaaatggtctaagtaaaaatcgtaattacgctcaaaaagcttctcaaacaattttagcgcttccaattccttctacaatcgcctttatacatcccattatgagcgctaaaattatcagagtgccgaaaatcgcatgtgatctaagcctagaaaaaatggtctaagtaaaaatcgtaattacgctcaaaaagcttctcaaacaattttagcgcttccaattccttctacaatcgcctttatacatcccattatgagcgctaaaattatcagagtgccgaaaatcgc

SEQ ID NO: 76390 - DNA, 230 bp, Heterodera glycines
taattacgatttttacttagaccattttttctaggcttagatcacatgcgattttcggcactctgataattttagcgctcataatgggatgtataaaggcgattgtagaaggaattggaagcgctaaaattgtttgagaagctttttgagcgtaattacgatttttacttagaccattttttctaggcttagatcacatgcgattttcggcactctgataattttagcgc

SEQ ID NO: 76391 - DNA, 1017 bp, Heterodera glycines
atggagtacacagaccttgcggtctgtgataaaaggcttatggaaggcaaacatatgactgcgcaggcaaaaatcagtgacctttctcgggtccatgatgatgttattggtttagaagaagggatcaatcgaaacctgagggctataaataggaaagtgactcaagtagtgggccgagttagtgacatcgaagccgatgtgaatacaggttttggtacaacagcggcaagggttgacacacttggggaagtagtcatgggattggaaagcaaatttgacacatggaaaaatgagcttgagttgagagaaaatatggaattcgatgaattaaatcgaagcagtggggttcagaaaatcttaagcttaggcaagcagttgacttcgccaaggcctatctttccgccaaccccacccccaactcaaaatgcaattaatagctttggcatctttcaaagtacctctaatgtacaaaattcgaataataccgcaggcgatcctgcaaatggctccatgactaatcagtcgagactcatttcaataaatgagtcaggggaagaagatgatgtagatggtaacctgaatgccctaactgacatgaatacgtccagtacacagcctggagtgttctgtggtgaactcgcttcggcatttgatgactgggaaattaagtttagggattatgtggatgtttttggttcggcttggagtgaagcagataagttgaaccgacttaaattgcacttaggtgcgcaagcaagaactatttttgagaatttatcgcctaatgagaaaaataatttggcaaatgcactcaaaaacattagatctaagctggatagccctcactttagagaattggcttataagaaattagctgcatgttaccaaagagagggagaatcagttagtgagtttgtgaagcgcttggttcctttagtgcacacgacttcggtccatattccgtctaaggcgagaagaggtcctctgtcggtgtctcatggagaaagtgagacctga

SEQ ID NO: 76392 - DNA, 3014 bp, Heterodera glycines
atgggtaaaatttggctttctgatgatggacagcttggtcttaccttcgggaactcatcaaagttaatggattgtggacagaatattactatctctgaccaggggtttggatcaactattgtgcaggcacctgagtctcatagtagaattgttcggagtgtgaagaaatccaaaacattaagtgatggaatagtcacctcatctcaattagcctcacaacttacttatttggatgcggcaatcacacaaacaatgacatttgcctttcatcactcatttcaatcattttgtcaatttattgaagacaataaacgctgggctgagtcagcattcttctcaaatccaactgatctcgctcggtctgtcttctctaatccgtatgtggtagctaaaagagcagcgagaactcttttgaaagtttggccatgcgttcctcttgatgagaatgaatacgaatttaggccaacaaaattgaaagatgaatgttttgaatatcttccaattataattaaggctgaaagtcgggaccatttggcttttgttgatcctacgacaatgatcataagtccttattccaaaaagggttcgtgtgaagaattccgaagaattgtgattcaaatcaaaaatcaaattcttgagattgaccaaattgaaggcaaaatcacttcggcgactctaagtaaaataaaagcgaatgcgccaaaattgagcatcactgaatttgttccacaaattgagtcacatgcttttcatcaattggtgcttcttaatctgactgacattaagagtcatgcatttgtcagcaatatggttagaacaagtcagatgacttatcaaataagagaaaaggacacccaaattacggcaactgtgtcgcaagagtgggaagaagttgagaatcaaatgattaaagctgttgttggtgactataggaaaaattggatgatcatcatttctgtgatcgttctgattttggctgctgatttcactattagatttggacttagcctagctgagatttatgctggaaatggtcgcctaggcaatatgttatttggcccagccattcaaaaagcgggaaaaagggtcatagaaatgcaaagcattcgtcgtttaaattctgaaagggatgaattatatgaagagccaaataatgcagcttcatggccgccacgtattaggagaacgggtaatttgttatctcagtccttgaaaaggctaaataagcacaatcccagtagaagggcaactgcaaaaccagaaaatatttttgaatgttcggcaattatgggtcaaattggggcattaatgcagcgtccaacgactgtgaccacacaggtcgcactcaatggaattcgaatgaagtgtctaactgacactgggtcaagcacttcggtggctccaaaagcactagctgaatggttaggcacaaaaacctacaaagcggaagcacgtctcatgagtgcctcgggtcacgcggttcacgttaaagaagcaactagagtaaatctgagaattgggaatgaatcggttaatatagtcattcatcttttcgaaaatgatctatcatggacaatgaaggactatgactttattttgggttgtgatgcattggcactcctgccacccatcacaattgacatcaaaaatgcaagcatgtacattaatgatgtatgcatgcctattggtaagtcagccaacaataccttgtacggactaaaagtttgtgcttcacaaacagttgagcttagtccgaatgaacaacgagtgcttaaagctgaagttagagcaccgcgtacgcttcggcatgatataatttttgagaatttggatcagagattaggtgatcaaggaattggtctaattccttctatttctaagcttaattcgggtcaaatccaaacggttttaaccaatccaacagcaacggtaaaacgaattttcaaaggaacatgcctaggcagagcaaatgagatattagcaactgaacatgattcaatttataaggaagctaatcatgatgaaacttatcaaaaattaaattccctcgggaagtctgaagtggaaattgatccaaaattcaaaataaactttgaaaaatcgtctgtaaaaggagcaaatttagacacgcttaaagcattatgtgaagaatttggggatattttcagtaaaagtcaatatgacttaggaaattgtgtggctggtgaacatgactgtcggaactctgggattccgactgccgatcaattgatcagcagaattgaagaaaggaagtggcgacccttccccctccctttcacatgccccgcgcaccccgttccactcctctgcccccatttccctccaaattgttattgtttttctgcgttccttccatgccccgcgcacaattaatgaccaatttgtcaaaaccgcaacttttctgccgccgtccccaacttggcgaatcgactccaaagaacgatgaacccccaaattcctgttttccgtcaattttgtcccctcgctcattttgtggccccgttttttatcatttccccaatttttggcccgtccccgttctgctcaatttcaccattttttgttcaattttgctcgtatttaatgcgacaaatccccaccaattcccacaatcagaagcaccagcaaaggcaagcaatgcctcttccgtccctctctcagtccccctcatttcattgtccttttcccccggcccaattgtccgttccatttctgtcattcacccggtccccctcattcaatgatcagtgattggcccttcacttctatcccatttcgctgtgatttgccccaattgtgataatttccagacccccggttttggtctttgttctgtggccccggtgcccttcaattctttcccatcccggtccccaaatcatttgtgattaatcccccggtgatggcttttttcctgtgatcaatttgtgataattttgttcaccatttcaaatatttggtttaattacccaagtttgaggctttttcccgga

SEQ ID NO: 76393 - DNA, 1331 bp, Heterodera glycines
atgtgtaatgccatccaaagcaaggaaaccagagcgttgctaatgacgacaaaagcaacgatcttcaatccgtcacggccatccctcagcatgatgggaaccatcttcattgacccgggaagccaccgatcattcatctcgagcagtgcagctgaacaattggatctgaacgtcctcagcacggaagaatgctacttgtccagcttcggtgaacgagaaccgaagcgatacataagcgaccgcgtcgcaatcggcattttatgccccgaccaggacaggttcattttcaacctgaacgctttgaagttcctgctgaatgatttgccggtactacaactaaacgcattggataatgacgaacttcaacaaaagaagctttccctgccgaatgagtcacggcaaccggacattctcctcggaatggacgtttggcaccagctgaatgttcaaccaattgaacaactgccaagcggatttacgatttgccaatcgaaaatcggcaatatcatcagtggaacagggcgaatcgagctcaagcaaccgtccaacatctctttcgtcctaatggtcaacaacgatgaatcgccacaaagcagtaaagcggctcagaggcagaaaaacattcaacaaaaagaaaaggacgaactgagacggcatcaacgcaacaaactcttgtccagcattgcaacattgcgatcaagacggaagagagaatcggctcccatcagctcaaaatcaatcgtgattgatctttcatcagacagcgacgcatccggcattgagatcatacaaaatccagtcagggatagacaagccaaatcaccaaatgagcattcaacggcaccaattcctatggcagtgcaacggctaacaccaacaaggaagagttcatcagttgccaagcgaccagcattttcttccagcaaacaaccaaaaggaaaagcagcgaatcccgcacaaacaagccaaacaaataaactcaacagaaaaatgaaagccttgtcgccaaccgcaagtggatcaggcgccaaccatcattgcgtcgctacattggccagaagctcggactcaacaacagtaattgataagggcagtcaacagaattgcccaaacatgagctcggcaacaatcagtaagacaccatgccaacagcactcgtccgagaagacgttaaactaagctaatcaccaacaattgtccgcaatgacgttaaactagcctaagccatcaacaactgtccgaaacgctaatcacccggctgccacgagtccggaatgacgttaaactagcaaagcatcggccaacccacacaacaatcgtccgcaataaca

SEQ ID NO: 76394 - DNA, 597 bp, Heterodera glycines
atgacgtcaaacaagcaacgacaattggtccataaggacgttaaactacgtcaccaattcaagcaaaagcactcgagcatgcagctgacagcacgtttccggaagcaaattcacatgtcctcaacgattgaggaggttcagcagcgaatgaaccacaacagaccgcaaccgcggaggtcacaacagaggggactaaggccaactcaagcgcctaaaatatgccaatccgggatggcacagtacaagcagggtcgagggatccgccttcacactgcgtcttctgcaatggcactcactggaccacgacgacgactcagcgaacaacccttgcaacaagagcaaggacacgaatccagtacgtcaccagggcgagaacgcagaccacgaaagagccaactacacgccccagatcgcgtaagcacgatttggaaactcaagagcacggaaaattcacctttttgccgtcccccgccatcactcactgctcaatggctcaacctggcaattgagctcttcgcaaaaaatcatcaagcccgagcagatcacctttgcatggcattgctctgtaaaacgcaccacgaagcgttattacactaa

SEQ ID NO: 76395 - DNA, 957 bp, Heterodera glycines
atggccattcaccaggaatgcccattcgccaagtctgaaatgacgaatcacgaagcacaattgtggtcaacgaatgacgaattggaagtcaacttccctggaccaatcaccggacttttcaaaggcgaacaaatcagcacggcgacaaactgctttgctcaaccagcaacacttttcaactgtcaatatgcaaccgaattctgccaactgcccgacaactcaactctgatttggaaatcaacctgcaatggcaacgaatgccaaacatgcgactacgagaaggcggaagccatcaacggaaaattcactgcggcctacggagaatcaatggccacttggatctccgaagatcacaaaaaggcattaactttcgccaaaaatgcgccagaactcatcgcctgcgatggcacacgcatcgtcatgtccgaacagaacttcggaattgccaggagcaatacgacgacattgtcagcaccacgacaagatggaaataggcatccgaccagaacagctcgcatcacagctctcggcatcccaagtggcaacaagcgttgcgttgaatcagctctacacgcgggagtgtcagcgaaacacgagagcagccaacccaactctccaagccagacgcttactacgacagccaaacgtccaggcgcgctggatcggagaaatgacaatggaagtgtttccatgcgtcaacgtttcgctccaggacatctcctaccgaccaatgaacgattgccgtgtctacatcccagtgacagtgcatttccccgaccgagcgatagcagcatttctggatcccgaattgcgcatcatttctttgacggcgcaattggcaagctgcaacaatcaccgtttccatcatcttcaactgcgaagcaatccgaacatttggctactgatcgactcacgaaccgggattgcgcgtcaaatgccaaaggactacacgcatga

SEQ ID NO: 76396 - DNA, 2033 bp, Heterodera glycines
ctttcattttacaattttttaaaatatattttttcagattttcattttccacgcgtgatttggtcactttgtccgaactgcttgcaaagttttacttcaccgttggcattccattgccaatggctttgttccatgcaattgaggcaaatgtgtttgatgcggtgggtgtgctgccatcgcggctgtcatttgaccgacgtgccgtgattgatgcttgcattaaacaggtatacatgaagtccaacggtgtatggattttacactaaattcctttttgtcggcgaatttctttcggttttaaattgcaaaaaattaaattgaattccaaacactcacaaaaaaatattttgcttttttctgtgcaattaaaaattccagtttcattcattgatctccgagttggcattggacacagatgatggtcaagtaccgttcaacattgacattggcagtgagcagcaacttgaaatggacgcacacgcacttcgcattggccctttcagcattgaaagtaaaaatagtgggtagttagttatttggttttgtttttaactgctactattgtattgtaccaagaaactgatatttaccaagattttacgggagagggggggggggggggaaggtgccaatttttgaacatgtaataatcgattaaaagatattaatttaaaaaaaatcagattttgttgatgtccatcgactccccgtcggcttttctctgaacgcgcccgccactcgtcgtaatgcgttgcgtgtggcgcgtgcgcttgcctcaaccaaaccggtcatgttggaaggcagccccggggcgggcaagtcaagtctgattgttgcgctggctgccgccactgggcacaagttggttcggctgaatttgtcggaacaaacggtacgattttttttaattcaaattcttttttctaccttatgctcaaagtcaaaatttctaaaaaaaaatttttttggtatttctatcgtttaaatttttaaaatatcattgaaagatcttttttaattactgttatgatttattgtatttacctattttcattgatcaggatttgcatgatttgtttggcggtgatatgccggtgacgggtccggatggttcagcatcgttcacttggcgtgatggtccagtgcttaaggcgatcaaggaaggctgtgggatactgcttgatgaggttggggaggggaaatgtttcacttcactcttccctctgaaatttttttggaaaagaaatttttcaaaatatttcgttaggaaaaagttttataagaaatttcaagaaattaattttgaaaaaattttacgtgattttttggaaaaagttcgtaattcatcacaaaaaaaaatggaaaaacgctagaaaaatctttcaaaaacttttttttagaaatttttattttttccctcttgtttaagatgaatttggcatcccaatcggtgcttgaggggctcaactcgtgctttgatgtccgcaaacaaatttacattgctgaacttgaccgcacattcacgctggactgttcccgctgcaaattttttgcttgtcaaaatccacaccaacagggcggtgaccggcgagcgttgccaaaatcgtttctgaaccgattcatttcggtagcatttttttttttttggctttttggtcaaacaatcttcggttaattcatatttgtccaccctttttatttaaaaatcgatgtaaaaaagaaaaatttcccaaggaaaatccaccaccattgtttgaacggcagatgggcatgccaatgaaaaaattcagttcaaaattctgtcattttgtttattgatgggtggagagcagctcgtccttctccccccaaaaaatagaattttttttgtcattttataggttaaaaaattaatttttctagcctttttttcaaaaacaaaaacgttcttctttgtgtctgattctgtatatgttcgttttcacagatttttgttgaagagatgccccctatgaagacttcatctacattttatgtgaattctgcaaagccag

SEQ ID NO: 76397 - DNA, 253 bp, Heterodera glycines
caactgatccgaactatggaacgcttaagaatttggacgccgacatcctcacgaagaacgcgccagcaaaaccggcagcggcaccaaaggcgggaccggcgccacatggaggaggcggacaggcactgacaccaagtgaaaaaaatggcgaacattttcaaattttaattcctttttcatccccttttcagcgaccgatccgaactacgggacgcttcagaacttggacgcggaaatttttgtgaagaaatag

SEQ ID NO: 76398 - DNA, 1486 bp, Heterodera glycines
atgtcatgtttaaatgtttatgtgaatattcagagtccgtatgcggaaattgaccaggacaaggctgaagtgtcgcctgaagaagtgagttgttgttgctcagctgtagcaattggataatgttttcttttccatttatattttttaagcttcgggctgcttttgtccgttgcggtggagtcaacgcacatgcatggcgtgttttggttttgttggcggagggcgacaacgagacgaccaaattcattggcaaactgttggatttcctcacggcagaagtactcgagatttgcattctttttaatcggattaacgaccacaaatttcagggaacttctgctcctccgactaattgtccaccggctgctgcgccgcccaattatcagttggccaacccccctttgcaacatcaagccgggacttctcaggtttcttatgatgaagcagtagtttgctctcgtgctcgctctttttttagcgaaatcattttttgtttaacttttaggcctcgcaatttccattctccgccgccatccattctcagtcgggcctcacgtgtcgtcaggttatctttgtgactaaaactttggtcgttgcaaaatttaagtagtcttttattcaggaggttgttagaggtatcgctggcctgaaaactcccccggatcgcatttacgacactatttcgtcatcctcgtccgccgatgattcccattcgccgcataagaaggtttaaatgagaattttttcaggaaatgcatgcttatatttagttgagcactcccccgggtcacatttaccatactgtcatgtcgacctcgtccaccgatggttcgaagcgctcttctgtcatttacgacgttcctccgactcctccaccaccggtgccgcaacatacggttttgttcagggttaatttaggttcaaaatgtgcaatttactcgcttttctcgatttcttcagggggggggagaactttttggattcattttttgaaaaggtcgcacctttttaccctactaccccaaacagcaaaatgtgtgatgagagaagttttttttgtggttttgacaatagacaatcaaattttatccggcctcgaaatgctcggacgcgaaaaaaggtcgtaattttggagacgaactgatttttgaaataaaataaaattgttcgtttttagcgcaaagagacgccgaagaaggacagcgatggaaagaattgaaggcgttcatccatttaacaactcacaaataacatcattttttttgttcactttggacgtttaatttttttgttttgttttaatttcggcatttgattcgagtattttgcccttttcatttgcattttatgtttttagttgctgaagataaaaaggctgttttattgtactgatttatgcataccattaaggtttcccaaatgctaaattgctctaaaatctgttacaggaataagcaatcccaatcagcagaaagtaccattttta

SEQ ID NO: 76399 - DNA, 174 bp, Heterodera glycines
ggaatcagaaagacgtgctgatcatctcatcgtcgtgcataggcgagcgtcatctcacgggcgcgtctgttgaactccgcgcggtcagtccggtacaaattggcagcttccgcattgagaggcgagttgtccgggttcgggtcattcagcagaacgatgatggagacgacaact

SEQ ID NO: 76400 - DNA, 1636 bp, Heterodera glycines
ccaacaaattattgctcaattaattagcattgtcatccctccctggtgcccctttccccatttccgggactggctgtctcagctcaaaattcacgcctacacagaggtcagtttcatagaaaaaaaaggacttgatgttgttgggctctgatttatatttcccaaaaaatcgctttgatcaaacgtgatcgatcggggcatttcggctccgtccatttcggcactgcgcggcattttaatgtttgttggtgctcaattgaatgcccttttacgtaattttcttgcttatttgagtgtctcaataatcaaaaaggaaatttaattgaaaaatttatggcgaatagcgccaaaatggcgccagaaaagccgaattttttgcggaattgtttttggcccttataagttataaccgaaatttgaaattttgtaggattaaaattgtacatacctacctagattggtcaaaactttcgaacaaaatattaatttgtcatcaaaaaacaaaacaaaattaagcttgtggcgctgaattgggcagcgccgaattgggctcctcctccccactttctgaattttttggtgccgaaatttggtccgacctccctggtaaataaaatgtttaacttcaacacagacgcccgacatcattttgtgtggcaacaaatcggacctggaaaatcggcgccaagtgaggtaaagtaaagttggtaccgtaaaaataccgtcgtattccctaaaaagagcgaaggatttcatttcaagaaaatacggtacaaaatgattttttttttaaatcccatttaagcaccgcacgtgccaaacagctcgccgatcagttggggtaagtaagattttttggtctcttctgatcggccagtggtgatcgaacaatttttgaccatttggccaattgttcagactgccctactttgagacgtccgcttgcacctcctcaagtgggttcttctgctgattagtgaaaatgttcaagaaaattttctcgctttttgtcacgagaaaaattgtaaaatgaaatcgaaaagcactgaaaataactcaatgaatttttaatttatgttttttagcaatttccgaaaataaaaaataatatatatattttaatattccgccaatttcaaagataaaaccaaataacttttatttttttctctctttctttttatatagtaaattgactaatttttaattgatttttcagcaattgcaaaaaaataaaaaaccatatttactgtatttgagcccgcccccctgaaatagagcccccccccccttttgaagggggttgaaaaatagagccctcgggggttctatttcattaaatttctttctgtatatatttttttcaaaatttcagtaaattaaaaaataaatttaatttagacgtcgaaaaatcagttgactgcctactcgacttggtgatgcaacggtgagaaaaattttaaatttacaattgccataataaaatttaacggtggcattcaattttttaaggatacaaatgtccgtcgatggggacaatttgcctacggaatacatgggtgctgggagccgaattacgctggatgaagaggtcacaaatcgggcaaccggcgcttcgtattactgcgcaaattgc

SEQ ID NO: 76401 - DNA, 636 bp, Heterodera glycines
atggctacgagctgtaccggagcaaaggtcacatttcggtcagttttttttagttttaatttaaatccaatttacaaaataattaatttcaaataccccatttcacattcattcatttcccattccaattcccacacacattatataggaccaactccgcgtgtgcatggcccgtgtgctgttcgtcatcccgttgctgcttggcacggtcgaactgttggcattccgtcactattccctccggcacaaacatcggccgaccagcgcattgcccatttgataaaatgataatgcaaattttgtgatttaactctctctctctctctcccccattttctgtttttgttcagcttaattccttcctttctatgcacagggttttttcatataaatttttgttttttccgtccattttttttcattttgtgattttttgatcatcaattataatccccgtgattgttttttttttgatcacttttaaacagttagggcttttttgtacccaaagttccattggttgtgatgattaaatccgggataattaattattgtatgtattgttacggaccgaaaatcgacaaaattttctaaaaatttatttttaggcaaacctattccttcaatgacgaatag

SEQ ID NO: 76402 - DNA, 893 bp, Heterodera glycines
atgtacggtctgttggcctccgtttgttccgcctttctgtacgcgctctccgccagtccgttggtgatcattctgttcatggtcctcgacaggtacacaccgaacagcagcagacaccagaagggaggggggggggggcgatgctgcacaactttccctcctcccccaaccgcgaaaaaaattttcaaatatgaattttaaatttttcaaaatttcttttgcgttattttgagtgattttttgttcaaaataggttttaattccattccactctccctttttacaattaaaaaaaataataaaaaatacagattttttaaaaattaaaaaaatatataggtaaactacttttgcactagataaaaacctaaatttaaaaaaaaaaaattttttaacgccaaggtagcgcactcacaaatttcatttaattattttattttgaaaaattggatttctttcaaattttcaagtttgggagggagagaaatgacttacaattagcacagaagggatgacgacccttcaaaaaatctgctcaaaaaaaatttttctcatttttttaattaaaaacattttctggaaatccaatgaattcagtgtcactgtccacgccattgccccgctgttcaacattttgttctccgaatttatagaagatgacaagcaacgctatgccagaaagtgtgtgattattagagcccggacgggaccggggccccgccgggattttaccgggacccccggtcccgggttttttgggcaaaccaccgggaccgggagtcccgtttaaaacgggagtcccggtcccggggccccgtaagggtcttaaatgcaaaaatttatacaattttgaattttttttctaacactctgacaaatttttatgtaataaa

SEQ ID NO: 76403 - DNA, 264 bp, Heterodera glycines
atggacacaacgacgataaatcggattctagcgggaaacacaaagaccagagaacactacttgggatgcttcccttgcgacaagctcccaagcaaaatcaaccagtttccttcagcgttggtagcgaacaatgatccttcgaataaggaaggatcgcattggatcgcaattttcatcaccgataattctactgcctactactttgacagttttgggcgtactccgaacagatgtattagccactttttgcggaattatgaaaaa

SEQ ID NO: 76404 - DNA, 782 bp, Heterodera glycines
atgttcatcgttgacgataggaccgtctactattttgatagttttggtaggaaaccgaacagatgtatcagccagtttttacggaattatgaaaaagtgatttcgaataagccagctattcagtcagtgtttagtgagaattgcggctactattgcatttattttgttcattgtatgtgctcattaggaggaagaaattatgagagtaattttgaaaaaatgacaaaaaagttgataggagaagataatccagatttgtttgtcgtgaattttgttaagaaactgataaaaagtatttaaaggaatttttcattaactcatttataaaaatggaccgtttagacacaataattgcttctcttctgaattgtcccgcacgtaacttgtgcgaccgcttaaatcacccggatgagatacaaaaagtagaaaaatacctcaaagggaaaactctacagacaacatacaaaaatcaactagatgaatacaaagattttgagtacggtggaattacaagagaaagtgcacgtaagcaaatggcttacaatggtttcaagaatgtgaccgttgaccagcatttttatgtacggcaccgcatttgtcttcgctattcaagcaatccttgcgtgatcgaaaaacacaagaatggcaatgaacgtttctacccacttgaacttgtgaaagtgaaggacaatgatataatttatttagggcaaaattttcctaaacctttaattcgtgatgataatatgtttattgatgatcaacaatatttgaattggtaa

SEQ ID NO: 76405 - DNA, 739 bp, Heterodera glycines
atgcaaaacccaacatcagatattctgtgcttgagacagctgctcaattgccggttgactttcagctgtgagtcaatgattaaataaagaatttaaaattaaaaatgaattataataaagttaaagttaaaatataactaaattcaatttattttagtataaatacctaaaaattttctcccattattcatttaaaatgttttttccaataatcaaaaattgcgttgctgttgtagacctcaaaataccccttgatattgaaaaaatttatttaatagcgccatctacaaaatataatccacgtaaaattcatgctgtaattatgaaagtgtataatccaaatgctaccgccctaattttctcaactggaaaattcgtatgtacaggagcagctaatgagaaagaatgtaggcaagctgcggagcaagtcaccgaacgaataaggcaatgtgggtactacgaggcacgaatccacgaatttgcggtgaagaatttgattgcgacagctgatgcgggatttcacattcaactcggacctctgtccgactttctaggcgccaaatattgttccttcactcctgaactattccccggtcttgtctatcggaataaaagccccaaagtctccatcattgttttctcgagtggaaaattgaatataaccggaagtaaatcaaagacagaaatagattctgtatttaacaaattttattcattattatgtaattttaaacattaa

SEQ ID NO: 76406 - DNA, 79 bp, Heterodera glycines
atgcaagtcgacgccgctctatccaatggtatatagcttatatacattttcccactcacagctcggaatgttcccttgt

SEQ ID NO: 76407 - DNA, 2288 bp, Heterodera glycines
  unsure (1)..(2288): unsure at all n locations
tctcaaccaccacgaattcgccgtgtttgagcattgtgtcttttatttcttggcaaaccgtgcccaacaacaagccggctctcagggcttccatttcggagcctcaattcatccaatcgcctcaatgccgcccacatacaatgacgtaaaaaaagaacaatagggacaaatatttaaataataaactaaaataaataacgattgcccgatttaattataatatggcatttttctaatttatgaataaaaataatgacaataattaaaatttgatctttgcttatttaattttcctccgtctcagctgcgtttgtcggtcagcaaaataacaattcaacattttcatttggtaaaataaaatttcaaatttgaaaaatgtcaaattaaaaatgcctttccagaatgagtttatgcgcgatttgaacattgccggctatttggagctccgctggcacgacgaacggttgacatgggactcgcaacagttcaaagtgcagcaaattaaaatcgcgtccgccaaccatttatgggttccatttctgacgggtcaagtcagttttaaaaacctttaaaatataaataatttaaagaatttacaaaatattttactgtcgaatttaaattaattgtgttaaattaaattaatacattcaaattgtgttttttagggatatgaaacagctctgcgcaacgattacgagaacatggaggtgcgtcgggttgacgtacgaaactcgggcaatgtgacggcaattctcggcttcaaatttacgaccttttgtgacgacacggactttaagcactttcctgacgatatttacaggtcaatgttaataattaaattatgattatttatcattaataatttctcctttttcagatgttgtttctatttggaaccgatgaatcaaagggtaaacaaaaaattaaatttttcctattttctttaaatatttcttaatttttaatttagtcaattgtgcgtctcataagcgacggccaaccggtgttcactgatcccaaatatttccgcgactacggctggtctttgtccggcactgtcccactcgtttacatggacccatcgaatgtcacacaagtaaaattaattaattaaaaataaataatttagctaaacaaaacatttttagttgaatttctgcttaaatctgcagcgttcttcttcctcactgaaaactgagctgagaattccggtcattttttttttataaaaaaatgaattttaaaattcgaaatgcctttttaggcttggtcctgtggcattctgttcctttttgtgcccatcttcacaaacattcgcattcagctgatcaccaaactctttcttctgttgctccaattcttcacccttcttctcttcaccaatagagtttcgcctcaaatgggtaaaaattagaaatttttaccaaaccgctttccatctgccgttttaggctcaacagcaaatacgccgacaattagtaattattaaatattaaattaaattattaaaatactttttaattgtaattttcagtgcaaattctcgagcttggtgtcgtgcttaatgtgatttccataatgtgcaccttttgtgtgcttgctctcaccaaattgcgcatttacaaccaaccgccttgggactttctaattaagtaaaagattatcttacgcttttaaaaccattttatattagtggaaatatttcatggggtaattttatcaatttaatttatatatcaattaaaaaattaaaggtaatcgtaatctaaaaaagtgaaaatttttaaatatattatatttaaaaaatcttaattggtcagaataaactttttgatcaaaataaggaattctttttaaacaagagaaatatgctgaaataaagcaaatcttcgaaataaagatttggaatttctaaggtccaatgccgccaaaaaggcttacatttaccttatcgcttcttttcccacagattttttttgaatttttccttaatttttcaattttggtccgtttgttcagtgccagcactctcatcaatcggttcatttatatcttcgagtcggcatccgattaccaggaccttgaggcgatggagcttcataaggaaccctcggcagatggtggcccaattgagcagccaaattcgagcaaaaagccgcccctcgtggacaatcggcaattttaatcattttttgaaattgatattttcttatttgaattttagcttccgttccgattgngtcggctgcttcttggccttccatgccgttgccatctttgctctg

SEQ ID NO: 76408 - DNA, 615 bp, Heterodera glycines
atgtgggcggcattgaggcgattggatgaattgaggctccgaaatggaagccctgagagccggcttgttgttgggcacggtttgccaagaaataaaagacacaatgctcaaacacggcgaattcgtggtggttgagactttcaacatctgtttggaaaaattttgattttaattcaaaaacatttaaattttaataaaataatttcagtaaaaacctgtaacattttcgaagaattttttgcactcaatggcattgattccgctgttcagcccaaaaagtgagcttggcccaaccaagtggaaaaaaggctgcgcagagcaaaaatgagcaaagaaaaacagcgaaggcacaattagaaaagccaattgcattttgctcttaaaaatgccaacaattaaaaattgacatttaatccgagagattttctgatgtaaatttgtctatattttttattggattttttgtcaatataaattaactcaaaatgggataatgagtaattattacgtaaattggaccaaaactctctttttatgtattgcgttcagtggtgacgtcaccccgggccgatcacattcactaagaaagaagcgacccaattttgggacacataa

SEQ ID NO: 76409 - DNA, 233 bp, Heterodera glycines
atggcttctttttctcccgtttttattgccattttaataatcatttacacttccgctgttggagcgcaatttggtcaatttggcagtttgctgaacggctttggaggtgccaatggcggcgccaatttgatgaacggaatggcggccaattcgcgcaactttgccaatatgggtagcagttttggcggcatgatcaatcagttcaaagggatgggacgaaacttcaaaaggca

SEQ ID NO: 76410 - DNA, 929 bp, Heterodera glycines
attataactcaagtcctaaactgctgttttcttccaaaatgcgaaaactaatcattttttaatgattctaaatgcccaaattgcctttgtgcccttataaccaaaactattagcatttgaattccatcatttttcatgtgttagagacatgaaaatagtacgccaaaaggagagaaaaagaaatatggaaaaaaattgaaattaaattgaattcaattaattctgtggcttcgccggattaacgcattaacgcccaattccaatgtcgtccatcctttggacgttgacgagctgttcctgcagcacaatcggtgtcgaaatgcacagcaaacaagtgtgtgtcagggggtcgacaattaatcgctgagatttcgaacaatattcatattctcgacatttcgatttttaatttcttttttaggattggctcttccttttcgttgttttcattcgcttcttttgtgttcatggccctcgtgactttggctgaacatcccgaattccttcggaggagaaggattcccttgcggtgagaaacccataggaaggaaataattaaatgtggaatggaaatcgacgggtttatctaaatttgaacaatccaaaagagtgtggggtccctaatatttgacaaatcagagatgtattgttagtgtttttcagtgcctatcttcaaattgttggcattttcttcgtggtcagtttgctgaacaaccgcgtgctcggcttcggcctgcccttccctctgatcatcgtttttcgatcggtttgccctttcttttcgccaattacccatttattcgtcctcttttaaatgcttctcccaatgatagcttttctttatttgttcagagcactcttctcgcaaatgttctgctcagttggctgttgcaaaatcgcaccttttcccccgcccgacttttctccgt

SEQ ID NO: 76411 - DNA, 806 bp, Heterodera glycines
atgtccgtccaaaaattggtcgtcgctcttttgtccattccctgcgccgccttcgcccgtggcacttttgcggctgaacagcgtaaaaagcgcaatgccaacgctaaccaacaaaacggagaaaagtcgggcgggggaaaaggtgcgattttgcaacagccaactgagcagaacatttgcgagaagagtgctctgaacaaataaagaaaagctatcattgggagaagcatttaaaagaggacgaataaatgggtaattggcgaaaagaaagggcaaaccgatcgaaaaacgatgatcagagggaagggcaggccgaagccgagcacgcggttgttcagcaaactgaccacgaagaaaatgccaacaatttgaagataggcactgaaaaacactaacaatacatctctgatttgtcaaatattagggaccccacactcttttggattgttcaaatttagataaacccgtcgatttccattccacatttaattatttccttcctatgggtttctcaccgcaagggaatccttctcctccgaaggaattcgggatgttcagccaaagtcacgagggccatgaacacaaaagaagcgaatgaaaacaacgaaaaggaagagccaatcctaaaaaagaaattaaaaatcgaaatgtcgagaatatgaatattgttcgaaatctcagcgattaattgtcgaccccctgacacacacttgtttgctgtgcatttcgacaccgattgtgctgcaggaacagctcgtcaacgtccaaaggatggacgacattggaattgggcgttaatgcgttaa

SEQ ID NO: 76412 - DNA, 774 bp, Heterodera glycines
atgaagctcatccttctgatcattgtcttaattgagtgtttttcgagcggtaattattcattaatgaaggattattaatttttaatcttttttaaatgttcttatatttttttttcattttcaaatgttttcaatttttttaatatttagcccattttctcatttgccgtgcgggagcgttcggcaccgttgatcaaccctttgttcgaaaaaagcccacaaatttttcgggtatttgtgatccaccgtttaaattttgtgggaaagaagtctgcttccgagatggcaaaggtattaattataataaagaacacacgaaaagagcatacaaattccattaaaaaagaacattgaattaaagtttttggatttttagtagcaaaaaatatcaaaaagtaattaattaatagtcggattttttgatcttagaaaattctcatttgaaaggcaagaaatttgcatttaccataaaaatcatcatttttaaattcatcattacataacatcatttgttttccagccgaagattatttgaccaattatacatgcgccattgaaacggcatttgcagcattgtgccctttttggcaatgcagtagtgcaaagcaaaaggcaacggaaacgaagaagactgtaaagaggagataaacaacaataaggacacttttatcaaaaaatacggcaattaccggtgcgaacagtgccaattaggcaaagaaaatgaagacaatggcaacgcgaatttcccggtatacaagccaaaaggtagagata

SEQ ID NO: 76413 - DNA, 1269 bp, Heterodera glycines
atgattgctgctgaaaaggctgaaggtaagtgatcagagtgctttcgaaagaattgttttttaattaattttgacgacaaaatgtatcggaaaaagttggcattttttatattttctgtcattttttctttgttaaagtgccaaatttttcaacggcattgccaatgccaatcgttccgatcaatcagccgccgaaacaaacgctgcttttcccccatttcttcgaagatattacggcacaagaaaagtgagaaggcaaatattttaatatttaactttccaaatttaagaaatgtatccattgaaacacccgtcgattacgacgatagcgacgaaggcgaagagaacaatttaaaaagaagtgacgaaacggcaacaccaaaacaaatgccaacgatggaaatgacaacaatggcacaaaggcaaatgatggaagtgccaacgatggaaatgccaataattgcggtgccgaagatggaagtgccaacgacggaaatgccaaaaataatggtgtcaacgctggaaatgagaacaatggcacaaagacaaatgatagaagtgccgacgacgggaatgccaacaattgtggtgccaaataaagcacaaattccaacggtcgcagtgccaacgacggcactcattcaaacagtgcacactttgcattttgctacggacgaacagacgcaaattgaccaaagaagggaagaagaacaaagagaagaagaagaagaagaacaacagaacattgatgaagaattgcaaaaagaagagaaaagaacggagacgacgaaaacggcacatttaattgtgccaaaaacggaggaggagcaaaatgtagaggaaaaaggacagcaaaaacagcaaattgaagagccaaatgcagaggaagtagcggaacaaagcgacggacaacagggacagcaaacagtaccagcaacacaaccatcggttgaagaagaaacatcacaaccgaaagtcagagaagagcaacaacaacaacaacatgaacaaaaagcacaaactgaaacaatagcattggtaaaagcactgcaaacacccccaaagcgagtggcacaagaaacagcaacaacagaactggaaaatgcgcctcaacatgctcaagcagtacgtccgccgtcggaagaagcgacaaaggcgccgataaatggacaaaagtcaatgcatcagtcatcggcagaaaaagaagtgccatcgccaagcggtggccaagcggcgcatcctccgtccgccacgccgcctttccgagcc

SEQ ID NO: 76414 - DNA, 509 bp, Heterodera glycines
atgagcacatcgatggaactgttgcagaaacagcagggggaagagaaagaggaggaggaaaaggggacaacggccaaaatgagaaaagtcagcagacaaacggcggacacaacgacggcaaaagcgaaggtgccaacgactgcgacggcacaaaccgaagagagggaacctccagggatcagtccccagccaccgggtcaaacaacaaaataatcactaaaaagtcaaaataatggccaaataatttaattttgccctttttaggctttagtccaattgcgacgagttcaagcagtacaacgacaacaccaacagcgaaaatggaacggacaagcaaaggattagcaggggaagaagaagaaagagagggggaagaagaggaagaaaatggagaagaaaagagtgaaagggaagaagaaaagagggaaagagaagggaagaaaagtggacggaaaaagggagacgaagaggaaaaaagagacggaggaaaagagaccaaatattggtaa

SEQ ID NO: 76415 - DNA, 881 bp, Heterodera glycines
atgtcagacaattgcaaagaagttgaggaaaagatggcaaaagcaatgtaaaataattaaaattaaaatgccaattttcaatttctaattttaatttgttttcccttttttcagtttcatctccgccgactgttggctttgtgtgttcgatttgcttacgccttcacaacttggcctcggaatttcaatgattagccaccgatttgacttttacgtggacgaacatttcaaatcgcgcaaatggtcattggactccatggcaatttggcgcacaattggagagaatggcacaaacgaaatggaaattttcaattccgatggaaaaccattgccaattccgcaagttcaaatgccacgcaaagtcatcggattcgaacgcatcgacatttggttaaattggcaattgtgtaaaaatttttgacaacttttacccattgatttttagtttcatcaaccgaaatgccatcgcttttctccaccgttttcgtcaacttttcgccgcctgccaaattaatttgaccatccatccgacaagtgatcgaatttcggagttcattttgcgcaatatttggccaatcttcggagaaaacatttgtggcatttttttgctttcggatgtttttcgccgtttgcgcaaattggtcccatcatttctctacgattttccgtcacttcgcgttgtcaatttatgtgacgccgatctcttcattgaatttccggccgatgacaatgccatggcgtcggatggacaagcggtggccaaatggcttttcactcctcgaccggacaatgtgccaaaggtgttcacatgtctgtttcacgaggattatggaaattggtcatcgaagattgaagccttcaaagcggtgcttactaattga

SEQ ID NO: 76416 - DNA, 94 bp, Heterodera glycines
ttcttgactttttaatttttttatttcttgcggctagtatcttctacaataatttgtcagtttggtcggatgtgcgtcaaacggaaaaaataat

SEQ ID NO: 76417 - DNA, 1096 bp, Heterodera glycines
atgaaactgcaatgtccacttttaccattattttttatccaaattttcttccaatttttggctgataaatccattggcattccgtcttatcaatgggactcggccgattcagtccaaaatgtgcacaaattcgtccaattcatcaacgacatttacactgattatgatcacacaggacaggactattctgtggaacaaaaacggatcattttcaatttgacatttgtgaaatatgcggcggaaatcgcaacttttcgggtgggtcggtcattgaattagactggcggattgtcatggagccaaagattacgccaaaaatgttcccccggttggtccctttttaggtgttggacaacataatcggagagggcgaagcaatgccaaatttgaatgtgatcagagcagatgacgccgtgaacgaattcctcggccttttgcactatgaccaaaaattgggccatcacattgccaaagcgtacaacgaaacagtgttttgtgccgacaaagaccaaatttccaagaaagtggtcaaccaaattttacaactgactttttcattggccattcgtattgtgctctctgtgatgtgagtttgaattgaaatatcaaataattatttatttttaattttacccttttaaagtcttgggccacacaatttgtttgcacttttttcaaatattttccttccctagttatgagaattatttcacgaattttcgtgatgtcggcgggtggcaattggaacaacttttgtcggcatttaaaactttgtcggcacaaagagacggcaccaacgaaaatgggtaaaatattcttacattttataataacttttattattttctagaatatttccctttcaaatcattcgcattgattcggaagagaaaaaacatttttggagtgaaattgattcggaagagaaaaaacattttttgagtgaaattgattcggaagagaaaaaacattttttgagtgaaattgattcggaagagaaaaaacattttttgagtgaaattgattcggacagcgcgagagaaccgcaatttattggtgggataaaaaatggaatttaaattttgaattaaataaa

SEQ ID NO: 76418 - DNA, 599 bp, Heterodera glycines
  unsure (1)..(599): unsure at all n locations
atggcaattaaattatttagtaacggtccatatttngatttatatttgnaattttatctnctttttcatttcaaatttcgtcaacaaattaaatttgcaactaaggattggtaagtacaaagcaaaaaaaaaaaaaattgtgctgaagacaaattttccactgaaagatgaaaatcatcacaaaatatattaaagttaattagaggccgattatttgactgccgaaattttcagcaaattttgaaatgactttcatcatatgcatttatttagttttttaaatattttattaaaaatgattttcaatgtacaaataaataaataaatgttttcccgtaatatttttaattgaattaagctctcaactgttacgaaaatgtgttgttcttttcttccgtcgattgttcattctttccacgaataagcactattccatatttctatttgttctttaaattattcaaatttcgcttaaaatttatttgactttttctttatatacaaaatgagctgtggaaaccgtagaaaatgttcagtggggagaatgaccgtaccaagaacacactaaaaatatctaattggtcaattatcggattaaa

SEQ ID NO: 76419 - DNA, 1284 bp, Heterodera glycines
atgaccgttctcctcttcctcatttgtctgctgatcgcaatgtttgccatgcaatccatggccaaaagtgtgccaaaggcgagggacagcgaaattatcgattatgtaagaaataaatgtttttttaaattatacaacattaatataggaggaatggaactgtggtgccaccgattttgagaaaccgttgtcccatcagttggccaaggaggactgcccgaaaaggatgtgtaagtgggggaggggggaagtgccaatggatgatgggatgggaatggcacacgaccaacaatggcacttttagttgaggcggacttgtgctgtcgagtgcacgacatgtgctacatggaggagcagaagagcagggagcaatgcgacgaggcattctgttattgcttgcagaggacggtggcacagaacgccaaccaaacggtgggaggagcgccaatttgaaatttgaaattaaattcaaatgtcaatttcagacgaacggatgtgccggggtgtccaccagtttctgcgaaattgtcaaaattttcgggggcattgcctatttgtcgtcccaagaattgagaacgaagcagcaaaaagcgatggcaaagttcgaagagaaggaaaagcagcggaaaaccatggaaatgagcagcagcacaacgccaaaaccgacgacagaatcaacgaagccaagcagtacagacagagcaagcagcataacccaaacagaacaaaccatttcaagcagcacaatccaaacagcacaagcaacttcaagcagcacagcttcaaagccaacgaatgacacaacgccaatgccaaagtaagcggaaaattttaaaatataaataagtaaatttattttgaagtgcttctccaacaacttcttttcctgctgctgtccattcgactgtttctccggcggaaattggccaatttgtgacgcataaattccccttggaatgcttcgacaacagtgaaattatattaatttaattgtccttaacgagttttaatttcataatttgtgcccatttcagcgctgtccttttgcacccgtcaattgcaccgctgcgtctccgagcagcacagccgacggaagtcggcctcatccgacggcggctcagaggacgcttttttgctcagcgttcaattggccgagtgttcctcccaattctgcgcctgctcgtcggcggagagtgcccgcgctcggttggcaagcgtgccgcggccgctgctgggcggcgagcagtgcgcgcaaagcttggcacaaatttgctcacaatttga

SEQ ID NO: 76420 - DNA, 372 bp, Heterodera glycines
atgctgtccaccaaattgttcgtcgcttcatgccttctcaccgttttcctcttcaattgtctgctggtgggacaaactcaggcatattggtggccatactacggtatgtctttaatggcgcctaattacgataatacagtatattcgatccgtgttttaaattatgcaggaagtagttatggcagtatgggaggctatggcggcatgggtggttacgggggcatgggcggctatggcggtatgggctacggcggtatgggttacggtagcggacttggatacggcggcatgggttacggtggcatgggcgtgggcaagagggaggccgcgtttgtggcatcgccaccggctccgccgccaaagggacaatga

SEQ ID NO: 76421 - DNA, 251 bp, Heterodera glycines
atggcatcattttgccatacctttggcgttggctttgctgccgcattcgcagctgttgccgccgtaagtcgcgcgagtgttgaagttacagttgttgttattgtgggtcgtactgtagtttccgttgttgttacggtcactgttattggtggtggtgttgtttcgcttatactgctactaatagtcgaagaaatcgtcgagaatttggtgaattcgtcaaattgaaagttttcgctctattaattacaaaa

SEQ ID NO: 76422 - DNA, 2122 bp, Heterodera glycines
atggagtcaaccggttttcagcaaagatataatttccgagtgcgccggccgataaattatatggaacaagaggaatcgtcgcattctcgccacagccgacgaaatggcactgaacaaaacaatggtttgaatttggcccctcaaaacattttggacaatgtgcaaaacccaaatccatttccgcgaaatttcgaaaacagtatccctcagcaagtgggagtgcaacaaaatgtcgaagaacaaatgcagctcgcagtgttccgacctcccaaccaaaatgttgcccaaagtttcggaaatccccgggctcattcaacccctcaaaatggttcaccacacatttcatacaatgggggacaacaaaatttcgagcaaaaccaaaatcggaatccggatgcgaaccgatttggtaatgagattcatggacaaaatatgcaatttcatcgccgccaaaaccctcgaattttcgtcaactcacaaatgacgaacaaccatcagttttccgcactaaattttgaacaaaatcgggaattaagagcacaaccggttcggcatgctcataatttcggatatgaagaaatgcttggtgagcaaaaccaaaactttccaaatccaaattatggtcgagaaattggggtgaatcacccaattcagaatacaagagattttggaaatggacccaattttcaaaattttcatccggttcggaatatcaatcaaccaaattatcaacagcgaccgaatccaaattttgaaaatttggcaccacaacccaatcactttccgaacgttcaaaatttcgagtttgtccctcagcaaaatttccaacaaaatcaaattcctgatattgtaatggaattacataaagttactctgtcaaaccaatacgcaaatacgctccgagaaattccgaacctatacggaacggaaggtcgggacaaaattaaggatttcttcctaaatgttcaaatgtgtgccggagagtggagaccagaaaagcaaaaagagttgctacagacaaagttgaaagggaaagctttgaaagcgtatcatattgcgctgaacaaatttggaaatgaggcgacatttggcattctaaaaaccgaaataatgtccattttgagagagacagactacaaagaggcaaacgcattttccgaattgacacagaatggtaaaagaaaaccaaatgaagacattataaagtttggtgagcgaattcaacggttggttaattgctcatacattggtctggacgaaaaccagttggatgaggtgtcaaaaaagcacttcatttcaaacataaatgatgtgaatttggccagatttttggaatgccagaccaaagcaaaccaaacctttgatgagcttttgatgatggccaaccgtttgagtcttattgaggacggaaaaaaccgagaacgaaacgaatcagttggaattcctgttcagtttcagcaaaccggcccacagcaaaaccgtacagtcccatttcaaaacccaaattacggacaacgttttgaaagaaattttccaaattttgggatgggagcgcaaaataatttcaggccaaaccgacaaagtggtttcaaaaaccaaaccttccaacaggaaaaccgaaattattgccccaataagaattttgatcattttcaaaaccaaaatttggtcccttatcaaacttatggcccgaaaaatcaatgggtatccgacccacaaaatggctttcaaaacgatattttttatgagagcaacccaaattcccggccaagtcaacgttttgtccattttcaaaaccaaaattccgatcaccaacaagacgtcaatgatcataaaatcgaggcgatcagcgcaaatagaacccagttcgattcaaatcaacaatcaaatccaatggcaacgcagaacatggagttgaatatgattaaggtgaaaggaaaaggaactgaaaaatgcgaaaagaaatcagtcaaaattagtcacatcgaacacagcgaaccgcccgcctacgaaaaatttttcaattcattaatcgcccattcactgaatttccccctcacaaaccgacacaaatatcaaattcagaatgtttttgtgttagagtgaacgttgctggattaaa

SEQ ID NO: 76423 - DNA, 417 bp, Heterodera glycines
atggaagtggtaaattttgaaaattttaatgaattttatttaacaaattagttattttcgtgtttaaattgaacatcaattttaaaagcatttgatttcctgcagtttatccgccagcattttgttagttcgacaagaaaatcattaatgcaaaaaaagtttgcttaagtgaatgatctctaatattttttttcacaaataataatttttaattttcagatttgctcaattggattaaccaaagcgatgccattggacggatggacaaaaacgatggcaattttcgacaaatgagtgtgaaaatggacaactgaatttttcttgtaatcggtgtggcattaattttaccactcaacggataattttgacaaagaatggccaagttggactattccgagtttctacaaatattaaata

SEQ ID NO: 76424 - DNA, 674 bp, Heterodera glycines
atgatcagaagaaaattttggaaaaaatcagtgaaatggagaagcagcgagaagtatagtcaaaaggcgatgagaaattaaaacgaaaattaaatttatcaattttaaatgtttccttttatatttaaaaattaatttgatttttaagcactgcggatcaattttcaaaaatacaaaatgatcagaagaaaattggggaaaaaattagtgcattagagcaagaaccaaagcaaagaaaggtaaattaaggggtagaaatatatttttaaatattattttcattaattgtatatttaatcaatttatttacaaatgaattattttaaggcatcttcaaatttccgacaaaattattgggatgccaatgtttgtcatgagaatctcaaaataattggcaacaaaagtctcaatgtccattataagagaatgagcttcggatttgcagtcaaacagcagaacaaattggatggaacaattcgaaatgaaaagggcacttatgcatttgatagtgatggcaaaatctggattaatggaaaagaaaaggaacaaatcgtgaatattcctacggtgaaggtgatactgtaggaattggcgacagttcggccactcggcagatcattttcaccaaaaatggacttcgtttgggttgtcaaataactatataatttattaaa

SEQ ID NO: 76425 - DNA, 304 bp, Heterodera glycines
  unsure (1)..(304): unsure at all n locations
atgaattgccgcattactacgaacagagtaattttgttcattaatattttaatccagctttttaaatatttttctaatcatttttttaaaaatattcccttttatgttattttatttaatcaattttttaaaaacttagtctcattanatagactgaaattttctcaaagtgatataattttaaaattttaattttcagttgctttattgcagtcaggtaatgtgatacatgccatgggcaaccattattacaattaattattatttattaataataattaatttcaataattaaacaaataaa

SEQ ID NO: 76426 - DNA, 642 bp, Heterodera glycines
atgtcgggatccctaaatgcgatatccccgtgtccctatatttcgggatccctaaatgcgatatccccgtgtccctatatgtcgggatccctaaatgtgatattcccgtgcccctatatgtcgggatccctaaatgcgatatccccgtgtccctatatgtcgggatccctaaatgtgatatcaccgtgcccctatatgtcgggatccctaaatgtgatatctccgtgcccctatatgtcgggatccctaaatgtgatatctccgtgtccctatatgtcgggatccctaaatgcgatatccccgtgtccctatatttcgggatccctaaatgcgatatccccgtgtccctatatgtcgggatccctaaatgtgatatccccgtgcccctatatgtcgggatccctaaatgcgatatccccgtgtccctatatgtcgggatccctaaatgtgatatcaccgtgcccctatatgtcgggatccctaaatgtgatatctccgtgtccctatatgtcgggatccctaaatatgatatccccgtgcccctatatgtcgggatccctaaatgtgatatctccgtgtccctatatgtcgggatccctaaatgtgatatccccgtgcccctatatgtcgggatccctaaat

SEQ ID NO: 76427 - DNA, 2232 bp, Heterodera glycines
atgggcaaaaaaagagtgaatactcctaaaatccgacctaataaaaagcctaacactcggaggggacaaatcgcggcggaaataacgacaataaccaccacaactgctattccacctattattagccctagcacaactgttattccaccgaccgctcgcaccatcaccactgctattccaccgacaactcgcaccatcaccactgctatgccacctattactcgcccaagcacaacggttattccaccgacaactcgcaccatcaccactgctatgccacctattactcgcccaagcacaacggttattccaccgacaactcgcaccatcaccactgctatgccacctattactcgcccaagcacaacggttattccaccgacaactcgcaccatcaccactgctattccacctattactcgcccaagcacaacggttattccaccgacaactcgcaccatcaccactgctattccacctattactcgcccaagcacaacggttattccaccgacaactcgcaccatcaccactgctattccacctattactcgcccaagcacaactgttattccaccgacaactcgcaccagcaccactgctattccacctattactcgcccaagcacaactgttattccaccgacaactcgtaccaccaccactgctattccaccaattattagccctagcacaactactattccaccggttactcggcctagcacaaccgttattccaccaattactcgcgtaaagaccgaagaaatccccaatatcacgattgaaaccattgagaagctcatcaagagacttgagaaaatgacaggaatacgggagaaccgtgtgaaaccaactccatttttgatgccggaggacgttgaagaagaaagtccgaccacagtagtgagcaaaagggacgctccggaagaagattcagagaaatggtggcaacagcgaaatctggatcatgaaaactcacggctgaattatcttggatggcgcagtcatttaactaatttacaaaattcgcgggacaaatggttcagcgactgcaatgaaagaaaaaacgcccttgcggtggcaaaggctttggcacgacaaatgcctgaagatgcagcgcggtctttgtacagaagagatgatatcacagctttttgggcaaagtcgacagcattgaatccaatgtggacaattactttatgcaagcaaatcaaagcagaaaatattttgtgggaccaaaaagttggcaacaaatgttaccgggaattgcccataatagcgtccaaggaagttttgtttgtgaaagtcggcacaagagacttaaagaaggaaggaaaagaaatacagtgcaacaatgatggaagtaatccttgggcttcgaattttaatgtaaccacagagggactacaaccatcgatggaacatcgtttcgctcctgaacaattcacaaatcggcaaaatccatttctattcttcacaaaagggtccattttcgagtcggaacaattacgactcgaacagagcttaaaagacatgtccaatcggatgacacgacccgaattagatttcactgacgttggactaatgaacataaatataactgaggaacacggggattcagtggccggaattttttcaattggtgaaattctggtagaaaatgcgcaagtcgaaggagaaaaactgagaaagaaagccgaagaaacaattgaaagaggaaaagcatggattgaggatcccattggaatcataaagtacattaaatggaccggcattacgatcgtcactatttaattcttgttggagtcgcggttctctttgtcaaaattaaaatctatacaacagcactcatggcaccgttgcgaattattcgttccatattcaattcaatcatcgggtgttttaccacggggaaggaattaaccgatcgaataagacaccccgtggtgatggaagtcgagctggaggagagggtcacaccatcagcacccactgaggaatgcatgctggaacagaaggcatatgtgttaaattatatgcctaaaatataccaagttcatcaaactgaacgaaaaaggaagagatgctatgtgaatttaaccataaacgggaaggacgtaagggcattatttgacactggcgcggatgtaacttatgttgggaattcgacggcaaataagtgccttctcaatgttcgccgaggggacttcccacaagcgagggcagcca

SEQ ID NO: 76428 - DNA, 138 bp, Heterodera glycines
atgaacagacagcacggggaattggactatgttggccaacatttggccaattttcaaaacaaaatctctctgacaatgtccaatgtgccaatgcatgaagctgtgctcgcggcacgcgttctgagcagcgtacaaacg

SEQ ID NO: 76429 - DNA, 128 bp, Heterodera glycines
gtcattaaaaatctgttgaaaaataatccccccgtctccattaaaggccctgtctccaattatgtccccctttctaaagaggttgaaaaataatccccccggggccttaattagagaaaatacggtat

SEQ ID NO: 76430 - DNA, 1035 bp, Heterodera glycines
tcttgagaaaaacgtgccgcgaaaaaagcggtgttgaaagcaaaaaaggtcattgatttacattaatttacatggccggagaccccttcgcaaaattggaaaattggccgctgatcccttgttttgcaataatctgaattttgaggtctacatctgaattttagtgttctttatcctgaatttgaaaaaaaacttggtcaccctcaatatacatatacttctgaacaattctaatgctaaaaaacaggcactcgcgcgaaaactgaataaaaattttgtatttgaaaaattttgtccaaaaatttttacgttggaaaattaccggtttttaccggtaccggtaccggtaccggtggaaaaagttggtaccggtaccggtaccggtttttgcattaccggtcagtaccggtaccggttttttaacaattaccgattaccgagcaactctaatataaagttaaattaaattaaatggacgcttcgcgaaaaagttgttgtgaggtcgggcgataatttgcattttgtcaccactcccccctcccaccgaaaatcccttcattccactaattgccttaattaaggacaatttcaatgaattgtacgcctttttgggaacccacaaattcgcacgacaaacgcatccaaaactgcagaaaatttggtgggacgttcatttttttgaggtcgaaaaaacgcaggggaacaggtgaaaatgaggaaaattagcgataaaaacatgaaaattcgaaatttaagctgggttttaagcccacttagcgcattggaaaagtacaaagtgcgcgaaaagtatccgttgccgccgacaatttgggacggacaacggaaaaatggcttctttagcgaaaatacggtgaaaatgaaccgatgaaaagcattggtatatttgggacacaatatcccatccccccatttcgcagatgacactgcttaatgagcaattcgcggaaagtcaatacttgcccccgcccgatatatgggcacttgcggaagccacaggcctttcggagacgcaag

SEQ ID NO: 76431 - DNA, 67 bp, Heterodera glycines
gtctccattaaaggccctgtctccaattatgtccccctttctgaggatgttgaaaaataatcgcccc

SEQ ID NO: 76432 - DNA, 772 bp, Heterodera glycines
atggctgtcctacggggaacagcgatttcaggtcggtgagacatgcgattttgaactcctcgggtttccgttcaatgacctccctggatatacaattcaatgtgaaatgtaagtaaataatgagacagtactttctgaatgccatcagaacggaagaaggcgagagaaggacgggtccgtcgggcaaagtcctggacccctgggcgaagttctgcaggtacgttttcgtgtagtgggactgtccaatggcacgcgaagacaaataaaccatttgatatcttaaaaggcgaatgacggtattctagctaaaaacaattgtttttttaatgttctacccgttctttttgatgccagtatacagctctgcaaccccggaatgggcccaagtgccaccaattgctggaatgacatggccaagcacgtcgctctttgtgattgtgccgtcgatatccgagatgaccaatttgtcataccatttgagcaaataaatgtgacaagaacaccaagcagttccctaaaacaaaatgcataattaaaaatgacccctttctgtgcgcattgaattgaatcccatttttgaatttatcagttgaatccctaatcacccccttaatttttgcctgatattttgttgtgatgctgaaccgcgcgtcgttcgacccgtagttcaagttcaacaggtccaattggtcacgggagagacgcaacgaccgcttctcttttgccttctcctcaaacagttcgaagtccctaaatatttgtgtataataaa

SEQ ID NO: 76433 - DNA, 516 bp, Heterodera glycines
atgagtgtagcaaatggcaataccaatgctttgatgcgcattttgctgaacatttcgttgtgcgcaccgcacaacgaatggccgacagagagaagccatgcgcagtttttgtcgacattttggcaatggactgaaaaagcagtcgaattaggagaagaaaaagtcgaaattaagggacacaccgcaatttggggaatgcaattcgaccaaattgaccaaaagggcgacgcactgatagccaatggactcggcggagggaaagtcgaaaaagcggaggcaatgggaaaggcaaagggacagaacggagtcggaagggaaggcacgaaactcgctgaaaagggggcaacgaaatgtgggtttgaaaagggattgaaaacgtacagcaaaaccgaactgatccgggtgagaagcgttgagcaacggaggacacgaggcgcatcagctgaacaacggagggactcatcgacgacgaggcaaatgcaatggtcggtcaaaaaggctaatcagagaaattaa

SEQ ID NO: 76434 - DNA, 549 bp, Heterodera glycines
atgctcaaatgcttatgcatattaagcgaactgctgggaatcagaagagggacaattgaaagagtggtgagcgaagaagaagctgatggaccaactcacagtcaaaattcaaaaaagtgatttttagttggaaagccaacttcttttaaactaattgactttcaaatgaatgaatattttgagatttttttaaatttaattttgaatgaaaagcaactgaataataaataataccaggggatctaatttgtacttttttatccatttggtttgaacttctatgatcaattttcaatgcctatttttgcctattttgccttttttagaaactattttcaggatttttggaaatatccttaataaaatgcaataaaaatgagaaatacaccccaaagaaataactgaaaaattttcagaaaatgctctaagaattgaaaaattttcttgataaaaagtcgttaatttaaaaaccttaaaatattttaattatttcatttaaattaatttgttgtttaagttttttatgtgttttgctacctaaaaggttta

SEQ ID NO: 76435 - DNA, 1153 bp, Heterodera glycines
atggccggctgtcagaagaagtcgagccccgtagtggccatcgtcgggccggcgaagtcgtccacaacaattgcggtgcagaatctgctccaggtgttccgcattccgcagattggctactcggcaacgaccacggatttgagtgacaaggagcagttcggatactatctgaggtgcaaaatgctcgaattttcatgacaaatcccaaaaagatgggttttggaaagcattagttgaaaggatgggattatatctattggggagacataaatattgaacaaattaattcataaaagtgaatttttggttacgaaaaaagcaaatacctgtgcaggtacgtacagaggtcaagcgaggaattcagcatgtcaaatgcagccttttttttcaaaatgacgaccgaactttaaaaaaagtcattattagtgatgtaattttttgaatataattatttgtttaataattacaaataattattcagagttgttccatctgatgcttggcaagcaatggcaattaatcagttgctaatgcacttcaattggacatacatcgccgttgtgtacagtgccggtgaaaaattattattgaaactgtctaattacctttaattacacttcaaaattttaaggaaattatggagagaagggttttgaagcgatggaacgtctgacgcgcaacggcggaagcgaagtttgtattgcgcacgcacagaaagtgaagagtttaggggagccgacggagtacagaaacgcacttttggcactgaatcggctaactccacgcccccaagtggtgggcacggcaaaattggagaaactgggagggaaaagcacaaaattaacaaaaattaagggataaagcacagtttaaatgccaaaaatgaaataattaatgtttacagattgtgtgtttttgcgaagggatggcactgaaaagaatgtttttggcacaaaaggcacttcgccaagaagcggcgaccgaagcagcggaagggacggaaaacggaaataacacaacgaaaagccgagtgaaaggacgccgaaaactgagacagcagcagcaacaacaacagtaccatcatcagaatgtgaatgcattccaatggatcggaagcgacggatgggccgaccgattggacgtggtacggtag

SEQ ID NO: 76436 - DNA, 2686 bp, Heterodera glycines
atgactgcccaaattccagaaatatggaaaaagtcaattatttgccctgtcccaaaaattcaaaatccggtaaacccagtcgactttcgtccgatttctctgctttgttctgtttccaaaattttggaagaaaatatagcaggaaaaataaaaaattttgttgaaaaaaataatttgttaccaaattgccaacatggttttcgtaaagcacattctgttaccactcaacttcttgaagtggtggatgattttagttttgctttagaaaataaaaaatcaattgatgtaatttattttgatttagctaaagcattcgacacggttccacataaccggctaatatctaagctaaaaagcattggtataaataattccttattaaaatggattcaaaattacttagaaaaccgaaagtttttcgtcaaaatcgggtctgatttctctgacgaatatccctgtctcagtggtgtgccgcaaggctcaatattgggaccactgttatttcttatttacatttacgatttaccaaaattctgcgaaactgaaaatgttaaaattaaactatttgccgatgatcttaaggcctatcatgttctttcaaatatttccttttctccactccaaaattttattaacaaatttaatcgatactgtaaattaaacggccttaaaatcgcttcaaataaatgtttaactttacatttaggacacaaaaaccaaaaaataaattattttattgatgactttcaaattcctaaaaatcccggaaacgaaccagtcagagaccttggcatttattttactaatgatttgaaatgggcacaacatattgacattatctcgaaaaaagcattacgatctgctttcgctatactaaagtcaatcaaaactcgtgatacgaaaatacttgtaaatttgtttaatatttattgcagaccaattttagaattcggatctccaattttcaatccttatttaaaaaaggatatagaaaaattggagaatgttcaaaaaacttttttgagagtaatatttagacgtaacaattatactgttgatttacctaattatgctgaattgttaaacatttatgatcaaaagtcgcttgagagtcgtaggttaaaaatagacttaaaactttttcatgaaataattttaggtaaaataaatttacaaaataatgaatccttttctttttccaaaacccctgtaaaaaatgaattcattataagaacagcttattgctcaaccaatgttagatacaactcgttctttattcgaacctctcgtctctatagacttttacctaaagagacgagattactaaatccaaatgagtttgccaaacttcttgaaagatctgatcttaatttgttgatttctttgccaccccaactccaaaagtgaccaattgattgttttgatattattatttcattatttctttatttttcggcgtcacgcttttgcgtataaatgattgattgattgattgatagttaaatttgattaatttttttttaaattaatatttttaagttatttgaattaagcccgttcttttaattgttttactttcacaacatttgacgccacatatatcatcattttgacaaaaattgcctaaggacaaaacgccaaaaaaccccactaatttaaaaattttgccgagattttcccttgtaaaaatggaagagccgatctcgagttagaaaatatactttcaaaaaacaaaatagaattcgatagatggggtcaaaaaactagcctaggcaaaatttcaagaaaatctgacccgaggaaaatttttttgaccctagtgaaaatttcaataaatttctatcatttttaagctaaaaatggtcttgacgcgcaaaaaaagcgaaaatttaaagagtatgagcaattctggtgtagacgcaagacgaaaacggaaggaatggcgccgggatctgggtcgcagtgttggttcaacaccaaaaagtggcgaaattttgataaaaatttcatttcaattaaaaatcaaatttttacaggtccacgacaaaccacaaaagctccatcaacaaccggagagggaacatcgaccgagacaatgccatcgacttcgaatgccgagccccgtaagtgcaaaaatcacaatttttgagataattttcattttaaggccaacggccaagtccacggccactttcaacaacgccgatcaggcgtcatgtccgcacgcggccaacaactaccgaccaaacaaccggcaccgattttcgagcaacagtccagtcaacccaaacggttttagaaaccgccgatggtgccacccagacagaaacaggtaaaatcagtgatcagattttctaataaattttatcccccataatttcattttcagagcaagggccaattcaaaggctgtgcacggagctgaacaaggcgaaacgcagaattgggacgctggaacgacagctgcagaagaaaactgaagaggtgaacctgctcaaaaagcgaccagcagtggaaaacaagggcaaactcaagagggtcagttcattggacgatttgtcaagacgaagccgcacaaaacgtgctaaggaaatagcgcggaacctcagccatctcttccgacccggtcgattacttcctaattcttatttttataatatgtttgattagatttgatcagttggga

SEQ ID NO: 76437 - DNA, 2073 bp, Heterodera glycines
accatttctgaggtaaaccattcattatgattggtgagagggttgtcgccgctggcgactgaacgcgtagaaattggaggacagcccggaggaccgctcggaggaaagaaataaggaagtccagaagaggaccggaagaacattctcgaatgttccctcgtgactctcatctttgcatttccataatattatttcgtcctttgattgtgcgctattccgacaaataaactacttgtctaagaagttttttgttccgaaggtgttcctttttctctacggtctcgacattccaggaactcagagttccatgtttgcagttgtctaaactattgtcccgaagtccaccaggacagtccaactaagtctaaaggggctgtccattccacaagtcccattccaagagcggaaaccacgtcaagcgtagccagacagtgcactatttcctttctttttctcaccccttccctttcccacaaacaatgctgctgtacagctagcgcacggctgcttactgtctgcccttccacccgccgcagcctcacgtagacagataagtacactatttcttccttctctctagtggctatgcggaagaatccgggaagaatctgcctgctggctacgctttgaaaaatttcgacccaaaagggggacccaaacccgactagtaccggtgagagcgattctctaccactaattccttcagattaaaattgtctcacaaaaatactacaagttggctaatgttgattaaaaaaaattcaaactttggccccaaaacggaaaagtaccgaatttttaactaaaaacaacgtgaaaaatgaacttgcgctttttaagtgccgaggggcaaagggaaggatgggaaactcataggggggagaggggggggggcactccctaagagcgcaaatgaccaactcgaaatggcatttaaaaagatggaaatcacagagatatgaaggaaaacataaaaatcatctccatatttcgcgattttattttttgtttccatattttggtacccctatttattaattataatgcatccctatgagttcaaattggacgcgatactcggaaaatcggagttacccattgagaaaatagaaaatcacgcgtggaatccggaggaccggtcgttgaatttgtacgtgacgtgctgacgatgcaccgacatccggtggcccaaagcacagacggaatgcgggaaaaagtgagggagggacaaagggacaaaaacgccggggaagaaacagtcattttgatggataattagttaactaatagttaattaaatattaatgggaaatgaaacggaaaccaaaaaagggaaagtggggatcgaaccattaatagcggtcactttcaaattggtgcctttgtaccctctcggctctgccaatgctttcgtctcttaaggttggctacacgcgcggcttccacgtctggcagctgaattggccggtcaaccaacgcggcacccacgcggtcgtcggcgtggccaccaaagacgcgccgctgcacgccccgggctatgtgtcactgattggggcggacgcggagggcttcggctggaacattggtgggcaaattgcgcaatttgtgccacaaaaacgctgaaaatgccaattccgtcgccagtggagaacaaatgctaccacgacgcacagaacacaaagccatggtccttcccttatgagcagccattcgtcgcgccggagaagcttttctgcgtgttggacatggacgagggccaattggccttcgccaccgactccaaatatttgggcgtcgccttccgcggcctcaaaggcaaaaaactgtacccggccgtcagtgcggtgtggggacactgcgaaatcactctcagatatttgggcggattggaccgtaagtccacaaggattaaatttattggcaaaaaatacaatttaaatctttttagcagaaccacgacagttgatggatatctgtcggagatcgatacgactaagtgttggaaaagcaagaatcgaacgcatttctgagcttaacctaccaccaagccttagacattacctcttgtacaaa

SEQ ID NO: 76438 - DNA, 1031 bp, Heterodera glycines
atgggaaatggatcgaatttgaatgaattgacttccgtcgtcagtgttgagaatgagacaattaccaatttggaggaagaagcggatttaattatcaaagcttttggcgctgactttgaagaaaagaacgcgagacaatgcccgggctgcggagtaaaaaaaacgaatcgaacgagggaataccatttttgtaaaatcccttcccattgcaggaaatctacgcgcagaaaattggctgtaactatgtacgctgtcccaatttgcaatgcaacacgtggttctgttggggttgcggcaaggacgacatcagctggatgcattttctgggtgaacggagtcactcatcgatttggaaataattccgactgcccaattttagtaaaaagatgcaagcccggctacgaggatatcctgaaggccctctatccgttgaagttcttcgtgatgatgggagctattaccactttgttcatcactccgtcgatgttcctcattctttatttgagtttcatccgaacattccctcatttcccctccaatttctcctcttttaggtgtttctcccgttgagtgtcaattttggagtgccggcatatttcgccaaacgcacacagataaactccgttttagtcgtaataggccatttattccaccccttaatcattgttcactcactctcattgtcagaagatctgtctgttcgtcgttctcctcccaatcggttccgctttgtccgttctctcgctgtttccaatcactttcatttggctcttttatttggccctttctttcgtcaaactcattcccattgttggccaggtaatattggctctctctctcctctctctttctttctattcccttttcagatttcgatgctcttcgagttcgccgaatacatcaccagcttcttcggctacggggattggttcggttcctacaaacgcgccgaggaaggccgacgtgcggagagagcgcggaacagactgcaccgccttgaacaacgcaagcgacggattaaaacaccataa

SEQ ID NO: 76439 - DNA, 1741 bp, Heterodera glycines
  unsure (1)..(1741): unsure at all n locations
tataaattaatttataatttacacttaattaacgaaaaccctctaaggagnaannaaatnntaannnnngnagagaaaccttaaagggaggnaatgggatgggctttctgatggaaccatgtgtgaacacggagctggtcatcaacagcaacaaatttcatggcatccaaaatgtagctttgctggtccgaaatgcacggtacaaacattttttatttaatgcgtcatactgtaatttttctaattttttttccaatttgaatacggtagataaccctaggcatcgatatttctcaaaatttctttgtttcatatagggcctctattgttgaaatgactaagaaatattgattaaaattatcaaaaagtatggtatatgggacgaaggttacagtatcacaatttttttacctttcaaaattattaattttgtctaattaatttattaacaagcagatggcctcatttgtccgcgctgccggctcgtgtacaaatagcaaaaaatgacatcaaaatgaacactgcgcaattcattgtttccattggtcttaatgaggatgcgccggaacaatcattagtgttcaatcaacaaaatgaagcaattaaattttaaccttgttatttaaattattatataaaaaagttaaaattattgaaaatttaaatctttattttttccctttttcactaattgcttaaatgaattatttattaaaaattattatttttttaaaattttttctaaataatctatgtatgtttaatgaattatttttattattctaaatttcctttcattaattaattttatttaaaatttaaatcttattaattttctttcactattttttcctttatctaaatgaattatttaatttaaaaaaagtaaattattaagaatgtttaatttttcttttttttcggtgcgcggcaacacggtgctgaacccgttcccattcttgaagccacgttcaacaccatatgcagcgttggtggtctcgtccagcaatgtgctaatccggcacaactgttttcgcaatcaaaatgccgattttgaaattggtgagaaaaaaaagtcttatatcaatttttattttttttttattttattattgctcaacctgatcggggtcaaaaaaaatggatttcctgcatccaggtcccccccccccattcatggtactaaaaaaggaaaatttttggaaaaaattatcattgatttgctcaatgtgatcaaattttacatttcattgttaatatcctttttttaattgtctaaaaaatttcaaaaattactttaaattacaaaccagagcagatagattttcgaacattaaattttattggatatttttctaatttttgctgctaatatatgaaactatttaggtgtattgaatgatgcctaagaattaaaaatttcgttgattttgagtaaagtattttctattagactttttctacaaaagtggatattttttgtacccccccccccctccggaaaaattgctaaaataagattttttttaattcataagtttcaaatttctctaatataaaatacaatttcgtaatatttaattaggaacagaactgatggaacacgcgaaacgaattgatgcgcgagaaaacaattggggcgatccgcaggcccacaattttatgcaccgaatttttgaccaattcaaccgttactcattggccaccattgaggcaacaaatttccaattaaaattaaata

SEQ ID NO: 76440 - DNA, 2451 bp, Heterodera glycines
aggaaaaatattatttttattaagattaatccttatgctgctgtttgtaatcaacgtgctccagcgcttacttttctgcaacaattctttcgacaatttcggcatcaaaattccccatttttggtcggtggcactgtatttgaaaacaatgacttgccggctggaaaatatatcgtacaggtccttccttgtttgatgtactgtattattaaaagtaattatttttatcccttaaatacatgtcataattattgaaaaatactatcatttcggcatttcatagatttattattttttataactatagtatattcatacagtacagtaatgcctgtagccattcccccgaaatgaaatttaagaaaaaaaaatgggcattttttgaaattgcaaaaaatttttcccggcggcgcctaacggcaccgccagccagacccatcatgttttttgaaatttgaccccaaaaattgcaaaaattggtcatttttggcgaaaagcggctataccttttatatggcgtgttgaaattgtgaaaatttgcaaaaaaaaaaattcaggacgatttgcacattacacctggcgcaaagctgaccctagcgccgggcacaaccttggaattcatgagtggcatcggaatgcttgtccaggtagaattttttttttgaaattttcatttaaaattttaaaaattttccagggtgaattgttgcgcaatgatatttcaagtgccggtccattcttgccaattgtgttcacaggcaaagcattgggccgaaatctgccgaagcttgaacatgttcgacttgtggacgaatttggcgacgaaaatgtgttggcagggcgtctagaagtgcggcaaataatttccattttgaatttgtgccaatttaatggaatttctatttttttttaattgaaagcgaaatgaaattttggacacttttttaataaaagaatcaactaagccaatttttaagcataaaaaaatttctgaaaaaatatgaaaaattttgaaattgttgttttcgatttctttttataaattaattaacatgtaaatttttgtttttatataaaaattattttaaaattttattgttttgttagagaaaataaaattttggcactttttttacgattaagcgaaattttaattaaaaaaaattcttaaaaacatatgataaacttataaatttttcttttccattcttttataaatttgttggcgttgtaaatttttttttctatttttataaattattattttgaaatttttatcgttttgttcaaaaaatccctaagtaaattttgattttgattttttaaattttggacggattggataattaattatatttaattttaaaaaattgctaacaatttccacaaggttcgtcttgagcccgatggacagtggggtacggtatgtaaccgttcctggacggcacaccatgcgcagctcgtgtgcaatcagcttggccttaccatggacccgcaacactttgaaaattggcgcattttcccgtcgcatggccaattcccaattgtgatggacaacattcgttgtgaagagcgtgaatgggacatcaccaagtgtgtaaagaataataatgatgggataattaaaataataataaaatatattttaaaaatttagtaattatttaaaaaggtttaattaggtctaattaggtcttttaagatttttcaaattttggctttcgtttttatttgcgcaaaaatagtctatttggaaaatttcttttatttcttcgatttttatgaaaatttattgcccgatcagtgtgttgatgctcccctacatttttttaaatacccatccatcccggacaaattttttgtacgggaatttccaccctacgaaccccgacttttctctacccctagggttggggataggcgtcgcccaggaaataaaaatttttgtgaaaattgtcaacaattttattgtttaaagcgaattaaaaaaaaacaagtaattttattggcaggcatttcaaaatattttttgaaaaactaaaaaattcagaatttttcttaagaattttcataataattatgcatttatgaaatggaaaaaatcaaatttaagttttgtgaatacagcaaaaacttatccaaaaataaaaaaaaattaattaataaaaattttcaaaaaaataattggaattttttttatttttcattaaaagaatttgatggagagttcaggtgccgtcatgacggagcgttgcacaatgtgcgttcgtcatgccgcccaacagaagtggtcgggttacggtgtgccccaccgtattgggccggtgtacggtactcattgttggccaacccacccacaatgaccggtcaaccgacaatgagcaactgggtactggaaaaggctggcctgtttgacttcaggacatcaacattcagtccagcattgcaggt

SEQ ID NO: 76441 - DNA, 1134 bp, Heterodera glycines
atgaaaattaaaatatttttattcattttatttcttaaaaatttaaataaaatttatgctggtggaataaaggaagaaaaaagctttgacgaaatatttggccaaagatgggaagaaaacgaggaggaaaatttagagaatgaaactgatcaaaatggaagaattgaacaaatggatggccaaaatgaggcaaaaaatgatcaaatttttgatgaacattttgaagtgaaagaaaaggatagtgaagaaatgtccacaaatggtgaagaattggaacaaatgtcaagaaatattgaagaaatttgtgatcaaaatcgaattttcaatgaaaaacagaagagagaaattgttgaaaaatttcataaaattaaagagaaaattatgcaaatggaaaagaaatattcaagaaaagaatggaaaaaaatagaaagaaaaattgcaaaaaaattgggtgaaaatcggaagaaaatttacaaatggaaaagagaatttggaatgatgaagaacaaaaattattcagttgaagaaaaaagaataatgttaaagcaatttgatcaaatatatggcaaattaaaaacgaaattaaatggaaaattggaaggaaaaaggacaaaatgccaaaaaataatagcaaaacatttgggcacaaatatcaaaacaattttttattggaagaaacaattaaaagatggaaaattgattaaaaatcaaaataaagatgagcaaaaaagagaaattgttgaaaaatattttaaaataaaaattaaatttatgcaaaatggaaaacattcacgaaaagaatgggaagaatttagagcagaaattaaacaaaattttcgtgtggcttatacggcaattgaaaaatgggccgagaaattaaagataaatcaaaacatttcaaaaagtgaattttaaataatgttttaaaaaatttttgttttttttcaatttacagagcgaaacatgttatcaattgctgaaaaaatggaaaagattaaaaaatattatcaaatcaaaaaacagaatccaaatctatccgatattaaaattgctgatattttaaacattccaacaagttcattacgcaaatacaaagctgaatttggcattaaaccaaaaaacaaattgctataa

SEQ ID NO: 76442 - DNA, 1220 bp, Heterodera glycines
atgagtaaatatggcaaaaaaaagtaaatttttagagaaaaattaattaattaaattcaataaaggcaatttttaaccaaatatttttatcaataaaaaataattaaattttgggaccaattttttagaaaatcttttcattcttaagggagtttttttcaattttcaagtagaatttgctgattgtgagtgaagttatgcagtaaatccgaataaattgaagaataaaaccaattataaaaagatttatattcattttaatgattttttattcagaaatctgaaaattaaaataatatttttaatattaattttcataaatgcaattggtaacatttatgctagaaagataaacgatgaaaaaaactttgatgaaatatttggccaaaaatgggacgaaaaattggaggaaaacggagagaatgaaactgatcaaaatgtaataattggacaaacggatggccaaaatgaggcaaattatggtgaaaatatttctcgatttaatcaaatttttgatggaaatttggaaatgaaggaagaaattgcaacaatttatgattcattggaacaaatgcatttttcaaatgcaattgacaaaacgaaacgagaaattatcgaaaaatttaataaaattaaagagaaaattatgcaaatggaaaagaaatattcaagaaaagaatggacaaaaattgaatgaaaaattgcaaaaaaattgggtacaaatcaaacgaaaatttacaaatgtaaatcaaaaacagatatcggatgatgaaaagcgtaaaatattaaagcaatttgatcaaatatatggcagattaaaaatgaaattcaatgaaaaattggagggaaaaagagaaaaatggaaaaagcaaaaaactgatgagcaaaaaagagaaactgttggaaaatatttaaaaacaaaaaatgaatttatgcaaaatgggaaaaagcttttcgagaacttttcaatcgtgtcgccaaatccaaaatcagtgactacagatggcaaacagatcggctgtactccaagaagcttcgagaaggcggcgttctcaccaaggaattatgtcttgaacgtgttgaggttggacgacggccggtgcagcaccagcaaccgcagctgagttattgaagtgacataaacataatgacacataattcaaaacgcatctcccgataagggtagaagaggaatattatagatatatgattgcacttta

SEQ ID NO: 76443 - DNA, 1252 bp, Heterodera glycines
atgaaatatttggcctgggacgaaaaatcggaggaaaatggagggaatgaaactgatcaaaatggaacaattggacaaaaggatggccaaaatgtgacaaaaaatgatcaaatttttgatgaaaatttggaaatgaaggaagaaagtgcaagaaattgtgatcaattggaaaaatgcatttttcaaatgcaattgacaaaaagaaaagagaaattgtgaaaaaatttcatagaattaaagagaaaattaagcaaatgggaaagaaatattcaaagaaagaattgcaaaaaattgaaagaaaaattgcaaaaaaattgggagtaaatcaaaggaaaatttacaaatggaaaagagaatttggaatgatgaagaaaaaaaatcattcagttgaaaaaaaaataataatgttaaagcaatttgatcaaatatatgcaaaattaaaaacgaaatttaatgaaaaattggaagaaaaaagagaaaaatgcaaaaaaataatagcaacacatttgggcataaatatcaaaactatttataaatggaagaaagaattaaaaaatgggaaatcgttgaaaaatcaaaaaactgatgatgaaaaaagagaaattattgaaaaatattttaaaataaaaaatgaatttttgcaaattgggaaacattcacgaaaggaatgggaagaatttcatgaaaaaattaaacaaatgtttggaatttattttagaacaattgaaagatgggcaaaaaaaataaaaaatcaatcaaaatgtttcaaaaggtgaatttaaagatttattaacgtattttttttaatttacagagagaaaaatgttatcaattgatgaaaaaatggaagtgattaaacaatattatcaaatcaaagaacaaaatccaaaattcaaagaatacgaaattgccgcaaaattgggaattccaatgagctcattagacaaatacaaaaccaaatatggcaatgaatccaaaaacaaattgctataatgaggacaattattattattatcccaagaagattaaatgaaaaattacaatgaaaaaaatttgaaactttcaatttttttcttgagaatttgtttaaatttgagtttgtgataaaagtttaatctctttttttcatctgtttacaaaaatattttaatcattaaaagcgtcgaatggtctaatgttttaggtgattaagtttaaaattatattaaatgttcatattattttaatcttgaaaaattgacaaaatatgtaa

SEQ ID NO: 76444 - DNA, 226 bp, Heterodera glycines
atggtgaagaaactgcgtggaacgatgatgccaaccatgaacaaacacaaagctgttgtagtagatgtagaaaaaaaaactgtggtatcatcacgctattattgttgtgtaaaaaacgatccgtttttacctcttttcgggaaaaaactggaaaaaattcacaaaaaaaatctcacattgtgcacccttttctatcatttgtggagtaaagaattttcgggaaaga

SEQ ID NO: 76445 - DNA, 4060 bp, Heterodera glycines
agcagctggtgtacgatagcaaattgccagaattacggctaattgacggtcccacgggtcaggcaaggccgtctgcaggcaaatttctttaatattttttttcaaaaaataatttatgaaatttaataaaagttcgttttcaattaaaaatgttttttttataaaaaaaaacattgagttaaaaataaaaaatacgaggtttacattttaaagccatttaaaataattgtctaattgagctgaaattttacaaaaaaaaagacttttgatcaaaaataaaaaaagcgtatttttcagaattttttcattgtcatcaagatttgatcaatgttggaattttttgaaattaactatgaatgttacagtctaaaaaaactaataaaaaaattttcgtttaccactaaaatgattcttaaatgattttttcatctttttgttccaaaaaattaaaaattgtaattaagtaacaaaaaaaaaattaaatttttaatttcgtaacgcctttttatcatttaaacttaattttaaaaatgcgtaatacattttttgaaaattttttttttgattagattcgctttcgggaccgttggcgttccgtctgtacccaaatgacaaattggaccagcattgacacgggcaccgcgtgccgtaccatgggctatgatgacggcgcattttggcgcttttttcggcgcaacaacgacacttacccatttgaaatgccggcgcccaaatgtacacaacgccaaagtgggaaaattaaaaaattttaatgccaaatttaattttatttattttttgaaatttaagactctctgtggaactgtccaggctttgaggacaaagaacagattccgttgtccgaaaatttgtgccaaggtgaggacgacattggcatttattgttggggaaggccaactttcactggatgggctcgccattggaaaggtaaaatagaaaaaatgggttagaatttaatttaaattaattaattttatattattggatgggtgcattaagttcaatttcaattaaaagcaataatttatattattagatgggtgcattaattcattaatttaagtttaattaaaactattaatttaattgagtgagtttaatttggtataaattttttttttactttttaattgattgaattatcaattttttatttacatattttgtcaatttttcaagattaaaataatatgaacatttaatataattttaaacttaatcacctaaaacattagaccattcgacgcttttaatgattaaaatatttttgtaaacagatgaaaaaaagagattaaacttttatcacaaactcaaatttaaacaaattctcaagaaaaaaattgaaagtttcaaatttttttcattgtaatttttcatttaatcttcttgggataataataataattgtcctcattatagcaatttgtttttggattcattgccatatttggttttgtatttgtctaatgagctcattggaattcccaattttgcggcaatttcgtattctttgaattttggattttgttctttgatttgataatattgtttaatcacttccattttttcatcaattgataacatttttctctctgtaaattaaaaaaaatacgttaataaatctttaaattcaccttttgaaacattttgattgattttttattttttttgcccatctttcaattgttctaaaataaattccaaacatttgtttaattttttcatgaaattcttcccattcctttcgtgaatgtttcccaatttgcaaaaattcattttttattttaaaatatttttcaataatttctcttttttcatcatcagttttttgatttttcaacgatttcccattttttaattctttcttccatttataaatagttttgatatttatgcccaaatgtgttgctattatttttttgcatttttctcttttttcttccaatttttcattaaatttcgtttttaattttgcatatatttgatcaaattgctttaacattattatttttttttcaactgaatgattttttttcttcatcattccaaattctcttttccatttgtaaattttcctttgatttactcccaatttttttgcaatttttctttcaattttttgcaattctttctttgaatatttctttcccatttgcttaattttctctttaattctatgaaattttttcacaatttctcttttctttttgtcaattgcatttgaaaaatgcatttttccaattgatcacaatttcttgcactttcttccttcatttccaaattttcatcaaaaatttgatcattttttgtcacattttggccatccttttgtccaattgttccattttgatcagtttcattccctccattttcctccgatttttcgtcccaggccaaatatttcatcaaagcttttttcttcgtttatctttctcgtataaatattaaaaattgcatttatgaaaattaatattgaaaataatattttaattttcatatttctgaataaaattaataaaaaaattctttttctagttggttttattctcaaatttttgctaattatttaagcaaattctacttatttttttataatgatgtttcaaaattctacttagggctttcttgtaatcatactttgatgaaaatccaaggaaatcaatttattttttaaggttttttgtaattataaattatattcattttatattaattttcatatttctgaataaaaccattaaatttggaaatagaaagagaaacttcaacaaatagtgatcaaattgaacaattgccaacaaataattggacttaattctgatcatttttaaaagcaattgatcaaaagaaaagaaattgtggaaaaaatttaacaaaattaaggaaagaattaagcaaatggaaatgacattttcaaaaaaagaatggactaaaattgaaataaaaattgcacaaaaattcgcggctaaaaatttttgaatggaacagtgaatttgtaatgaataataaatattcggaagaggaaaaacttcaaatattaaaacaattagatcaattatatgacaaaataaaaattaaattaaatgaaaaattggaatgaaaagtagaaaaatgtcaaaaaatattagcaaaacatttgggcattaatttaacaagtatttatttataaatggaagaaacaattaaaaaatgggaattctgtgaaacatcgaaaaattaatgataaaaaactaaaattgttgaaaaatatcttaaaaaaatgaatttatgcaaaatgggaaacattcacgaaaagaatggaaagaatttagagcatattctttatttcaaaataccaatataacaaaataaatactttttttctggattcgaaactttttaaatcgtagcaattataaataaagtcaaaaattcaaaagtttaaaaattttaactttatagactatcaaaaaacaatttaaactcaaaaaaataatccctttaaaatggaaatttaaaaaaatgttaccaatcatttcgtcactgtttttttttaattggctaatttcaataaaatcatctttatgaaagcattaattggtctaaaattttccaaaaattatttctgggtaagagtaccaccggtgtagccccttttccaaaaatttttttgagatttaaaaagtcgaaaaatgagtttataagctttttgagctcgctgatcacgaatttgactgttgtcctaaatgatcttgctctgagatatcgatggggatttgctgctgctgctgttttctgcataaattcagcaaaaaaatttgacgcaaattgttttctttcccgaaaattctttactccacaaatgatagaaaagggtgcacaatgtgagattttttttgtgaattttttccagttttttcccgaaaagaggtaaaaacggatcgttttttacacaacaataatagcgtgatgataccacagtttttttttctacatctactacaacagctttgtgtttgttcatggttggcatcatcgttccacgcagtttcttcaccat

SEQ ID NO: 76446 - DNA, 807 bp, Heterodera glycines
atgggtaagtgtcgttgttgcgccgaaaaaagcgccaaaatgcgccgtcatcatagcccatggtacggcacgcggtgcccgtgtcaatgctggtccaatttgtcatttgggtacagacggaacgccaacggtcccgaaagcgaatctaatcaaaaaaaaaattttcaaaaaatgtattacgcatttttaaaattaagtttaaatgataaaaaggcgttacgaaattaaaaatttaattttttttttgttacttaattacaatttttaattttttggaacaaaaagatgaaaaaatcatttaagaatcattttagtggtaaacgaaaatttttttattagtttttttagactgtaacattcatagttaatttcaaaaaattccaacattgatcaaatcttgatgacaatgaaaaaattctgaaaaatacgctttttttatttttgatcaaaagtctttttttttgtaaaatttcagctcaattagacaattattttaaatggctttaaaatgtaaacctcgtattttttatttttaactcaatgtttttttttataaaaaaaacatttttaattgaaaacgaacttttattaaatttcataaattattttttgaaaaaaaatattaaagaaatttgcctgcagacggccttgcctgacccgtgggaccgtcaattagccgtaattctggcaatttgctatcgtacaccagctgctcttggagcgatatggtcgatttattgttgctgagataaaatcattatgtatttccgatttattacgcttatcaaaaacataattatgggcaaa

SEQ ID NO: 76447 - DNA, 118 bp, Heterodera glycines
atggaattaacgccagaatcagacaaaaacagtgaaaaagaaaaactcaaaaagtccaagttggcagaactccaatttgaggagttcggattcacttgcaatggactgaccaaaatgt

SEQ ID NO: 76448 - DNA, 546 bp, Heterodera glycines
atggatgaattttatgtggtactacgatccaattcacctggaccagggaactcgacctcaaaattcactgtcaggcttccacacacgcttgagctggacgcaaactggatggtggcactttcatcaattatatacccatattcatttccatccgtcggaattgatgatgacgacttcattagcattaaacttgtaaatccaaattttacattcgcggatgacaaacgttttgtggatattgaactaaaaataccgagcatgcaattctctagtgttggccatttaaggcaaacattaaatgacataatcaaggatgcatataaacaacggtttgggctctcaccacagaaggccgccggaacaacggttaaagcgaaacgccaaattgacgttacggaccttttttttcacgatcaccctggtgattattgggaaaaaattgaagagttggaaaaaaagttggctgaattaaaagaggagattgcgacgaaggagagggaacatggtgccaaaggtacagagcagaaaagaaaaaggaacttgaag

SEQ ID NO: 76449 - DNA, 599 bp, Heterodera glycines
atggtcaagcataacgggaagaacagcggtaagtgcttgtgagagagagagagaagaaaagaaagggagagagagaatgagaagagaggaaaagagagagagagagagagaaagatcagagtgagagagagaaagagagagagagtcaatcccgggttttcaactcgagaatttctcgacctttttaaaatttgcctattctcgactgagataagcaagcgaaattgagttgcacgattggttaaatgagctttgggccatgggtccaaatcagcctgcctgcaagttttaaaaaaatgtttctcgggcttttttgggccgctgatcacgtatttgacaatcaatagatttttttcatttaatttttcaaatatttttgtatatgttttttgattttattttagttgaattgaatcatatttttattctataataaatatatgttttgattggtttaatttcatttttttaggcttttgttctgtgtttggcaaaatgtcaattccaaatggatcatttttctattacgaggttactattctgcacaaacattatgagtaagttaatatttaataattaatttacattagttattctta

SEQ ID NO: 76450 - DNA, 547 bp, Heterodera glycines
atgctgtacgaattgtttgggattgtgcacagtttccgttcacatttgaacaaactctttttggagtgtgttttagttggcgaagtgccaaaaaattggagtgacaattccctttttgcattgtttggcgctgcattgaacggacagattgaaacccttaaaattctggtaattgcattcagttttagcttaaaaaataacaaaataatttattttattaagtcggaaagcaacgacgtaaatctgagaatgggccaactgaaaaccgctggaggcacaatcggtgattaaatacaatagcaagatctggacttgctggccggatccattcctaaatttttctctgaatttttttccaaaaaatataggtccagatcagtctgaaaacagaatttagacatgaaaaatctgtgttatttttcattgtccagctttgtctaattctgaagtcactttattggatataaattgtgtgtttagacggcgtctcattgctttggattgcatctgccgccggtcattttgaaattgtcaaatttttggtaaa

SEQ ID NO: 76451 - DNA, 822 bp, Heterodera glycines
ctcaacgcagcattagaagaggggtaccgagtaacagagcttttgcgtgtacttgagtacagtaaaagcgacaatgaattattccgcccgtacatgagcgaatttgttgtccaaaagctgcacgcttcgggatttgatcagaacatccgtgggaatcttgaagccgaggagcaatttattgcagaatgttgtgaacaattcggaatgaaaatttatcgcaacaaaatgatgccaaataagggaaagagagcccttgccaaattggcagtcaataatttgtgtatgttttttttaaatttttttcatctccccttaatttagggggtcgtttttccctacgcaactatagactctcccaaacgctcattaccgacgacccgtcggagttaggcaactacttggacaacaagaaaatcgatgtcacagggcttgacatgttgaccccggaccgaattttgatcagctaccaacagaaaaaagattgggttaggaacacccttgctcgaatgttgtcgtctcactttttaccacttctgcagctcggcttcatttgttaaaagcaatgcaaaaggtcgttcgaacacccggctgtgtccttttatatacaggtaagaataaaatttctatccaaaatatttgcaatttcagataccgattctttaatatatgctcacccaactggcaaaaaccctcttagtacagggccccatttgggtcagttcactgatgaattccccgaggttagtttaaaaatattaatttttctcttaaaaatatttttagcatgacatattggaatttgtgagcggcggctcaaagtaa

SEQ ID NO: 76452 - DNA, 528 bp, Heterodera glycines
atgcttcttactgagaaaatcgcccaaattttgaattgtcgtgtgtctgagctccgcgatcggcttaatcatccttcagattttgaacatgtcgttaaagcattgaaggggtgtcacgtacaaacaacatacaaggatcgaaacggtttcacaaagagctttgcgtttggtggcataacaccgcaaggagcatcaacaactatggcttacgggcgattgggaagacccttcaatgtgaatgtgacagcgcatttttacgttcgccaccgcattaaacttcgacacccattcctgcactgtgtaatcgagagatttcccgagggtcaggaggatcggttctacccgcttgagctatgcaaaattaatgctggacagattgaaccgggttggctaggacgtatttttactgaaaccggaagtgacaacaataacaacattaacacagacgaaaatgcaagcactgagacatcactaatatcaagcggacgccaagaatgtagccaaagcgacggttattctttatggtag

SEQ ID NO: 76453 - DNA, 494 bp, Heterodera glycines
atgccgactcctcctcatgacaacaaaatttacaaaaaatctgaatatttaaaaggtatttttgtctcattatttattaataatattcaaaaaattagtcgatgatgctgatgaagtggatacggacccctctcctgaagaagttgagaaatggacgcccgagcaagtgattgaatgggaccagcgtagttatggaaaaatgcctgccgaggaagagatttggcaagaattcctcgacaaaggagaagcgaatgtcagtgatatttatccattttaatgtttaaattaaaactttaggttctgcgtgagttctttggcggagagggggctcttaaagttgagaaaagtcttcgcgaatatgccaagaagaaagaacagcgagatgaaattctgatgcgaaagcggaaagaatatgaagaaaaaatggaaaacaacaaaggcgaaaattaaacactcctttgtattattattgttattgattcaaatttggatta

SEQ ID NO: 76454 - DNA, 435 bp, Heterodera glycines
atggccggattaattagtgaacttcaaggaaatgatggaagaaatggacaaaaaggtttggtctcgaatggaatcgaacccacgcctccacccacagtcgagggcaacgattaaccactgagctaacaaataagcgagcattttctactttccgcattatacctactcatagcttttttccttacatttatttcaggaaaatgcgagaaaatctcgagtttgagaagagtcgcataacattaaatatgtaatttttaaaaaaatgagactcacttgtgaaaatcaattgctttgccctcattcgctgcaattgtgcgcagcattgagtccacggcagcatttagcaacggagtgaactgagaagaaaaagccatcttccaatttaatttttgcactaattgcccccccctttattatgtgccgctctccaataaa

SEQ ID NO: 76455 - DNA, 1217 bp, Heterodera glycines
atgtcggcgaacttgtcaaacgattcggaattttgcacgggtacccatgcactgccacgcaattcattccaaatacggtgagggggcggccattcatttatagactaaaagcattcgttcgatcttaggacgtttcccaaccagaattatttgctaccacttcgaattgtctgcggattttccgataccatccgtcctccgcctccatctcccaagaatgcgaactgagtgcggtatataatttagttataaaacttaaaaatgggtaaggacctgcccattattgaaccaaaatttcctccataattctttaatagtcgaccaaatataataatctttatattattttgataaatattatatattatcctacaaaatttaaaaattggttttaaaaaagataaatataagcctggtccgctagtggccttgtggggtacaagactttttggtccgttttcggtcggtccgttagtgtcccattccgtaaaaataaattattttttgggcagacttctggggttggcattccttttgaaaaaaaatataattcaagacaaaatcgagcgcctattcgtcaccgctcacaaatttggattggaatgaagtggacccttcccttgtggcaacgtgcagcatcgacacgacctgcacagtttggaacattgaggtggcaaattagcactgggagtaattatgcaaatgcttttcctcccaagacgaatcagccgattgggcaggcgccgtccatcaaagggctgcaaaagactcagctgattgctcatgagaaacccgtgcatgacattgcattcacccgactggacaacggacgggaccaattcgccaccgccggtcgaattccttactttgcttaattttttaacttttctttccctttcaggcgccgatggaagcatccgacttttcggtttagtcgtaatttcggcaactttaactttggtctttgaagatttgcgggcacttcaacactcaaccattttgtacgaagatgccgaaaggagaatgctgaaccatctctcctggaataagcgggacccgacaaaattggcaacggttgcccaagagtctaaagaggtcaacggagaataagtgtcttcagcttcagaagtatgaaaatgttcaggtcgtcattctcgacgttcgggtaccgtgcagacctatggccaaatttggtaatcaccgagctgcaataaatg

SEQ ID NO: 76456 - DNA, 478 bp, Heterodera glycines
atgatgcgcgaggcctatgaccgggcggcatggattctgttggaaccgatcatgaaggtgtcctgcactgtgccaaagatgtttcatgtctgtgcacttttgcgagttttcttaacgttgttttccctttaaggaaaaggtggccggcactctcaccaaacggaatggcattatgacagggacaacgcaaagcgaagagttcgtcacatttgaatgtgaagtgagcacctcttcaaggctaaataacaaatatttggcattggctttgttatttacgttctttaaggccccgctgaatgatatgttcggatacagcaccgaactgagaacggaaacccaagggaaaggtgaattcacaatggaatacagtcgatatgcgccagtgccggaagcgacgcaggaaaggatagtgtacgagtggaaaatggagaatgggctgatagagccggagaaggagaagaaagagaggaaaagatag

SEQ ID NO: 76457 - DNA, 894 bp, Heterodera glycines
atgcgtcaaaaaacatatgtattggccaaagccattctagagagaaaggacattctctttgggtcaattgaaaatgtcgtcaagccgcaggcgatgaaggagaaggaggacgcctgggaaacagttcgtactgaaatgattgagcagggctttgtcaatttcgagcgaaagtcgtggcgcgatgtacgaaatcacgactggcaatacttaagacgttctgcggttgcaaaatacgaacacaatcagaaggcgggcgttgaaatgatccaatacaacgaggcatgtgccaagtttagaggacattcacaaagattagttggtgcaggtagacaaactcgtcttcgaaataatgggcaacgaagtgtcctccttcgacaacacaaacaacgattctgttttcttacacaattttccaaatgatgaaggacaacaaaatgaagtggccgacccgccgttctttccagccactaatgcattgcgaactccgaaattagaagaactgcagcaaatgaactccaacttaagccattccatttctgttggttcgtctcgcgacccaccggcacagacaaagggattttcggttgaaacaatcaaatttttggactttgcagaacaaaaaggtgggtacaacaaccatttaaaagttagtcttttttgacatgttttagcagtttttttcaaaaaaaaacgtcaaagattttctttaaatatatgaaaaaattttctaagatttttttctcttgaaaattttctaactttaaaagaatttcttttaaatttctgcggcgagattttgtcgcgtcccccacctgcgccgcctggtgtgcatctttttcgtaagagcgctaagaatccattggcgtgcggaatttttacagacattttttatta

SEQ ID NO: 76458 - DNA, 372 bp, Heterodera glycines
atgcgcaaattggacgacctgtccggcctgagtggtgaacaccaatccgacaatgcatgccgaagtgcaaaggatggcggccaacatgggcttactgagcgggatcattttggcatcgttcagcgaagtgatgacgccctcaagcatgccgaacatggagccaaggccgagcatcagcaacatcatgaagaacagaacggcccagaggggcgggaacggaaattggaggatcgcttctgtgaacaccacgaaggccaagcccgtcccttcagccgccttcaaaggaaaagcatcgaattgagggaaaatgaaaagcaaagcgaagaataccgacagacctgggcaatgatttggccgagttcgcacttttga

SEQ ID NO: 76459 - DNA, 1583 bp, Heterodera glycines
agcaatcacacaaaaagcacaaatgccccccattcatttgtgccaaactcatttcattctccgacaacactaattgccttaattaatgcccagggacatggctttgattctcaaagtgcacccgacgcttttccgcgacttggacgaccttcgcgcgaacgtttccatcgaagagtgagtccgaaattccctttgctcactttcgtactcatctccatcagattcgcctcttacatgcgttatgactttcgggagtccaaattccccgacatcattcatcatccgtcctatcaaaagtgcgaactcggccaaatcattgcccaggtctgtcggtattcttcgctttgcttttcattttccctcaattcgatgcttttcctttgaaggcggctgaagggacgggcttggccttcgtggtgttcacagaagcgatcctccaatttccgttcccgcccctctgggccgttctgttcttcatgatgttgctgatgctcggccttggctccatgttcggcatgcttgagggcgtcatcacttcgctgaacgatgccaaaatgatcccgctcagtaagcccatgttggccgccatcctttgcacttcggcatgcattgtcggattggtgttcaccactcaggccggacaggtcgtccaatttgcgcatttcgtcccccaacttccttttccctgttcagtattgggtgtctctgttcgaccaattcgccggttcttacgctttgatgtgtgtcgccttcttcgaaataatcgccgtcatttatgtgtacggctgtgatcgatttgtgcgcgacattcagtacatgaccgacgaaagtgtggggccgtattgggtgagaaatgaagcgaaatgaccagcaaaggcaccgcaacaaattcatgattggttaaccatttggggactctctcaatttggctttgcctcgggggacacttttcttgagaatgcccgcgggtgtttttgtggtccttgctcaattggcatggcttttgcttccaattagttagtgtaattctcgcacaaacgcttttccctgcagacaatcacttggcgcttcatctcccccgttattatggccgtcattttcgtcgcttcggtcttcaaatcgttctccgatgtgcccaaatactccgcctacgactcgaccaccgtttgtccccgcccccctccatttccccttttatttccctttttcctctcatttgtcagacccatcagcacaatgtcccctaccccacttgggctctgttcatcgcttttggcctcgtcgttacttcgatggcttctgtaccgttcatttggttcgtgcgcaaattcaaaatttggcgcgttgagcctgacattcccgtggtcagtccgtcgtccgtttcggcatctttttgctttgtttggcatttcttaaggcttccaaatgtctcggctccaccccatccaccacttatatgttgcgcagtgatttgtccttcaatcgaattatcgagtctcgtggctctgaactgcaaaatctcggcagaaatggccagcgcaacggctcagtgcctggaggcgcgggatcggcgccggtgtcgg

SEQ ID NO: 76460 - DNA, 1246 bp, Heterodera glycines
  unsure (1)..(1246): unsure at all n locations
atgtacgtgacggccaccttcccatacgtggtgatgactttgtttctgttccgttcgataatgctggacggagcaaccgccggacttcgttacatgatcactccgaatgtaagctgaaagtgccgagaatgacggggcaaaaatgggcaaaaacatcggaaagggaaaagggacaggaatttaatgagaccattttagcgaaaattggccatttggcaaagtgtttgaaacctttgcgtgctttggagagcatttgcccaattccgtcgggcaatgcatttgaaattactttcttaaatgaccaccacatctgactaaatttgttccacctctctttccttcactgatcactttggcgttctgcttttgtagcatttgtctttgccatttttgcattttccattgtttgactccctccgtctcaatttgtaatgccactttttgtcccgccaatgtccccaatattgccattaattactccccccccccctttcgtccgtttttccctttttttattttaattttcacttggaattttttgtttgtccatttgtccacttatcattttcccattgtttcgctttgtttcggctttatctcttctcctctctctctccctttgtctttgctttatttattccctcttcccttcccctttaaatttgcttatgccatattatttttattttttgttttcatgccaaagtggtggacaaaacaattgtttgggtcgggaatggcactcaaattttagcaatttaaattctttaaaccaattcgcaaacagttgtgccactcgacccgtcaaattcgccccttttttggacattttgcggatttttggccgggtccttccgagtccttcactgatccccaaaatctcttcagctttctcgtctttctgagcccgaagtttggctcgatgccgcaactcaaattttctactccatgggtctcggctttggaggtaaagttttatgtcgagaaaggcgcgaaggtcgggcaaaggaaaagtgtcaaagtgactgcggaagagaaggccaaatgtgaaatggcacggccaaaggcgggcgccatttccgcgcttaattttggggtccgaaggagtccggtcgattgagtccgtcgcccccgggcgcgggtgctttccccgccaaccaaactcttcctgcaggtctcatcgcttttgcctcgtacaatccgctgaagggcaacgtgaagaaggantgtgatcaagantgtcggc

SEQ ID NO: 76461 - DNA, 904 bp, Heterodera glycines
atgttctcaaaattctatttatcccccatggggggtaaatggagactgggtgattattttttaaactcctcagaaaggggggggggataattggagactgcggtattaatagagactgggctataattagagcatatacggtattatcaagctatatgcattgagattgtaaattaaaataagtattttaaattgcgttaatttttgaagacattaaatatttaatgaacttttatttttaaaaaattgatccatattagagttattatttttagatttattaaaaaatatttttttaaatattgacacaagtttttgctattttttacattattttggcatcaattaatataaaaattgaaaaggtaaatctgtatttaaatattaatttcttattttaatatatataattttaagcgtcatatggttttaataaaatatggattactattttaattaattttatttataaatatgacgaaatactctgtcaacattcatacttttttggtatgttaatataaagtttgtttgacttgcaatattcaatatgataaaaattaatggatcataaaatatattttttacttttttaaacaaacaaattaattcgaaaattttttgtttctttgcttttttgttacaggattcgaaattgggtctaatagagatagaccgtaattagtgacccttaaaataacgtgcagaacttttatgatttattacaaaaaacgcaacccaaaactttgagtatttcattttgtacaattatttttttggtactgaagtgtatattttagtgaaattgatttgtccacacaatactcgaataacttcgattcaatttcatcgattaatttctaaaaactcatctgatctttcgaatgatacaaaaatttgttaa

SEQ ID NO: 76462 - DNA, 215 bp, Heterodera glycines
atggaaagaaaacggaagaggaaaaggaagaggaaaagaaaaacggaagaggaaaagggaagaggaaaagttaacggaagaggaaaaggaagaggaaccgccggggaggcgaaattcagccccaagggatgtgaccagcggaagagtcagctgagagcagcagcagcatgccaatgtgaaatgcattgcaaaatgaatcatatgcgaagtgggag

SEQ ID NO: 76463 - DNA, 155 bp, Heterodera glycines; identical to SEQ ID NO: 51421

SEQ ID NO: 76464 - DNA, 1226 bp, Heterodera glycines
atggaacaacaaaatatcacttattatccgactgaaattgtccacggacaaacgaacggcgattcgcaagaacagtttcacagagaacatgtgtttcattcggatgcaaatgttaattttcacgcgacaaacgatacaaattttggtggtggtggccgccgagcagcttttgtaagaaaacaatttggaaaaagaatacctatttgtctaatcaatcatttcattaaaatttgactcaatgtgacagaccatttaaacatgtattcccattaagaggccaagtcagttgcagcaacgtcaacaacacatcgtggttcaacaggggccgacttcaattccgcaacgggtcagcaccaccaacattccggcgagtactgcaggacaacagacggtgcatgtgcagttggtgccgcacaatcaacagggaaatagcccaatccccggccagcaacaacaacaacgccaacaaattgttgttcaacatgcacctacctcaatgccacaacggatcagcaccaccagcattccgacgagcactgcttctggtcaacaaacggtgcatttgcaattggtgcctcagcaagggaacagtccgattcctggccaacagcaacaacaacagcagcaacaacacattataatttcggcgcaacccgtccagaccaccaatacgaccacagaatccgcagatgggaatccgattgctgcgtttatggagtactttgtggaacaacagcaacagccgacgtgttccacgaatactttgcccaacgttcagaccattcagcagtacgggtcgccagtgttggactcgaagtgggctctatttgcatcattaatatacaagggggtctcaggccatgggccatatgatggacgattgattaagggggggggggggtgtctcgggatcaaatttcgatacggaggtgcgaattttacatcggtgtgaccattacgcacatcaaatcagaaataaaaaaagttacttcagtttttaacctataatttcttaaccgcaaattttggggaattttcggggaaaaaaaatcataaaaatttttttgttctatattttcaggtttaatttccgtggatctatttaatatattgtgtttaaggttcactttgaaaaataagctgttgagcggaatggacaaaagttcggagaaggctgaacgggaagcagtgaaacgggcacggcaagcagaggcagcacgacaacg

SEQ ID NO: 76465 - DNA, 1030 bp, Heterodera glycines
atggccagcattttcgggaagagaaaatatggaagaaggcgaatgaagagaggggaagaagaggtggaagaaatcggaagacggatgggagagggggaaggaggagaagaggagaaggaaggggaaaatgggagggaagaggaggggaggcaaatgggagagatagcgcaaagggagcacccgaaaaggaggggaggaaacagtaaaataccgaaatgtccacacgggttcagaccaatgaattaccccggaactcagtggacatttttggagtgtgtgatggatgaagaattgaagttgatgaagaggaggaagaagacaaagagaaggaagcaaaaggacaaaaggaggaggagtaagaggaagaaaagaagggggaacaaggaatgggaagatgaggtggaagaggaagaagcagaggagcagcaaaaaggaagcgacggcataataatcagcaaagtgaaggggacgcggaggacgagtggcagacagaaagggaggaagagacagtccagcacaaaagaaaaatcggcggtctgtcagtgttagagcattcagatcaggagtgggacgcgaccgcgattcgcggaatttttttccgcgattcgcgaccttggcaatttgaatccgcgaccgcgggattttttttttttgcggcgcgccgcggatttttttggcaaaactttataaagaaaattttttgtagttttaacaagctctattaacttagaaaaaatcaaaaaatttgactttttgctattttcatgttataagttttttgataattgtctaatcgcgaagcgatatcgcttctaaatatgttgagcatgaatgatctccttttcatctatttttttgcggatagcatatgctgagataagcgcaaaaaacacattttcttcgatcacttttccatttaagcgatttttagcaactattttcaactatttttgcttatgaaaatttttaacaactattttggcttgtgaaatttttaaaaaactttttttttaactatttctgtttttca

SEQ ID NO: 76466 - DNA, 1584 bp, Heterodera glycines
atgaaacgccccaatttcaacaatgctcttccaatgagtgagaaaaagcccaagcttcgtcgacggctcccggctgaattaaattgcgaattgatcagtttcgtgcctttggtctgcctatttgcaaatgtgaagcgggctccaattggccctgtttgctaccaattcgagtgtttccgtagtcggcgacaaaagaattttgaatatttggtaatttccctttttatttttcattttattaccaaaaatatttttagaagggtgttattgctttattcgatgtgatgtttgaggagaaaaggacaccgaagaagaagaaagtggggagactgcatctacaggaagaactgccgcatgacctcagccgaaatgagctcctgcactacctgtgctacggacgactgggaacgaatttgttcgagacttattttgtgatgagccaagcaacaaatgtaagcgaatttttaaatttttaatgacaacaaaatttttagtcaattgccattgggaatttgtttgggcttctgctcgattttgcaatgagctcaccaactccttggctcatgaaacgaccaatttgctgtggaattttctaccgtcaacatttgccgtggattctgcaacaaccgatgaacgtaatgctttctcatggcttttttccggaggtccgaagtgatggttttgaatttttttggctgttcaacccacacttgaaaaagtatgctgggtatgtcagaattctgcctgagcttagtcagcctgacaatttgcattttttccttagcattttctaagcattttacttgaccaatttattcatcattatcattacatacagatcggaatttgtcgatttttccattttctcaataaattgttgaaatgaatgaccttgtgacatatgatacacaaaaacaatacagtgtggggcacacgttgacactaattgggattgataggaacgaatattttttcttaggcccattggaaacttattcaggaatgatgacacaatgacagatggtattttttgggctaagctgtcataataaatcactggttcttccattcccttcgcataaattgcgcaccaatgagaccctcccttgtaatgtgggtcccggttcacaattagcgctgcgggatactgtagagtgaccggaggcggtaattgatcactggcgaagcagccccgaaagactcgtgcggtcccccggttttcgttcaagattaatgtgatttgcacgctgtccattcttcagccaaaaaatagagcaaagttgatggagaaccaggctgacaataagcatcaagtacaatgcaaacaccgcccagcaaatgacttgttgaaaaaaatttagtctttgcacaattggatgagtggcgtgagaccagctgacacttgctcttcaattaacttgtcactttttgggggagaggaggtggtggttgttgatgtgcttgttgtagacggaattgttttagttgttgtcgatgtaagcattgcctttcttcttatatattctgaatactcaggaatttcctctctacatgacactacgggaagagaaatccgaagaagga

SEQ ID NO: 76467 - DNA, 2169 bp, Heterodera glycines
ccaaaaatgctaaccatcgattctccaagccttgtgcagttttttctgcgtcctcctcataaacaaatttcacgtacacattgccaatctgtgaacaatggcaaattatttattgtgaacctgccaatttttaccatgtgttcgccaatgttttcacaaacctaaaagtaaaatttcgtaaattaagcgaaaattcgttcccaatttacgttcaattcttccacgggacctgaaaataaaaaattgtaatctcagaaaaaagcaattttgaattgccgaccataagtgcgttgaagttcggtgaatacttcctcgtaaaactcatcaaaatggcgctgctcaagctcatcctttttaccgacctctgaaaagttatgaaatttagtcacaaagaatcaatgaatgttttattaatagtccactagagtaaggaattttgaaatagtcggcatcaggaaaaaggtcgagatggggttaccaggaccaaatcccggattggccgggattgtcaggatcataggatcatcgaaaccgatcccgtctgggctcttcaagttaataatggaaaacggatggcgtaccgccggggacttcccggaaaagccatttttggggaaaacccagggactttgggccaataaaacgtgccaattttgcttggtttccccgttaccggaccgtcatcaaagcccggacctttcccactccaattttttcaaaattttggttccgaattgcttactgtcgaaagcgtccgcctgtgccgggttcacaatgggactctggtagaagtgcttgagcagcactgtatttgagaaggtaggtctgtggtgggcccgcaaacagttgtccccgtgtcgacaggcgccaatctaaaaaaaaccaaaaatttttttttggcattttaaaattgaaaaaatgttatcaaccttgaagaagaatgagcaattcactttgtccttttctgtgccgtaaatactggccaaatattcagctcctgacaggtcatcggtcgcatcataacgaggcatttttgcaaaaataggccaaggtaatcaacaaaaagcaaataagtgataaaattcaagaatacttaaacctcaccaaatctaacaaatgtaaatgatatatcattcgattcctcttggtatgtaatgcattaatccgaaagaatttttttgcggaaagcactttcatggacggtaaaaaaggaaaaaaagcggaaaaaaatcgttggcgtaaaaaacaaaacgccaatgcattcaaaacaatacaaagtcattgtcaacggaacgggccaactccgtctggccaactccgtgttttttacacaaactgacaaaagaaaaaaatgtaaaacaaaaacatttcatttttaacacaaaatcaattatgtatgcacggaattggaaagtgccgagaattcgctctaaaatggcggccgggtcggattccgagtccaacattgccaattttcacaaattctgcccagcaattgtcaaaatgtcatccaaatttgtttttttaggcggacgacaccgtggtgattgacattggcactggcaaagtgacggactacgtgaagtttgatgctggcaacatttgcatgatcactggtggacacaacattggtcgtgtgggcattgtcggacatcgcgagcgtcacccgggctcctttgacattgtgcacatcaaagactctgctggccatggccattcatttgccacacggtttgtttcttggggctggttttgcgtgtaaaacacatcctgaccaccaacacttttggtccctttttcggaaatttactcagactccgtaaattttggttttgattgttgcttatcttgaaaatgggcatcagttgtgcagccaaaccatgtgagacatggaaaattgggcggaaatgtctccgtttctgagtaatactcagtttttctagactataatccatctcttttaaagccggtatcagaatttgaatgagggaaaatgtttccgataatgagcaaaaaccgatcagtgataatcctctttttctgtccaggatgaccaacgttttcatcattggcaagggtgccactccgttgatcagtttgcccgcttccaagggcatccgtttgtccattgcggaggagcgtgaccgccgtcttgcgcagaagcagaaa

SEQ ID NO: 76468 - DNA, 831 bp, Heterodera glycines
gtgtggaattatttcaccgatctgttcgattattttccgttgactgcgttggtggacggccaaattttctgtcttcacggcggtctgtcgccgtccatcgactcgttggaccacattcgatcattggaacgtctccaggaagtgccacatgaaggtaattgttaattttctacatgaaacaccaccaaaacggggaacactccatttgtttacaaaacgatggtgacaattcattttgtttaggcccaatgtgcgacttgctgtggtccgacccggacgatcgtggcggttggggcatttcgccgcgtggtgccggttacacttttggccaagacatctccgagacgttcaaccatgccaacggcatttcgctaatctcgcgagcacatcagctcgtcatggaagtgcgtatttcgggggggggggggcatttaaaaaaacaaagttgctaaatggtgaaatattgggtaccaaaaaactacttttcatgaaaaaccacagtggtgggaattggtcgatccgaacgttaatttgagcaaatgtatcatgaaaaaacgcgtaattgctttcgactgtttcatattgacaaaatgcaaactgccgttacatttttaaatttattttatttgctccccgaagggctacaattggtgccatgaccgcaacgtggtcaccgtgttctcggcgcccaattattgctaccggtgcggcaaccaggcggccatggtggagctggacgacgagctcaactactccttcctgcagtttgacccggccccgcgtcggggcgagccgcacgtgacacgccgtacgcccgactatttcctctag

SEQ ID NO: 76469 - DNA, 1146 bp, Heterodera glycines
atggatttgtatttggatgatgtgcacgacgacaacggaattgtccagccaatgtggaatgattttgctcgtgaaatttggcccatttttgcgccaaacattcgccatttgaccgttcccgttggccatcatttggacgatttacgtcgtcttatttcgccgacaattctcaccgattgcattcaattggattcaatcgattccgattatttgttgctcgatgcaattgctgatgatgggccaaatgcgtattctgctggccaaattctgtccaaatggttacacattccgacaaaaaatgggcagccgaaacaatttcgtgatgattatacgtcagaaaccaatgaatgggtcaacaatttcaaaaaggtgtgccaatattttcataatatttggattaattggcatttgcttttcatttctcattttttaggcatttctccgtgccaccacttctgtcagttacataatccaattcaaaactcacacctcaattacgcagtttgaattggtgaacgaacggactaaagaaaagctgacattgaaggtgaaggcagaagacgatgatgaatatacatatattaattgcgtgttggagcggtgccaaattggagagacaattcaatgggaggacaaaaagacggacaatttgaacaaaatcgcttttgagctttatggaaattgcattgggtgagtggcaacagcttttgcttttatttgtctcgtcatatttaaatcgcacttcatttaggtcattgtcgccaccagaatcgggccaaattaacgtaaaaggtcctcttgaaatgaatcccgggcccagcggacagcgaaagaaaaagtgaaagaattattgggaaatgagaaatgatcaatcattatgaatggaaagtgatcggataattgctcctcacatttatttgtcgcttcgttcattcgaatgcatttaatttgactggatttttgtgtcttttacagcagaatgatgggttagaaaaaaggtgtcaggtgatttcgacactgaactatttcgcttactctttatgtctaattgagattttgacagtaaaggtaaagcgtattttttaaattggcagaaaattatgtacaatttctagagtcgctacttttagtgacgaaaaatcctga

SEQ ID NO: 76470 - DNA, 487 bp, Heterodera glycines
atggcacccgtcaaaaaaaagaaaaaactttcctccgcaaatcaccgcccaatttctgcaactgaaacaaatcatcagaagaaaccgttgggttcatttgtgacatttggaatacggcgaagtgttcgcgtggcaatgaaaacgaatcggattttgaagaaaatgtgaaaattttttgagttaaaaattatgaaatttcattttttaacaccgcgctaaacgctcaacttttgacaatttcagttgggtgtgcaacgacattttgatggatattttgcccctttttcgtcgtcgtcaactcggccaaaaaatggcactgatttcgccacgtttcaatgctttggtggacaaacattttgacggcaaaagcgagacaatttggagacaaatcagaattgccaagaatggaacaaaacttctatctgtagttacgaagagcaattcgttgcccatcaaaattcgctttaacaaccttcgaattgagtaa

SEQ ID NO: 76471 - DNA, 87 bp, Heterodera glycines
atgaaggaaggccaaaagccccgccagtcacgacacaagggacgactctcaaagaagacgcgcattgtgcgcgagcttgttcgcgag

SEQ ID NO: 76472 - DNA, 1101 bp, Heterodera glycines
ctgtccttttggccgatgagttacaattatttgttcaaaattgtcgttgtcggcgaccacaactgtggcaagtcgtgcattttgttgcgcttttccgagaattccttccgttctgaccacgtgagtacgctcggagtcgatttcaaattgaaaaccatcaaaattggacgggacaaaattcggttggaattgtggtgggttttactttgccttgcgtttttaattgtcagctttaagggacactgcaggtatttcaatgtgttaactctccgtttcatttgcatcaaaatgcttatcgttaggcatggaaaggtatcggaccatttacaattcgtattaccactcggcccacggagtgatgtgtgtgtacgacttggtcggttcattggcacaaattgtaatttaatgctaattactaaatggaatttagacaaacgaaaagtcatttcaaaatttggaaaattattggctaagacaagtgaaggaacacgcgccacaaaatgccgtcctccttatggtgggcaacaaagccgacttggactccgagcggaaggtggactttgaccgtgccgaaaagtaaacggaggaatttttatacatttttaggtatttttcggttttgtgtacacactaaaattttcaaaaatatgccaacaaaagatccactaagtttttttgatggcacaaaaggaataatttgctctaaaaaatctaaggtttcttgccattttaagggtaaactattccctgtgtgcgatcaaaaaaactttgtacatatttttaaatttagaggtgtatacacaaaaccgaaaagtacccatttttattgttaagtattacactccttttttagtttggcaaagaaaatcggcgtgtcaatttacgaagtgagcgcaaaaacgggcataaactgtgacgacgcattcgttgaacttgccactgtcatgagggacagacttttgaactcgggtaaggaactgccgaattggcatttcgaaggcatggagtcgatttgtttggcattttctgtcctccgttaagcattgaattccgattccgataagtctgaccatctctcctccgcatttcacatcgacggag

SEQ ID NO: 76473 - DNA, 2301 bp, Heterodera glycines
atgaggtgggttgattcgaactccttttgacctattgacttccctcctcccctatcagagcccaaaaattttgggaaattaacaaattcctgttgacttttttttaaattatgctcttcactaccttttacaacttaatccctttccaattgaaaaaacaaatattttttctgatttttttttgccacggtgaaaaaggtgtttttttcttctatatttcactccatttcaatattggaaaacttttttgcatctcaatttttttattgattcgccgaaaattatgcgaatttgcttccgattcccttgcgatatgcggaattgacttcccacctcccctggaatcacgtcacaaccgctaacccaaagacacgttttaactttagcttccgctgttcacttctctgttgaacacagtctgtgcttatgaccccgttgggtttggcatgccgtacaattatttgttgtttggtgactcccgtgaacctttggtggaagtcgcccttcagttgcttatcgtttgtctcgaccgcgactcgcagccgaactctgacgaagtgtccctttccccttaattcattttcacttcctttttagaacggttatgttgagaattactttgtcaattacttgtcgcgtattcaccgtgaagatgactttgagtttatgcttaaggtccaatctgaataattttgtcaaattattaatttcaatctttttctctttaggggttcacccgacttcttaacagtcagttgcaaacttcttatctgccgaactccacgaagaaggttgaactgcaccaggaactgcttgttttgctatggaaatgttgtgagtacaaccaggtcctttttacagttggctacaattttcactattttatcggattgttacagaaattcctttattatgtgctgaaaagcagcgatgtgcttgaacttctcgtcccaattttgttccatctcaatgattcgaggacggacccaagtcgggttttattttattcttctaagtacccttttaattgaatttttgttcttaagctcggattggtttgattcatatgggcgttttcctaattcttcttttgagtggtgaaagaaatttcggtgtccgattgaataaggcaagtcaaaattcgactgataaaacacgattgaaattatattaattactccatttttagcctttcacttcccgaggacttattgacgtgccaatttttaccggatctcatgccgatttgctgataattgttatttttaatcatgtttttatttattcaaaaatgttttaggttttccacaaattaatcaccagcggaaatcacaaattgcagtcacttttcgattgtcttcttacaattgtcgtgaatggtaaagttttcttttgcttttgcattattttcaattcgttttttcagtttctccttatctcaaatcgctatcgatggttactgctaataaattagtgcatttggttgaagcatttaggtccacccaatttgtcagttgtttttttacattcaaattttcctttagcactccttggttcattttctcaactccaacaaatcaccatttgattttctttttgcttgaattgttcaacaacatcatccaatatcagtttgacggtacttttttctacctttttcaaaatactttttttttacatttaggcaattcaaatttggtatatacaatcattcgaaaacgacaagtcttctaccaattggccaatttgagcagtgattccgtttcaattgcccagaatttgaagaaaggcaaaaaaggcgcgactttgaaggcgaatgaggacagtgaacaacagcaagccgtggaggaacagacaaagaaagaagaagaaacggagggacaaacagaacgggcgaaacagcaacaaattggtcggaaaggaataattaccaatgaaattgggctggaaataataacacattaattgtcagagctaaaatcgtcatcactggcacaaacgccggcaatcggcgcaatgacaacgatggaagaatcgttggaaagcaaacgaacgagcgaacaaaatcaaacacaacaggaagttgaacagctaaaacagctcgaaaatcgggaggagggagccaaaaatgggcaacagacgaacgaaactgttgccattgaggaggaatggacaccgacaagtgaatgggtggagtcgtggaagaagaagttgccactgcagacgatcatgcgagtcttgcagattttggtgccgcaagtggagaaaatttgcattgacaagtccgaaatgggattctaa

SEQ ID NO: 76474 - DNA, 793 bp, Heterodera glycines
atgggcgtcagcggaagagcgcacccatcgctggccaaaatgcgcgagaatttgatcaatggaaccatcgactttcaggaagtgccgatcatcgacatgaaccccgaggacattcgggttagggggggggagagacttccatagtttgtccctttcgcttttacattctttccacaggctgagctgaagagagtctacacgcagttgaggatgtacaagctgaagaacgcgtaccaggacaacccgcacatcagcaaacggaaaggcggcggtgccgtaaagaaaagcgccgcgggcgatgcgactgtaagcggaagactgtcaagcggcgcgggccttagcggtgcgggactaccgaagggcgtccgcggaacggagggctattgtgccgtaaaacgcaattccatcccccgtgaggcgacaccgaatgctgttacatcgccaaaggtgcaaagaaacaaatgaaaaagtagtgaccgtgccgtgccattttattcttggcgcattctttgaattaatcgccttcaaataaatataaattcgaaagcgttaacgttcgcatttggtcttctgtgaaggtgagcaggacttctcccaatttaagcaattgcatggcgctgatcgcccgcctccgctcgtttttatggacgaagacaaaagcggcggcgatttgacggtggagtcggcgcctcataatgtccacctgctgaccagcagattggcaaggggaccgcctaccatcgcaactccgccagtaacctcaatgggcacggactgttcaattcgagtctaa

SEQ ID NO: 76475 - DNA, 122 bp, Heterodera glycines
ggccccggaggcgttgggatgatgcaagcgattcgaacttaaagtgggcgaccgaagatgcatccttcgctgttttgttgttaccgttttttgtctttgtcaaaggataaaagttgttgaaa

SEQ ID NO: 76476 - DNA, 488 bp, Heterodera glycines
ggttttacattctccaggcttacgttccaacgtgggtcttctgctgaattattttttattccgcttttatttaagttatttgaccatcatcgtttcttgggtcggcttttgcatgggtctgtattttcttttttttgcaatttctctatttgtgcatttttattttttaaatcaattgtcattttagaaccgaaggcactcccggcacggacaacggtgtgtgccaattcccgcccccccccccccccttttgacatttcccttttctaaggtcggcgtttcctctctccttgcgcttactctgcaagtacgaaaatcaccagtcaaattgttaaactttgttgttctgttgctgttgtttcagttcggcaacattcacaaaaaccttccccgtgtttcttatgtgaaagcgatggatgtttggatgttgggatgcatttcctttgttttcggcacaatgatcgaattggccgtcgtctgttacatca

SEQ ID NO: 76477 - DNA, 1076 bp, Heterodera glycines
  unsure (1)..(1076): unsure at all n locations
aattaatggagccaagactttaagagacggcctttgtccaatcttgtaaatatttccttcaattcctccccccccccttttttagggtttggtaatgttccaatcaatcggtgaacgtctaaacactttctgctccattctgctcaaacggcttaagctgctgcttcgtcgtccccccctcgtctcccccatggatttaatcgtcgtttgctctttgctaagcaccgcttgcattgccaccggcgcttgggtcttttcgcactatgaaaattggttttgtttttgatttttgccattcactcatttgtcagtccctctcccccccccccccattacttttgctaatttgttaggtcctacttcgattccgtctattactgcttcatcactttggttaccattggttttggcgactttgtcgccctccaaaaggacggtgcactcgaaaagaggccagaatatgtgattttctcactgattttcatcgtttttggccttaccgtatgaatttttgggccaaaatgcgtaaataaaaaagttaatgacaggtgatttcggcagcaatgaatctgttggtgctccgatttctgactttaaacaccgaagacgaaaggagagacaaaagggaggcgcggctggcagcaaagggattggtaaatgacggcaaaagataaagctgaccaaacgcgtcgttgtcccaacacaggcgcccatcgacagtctccagggccggcgccattatctgaagggccgttcctcgtcctcctactcttcctccagcncctcctcttccccgtctccgacgccaagcggagcagcggacgacgaccctttggatgggtcgttgccacggcgtcgtcggcaccccgtggccggggccagcaccaatcggctggcaccattttatatggcggggcaaaactcacaacagcaacagccgaatgacactgtctccatcatctcctgttcatgctaccaattggcaaaagcgggcactgtgccgctcccgacgatggcatcgcttggggaggagcaaacagcccaaactgagcaacagcagctgcaaaatgttgcca

SEQ ID NO: 76478 - DNA, 232 bp, Heterodera glycines
atggccataaaaataattaagaaaatattaatgtaaatttcatttatttcataattataaccaactttataggcatgattctgtctgttcgtttgcaccaaaggaaatgggtttgtgtgccgtccatttgcgggggacaccgaaagaatgtggttatgatgatgataatgatgatgatattgctgctaaataaaaatagtttaaggtgaacgacccatttttgattattaaa

SEQ ID NO: 76479 - DNA, 1075 bp, Heterodera glycines
gtgacggtccgactgagcaaagatggaactgagctcaccgcgcttggcccaacattgacgacggccaagcagaaggcggccactttggcactggcacatcttcgtcccgagttggagcagttgaaacgcttgttgaaggaggcggagggcacagcggaagaagaacaaattgtgccaaaattggtgaccaaaaatgatggcacagaacaacgcagcaacaaaggcaacatttgttggattgtgatgccgtaccaaaatgccatcgttcattttcatcatcaccgactgatcaaatggatcaacagcaacagtatgattcgcccctctccccctttctctctctctctccatctctctttctctttccttccgtctctctctctcaccatctctttctctctccccccctttctctttctctctctctctctctctctctctctttttctctctttatttcttcccctcttttctcctctttctctctctcccgccctctctttctctcttctctcgcgcactctctctctctctctttcttcccctctttcctcctctttctctctctctcatgccaattttcattcagccaatgccgcagccgggcaatcatcaatcatgaccactaccaatagcacggagaacaactacaataccaatgctgattttgcgctgccatcaacgcccgaaaatatgcaaatgccaatcatcgacatgtttgttgtgccacccgaggagcctgacatcgtcgaggctgacaacaatgacaatgctagccaatggaacaacaacaacagcaacaatccgatcatcaatcagtgccaaacaatattcatggaaaaacaatggcaccagcaggatgatgaggaggaggaggaacagaacggcagcatcgtcgctggccgtggtggggaatggcaccacaaagcaacggagcaattagcacaaatgccgcaaaaacagcgacaagcggttccaaaggcgttgggacgttcgccgacgtggagcagcagtgcttttcgtcaacaacaattgatgaacaacatcaacagtttatgcagcaacaacaacaacg

SEQ ID NO: 76480 - DNA, 897 bp, Heterodera glycines
atgccagctcagctgcaaccagtttcggttcagcaggctatgccagctcagctgcaaccagtttcggtccagcaaacgatgccaacgcagctgcaacccgtttcggttcagcaggagcaaccaacacagcagcaagcgacggtgtggcaaaacacaatgcctattctgttgaatcacacattgccggttcagcagcagcagcagcaccagcagcagatggtgttgtagtagaatgttgtgacaacttgtacaaaggcaactcttacacaaaaaaaatttaatttaatttttttcttaaagtataattttcagtttttttattttcttaaaaaagattattttccaatttcaaaaatttttttttaaaaaagacattttaaaaaaaatttgtatggtatttgatcactgagaattgccgatgtactagcctttgtacgaattgagtacccccccccccccctccccccagcaaactgtgccaaatcaacagcagcaacagcaaattcagctacagccaccggttcagcccgctgcccagcagcaaactttgccaatgaatgtacaaatgccaacggcacaatttgagtcatttttggttcaaatgccacaagcaccgccacctgtgcttcaaacacaacagggccaaccggctcagcaaacggatgatatgtttaggctaattggagaaaatgtattatcaataatattaataataataataataataataaaggaagaagctgctccgggcatactttcgacttctggtcgaagtggtggtggtggtggtggtgggtgggtggtgagagccgtcaatgggcttgatccatcaatggtacaggggaccagtcaacaaattgtacaaaacagattttaaacaaataattaaaaaataaa

SEQ ID NO: 76481 - DNA, 413 bp, Heterodera glycines
aaaatggtctaagtaaaaatcgtaattacgctcaaaaagcttctcaaacaattttagcgcttccaattccttctacaatcgcctttatacatcccattatgaacgctaaaattatcagagtgccgaaaatcgcatgtgatctaagcctagaaaaaaatggtctaagtaaaaatcgtaattacgctcaaaaagcttctcaaacaattttagcgcttccaattccttctacaatcgcctttatacatcccattatgagcgctaaaattatcagagtgccgaaaatcgcatgtgatctaagcctagcaaaaaatggtgtaagtaaaaatcgtaattacgctcaaaaaagcttctcaaacaattttagcgcttccaattccttctacaatcgcctttatacatcccattatgagcgc

SEQ ID NO: 76482 - DNA, 2604 bp, Heterodera glycines
atgcagcatacaaagcgctatttgcttgtccccgaagaaatttatcagagtttggcatcaccgccaccgtatgacggaacaccaattgggctggtacgtaacagaattaaacaaatcaaaaacgatgacggcataaatgaggcagaacgggcaatcaaatatgagcaggaacttaagcgtctcaacaagctgactcgggacgaggatgaacgtcccgtgggtgttaaattagaaaatttgagtgatgtggttgacgctatgccaaaaccagtcaacgtcaaaagaccaattgttgtcgctacgcgtcgccatttaaaggttgggcgtgcgcgaaaagcaaatgttgaacaactagaagatgttgatgatgatgatgatgatgatgatgaaactccaaagccatcgagttcaaataaacgacaacccacacaaagggaaatcttaaaattaatttataaaaacgcccaatctcttggagtgtctgaggaaggacaggtcttgagagcgggtgggcggccttttataaccagcagtgtttatgacattgttagtcacctgatgaacaaggacaagcgtggccaaaacaaagagccaactgcattcaaagaatttgttgaaagggcaagacagatcccgctcttgagtaggcacttatttcccgaaggccaatccggcaaaggcatttataaaaacaccacactgaaatttaatccatctttatggatttgaaaaagcttcgtttgcttgagtttttgtacaaggaactaagttcgcctgtcgcattcacgagcgttgaaccgctgctgagagaggcgcagaaaactcaaccaaaaattaatcgaaccgatgtccaaaattatttagccacccaacgtacatacacactgcatcgtcaggccaagcggcgctaccgtcgattgccaacattggcaccaggcttacacactgaatggcaggccgatttggctatttttgaccgacttgctaaacaaaaccgtggctacaagtacttgttagtctgtattgatacccttagtcgacaggtgtttgtcgagcccgtaaagaccaagacgagcgctaacatgataatagcatttggtcgtatattcaaaagatcaaaatatatcccgtggaaggtgttaacagatcagggaaaggaattcactgcccgcgcagtacagcagttcttccgcacaaaagacgttgaacacttttgtatgctcacttctccccaatttcatgccggaatggcagaacgtgcgaatcgtagcatcaaagagcgcctttaccgctactttacggagcgtaacacgtacaagtcgattgatgttgtgcaagacattgtttacgcaattaaccactcgccaaattcgagcattcgaatgtgcccagcagacgtgaactttaaaaacgcagaagcattgcgacaaaaattacatggtgcagcagctgaaaattttgtacgacatcagccaaagtaccgcgtgggagatcgcgtgcgcattgaaaagtacaagcacgtgttccaaaagggttacctcccacgcttcaccaatgaacttttcacggtggcagaggtacactctgagcgttcgccagttgtttatcggttacgtgatgacaataatgaaattattagtggttggttttacgcaaatgatttatgcaaaacgctagaagacaaacagcaaaaaagtatgaaattgaaaagattttgaagaaaaagaggcagaacggtgtggattatgcatttgtgaaatggaaagggtatggcactcgctttagtagttggattcccgtaaattcaattagcgagaaaaatatataaaaagaaataaattaataaaatttatttaaaaaaaatgccttcaaattctttttatgctgttcttccgtcaaacaccaatattgaaggaaataggacaaattctttccgagtgcgtttaccgcgcaaattgcaattcaattcggaatgggaggtgggtcttgccgttattgtatatccccactcttggccctcgataggcaccgtggagcaacaatttgtacagattgagtggcagacagggaatatggtacgtatcgaagttccgccatcaaatgtcacaaacccccatgagcttagcaaaaatttatataggctcctgggtgagggaagtgatccgttggcaaaaaaggtacgatcaacacagaattctttcatgcttacgataaacaaggctcgccgctgggccagagaagagtacattaagcgaaagactaaagaaaaacggggcgtccgtgacgaagagctgctcctacaggccatgttggcagatactggaacattggttgacctcaacagcgtggcccaaggctttctgacacgcgaaaagagtgctgcaacgagtaatgtaccgttgagaatgccagctgatgataccagttcgtaccaagaaaaattggatgagtacttttcgaaattaagtgacaaaaatttgaacattcttgatgaattgggcatgacaaaattgaacgccgaaatcaaaaatttgaccgaagaggaacgcgtgatccttgaagccacaaaggaaatgggaacggaagcatggattcaggcgtacc

SEQ ID NO: 76483 - DNA, 1162 bp, Heterodera glycines
atgacactgacgccccaattgtgtgagccacgggtgaagagtgcgtccaaatattgctgactcatacccaccaccaaatcatccagcaccagcaaggttttttcttttttggcgcactcccgcacttgttccgctcgtgggacgccgctatggatagtgactggcacattgccaactttgccggcgcgctgcagattcatcacatttgtgttcacctccccatagctataaataacgcgttcaacaggggtagagatcattttgtccacatttcgcaacatacgcattatccactctgacttcccacttcctgtgctcccagacacaatcattgtaaatggatgacgaaattgtccatctttccttttaaattgttggaaggcgtccattttattttttatggaattttctttttatttatagtttttcatttttatagattttaatggatttaattcttgccaccgattggataaacaacgcttatcccgaaatggatttacaggacaccaacaaagagaacaaagagccaacgaaaaaccaataggaggaggcggacgatcccagttggatcagcctgattgacgaggagatgaagcgcgagccgctcgctccaattggtgaggaggcgccagcaacaagttgcttttgttttcatttgtcatttaaattttaaattaggcactccgaaaaagtgtggttgcgccgaacgccgtcgccctgttccgctcgtggactacctctgcaagcggttcaaatgcagtgcccatgagctgcttgtgcttttcaaaagcctagagaaacgccgggacattgtggagcatttgcgctccgtccaactgcgcactgcccacctgcgcccgtccgcgcgcaattttccagtgcgttgtaatgacctgtccatcctagacactcactccgccccagcttaccgaggctatcttggcataacggtatttttatttgctttatttgtctgtaccataaaattttcatggtccgcatgcactactacataaaacacggtatccgcttgcgccaccctaatttgccgtgtgtagttgaatttggaggcgtagatcacaaaacttttttccctcttgaaattttgtccattgttttgtagatgtattcaatttccaattgtactgttgtttttaaa

SEQ ID NO: 76484 - DNA, 1073 bp, Heterodera glycines
atggaattcaaccccggactgcgcctcattgccaaaacattggctaactccttgtggtaaatattttggggttataatttttaaaaaatgacacccacagggggaagctagcgcagcgcgtgggccagacggagattcgctacacacgaaccccggctgaattccacgcgcttctcgacgacccaacgctggacaagttggactttgtccacgtgtccgaacacatggaccgctgtgttgtgcggaagcgacccgagttcgccagagcgccaccgaccaactgccttccggtcgctgcgtttgtcacctcatacggccggcttcatctttacgactacatggagcaggtgtcggccatcgtcggtgcggagctgctctactgcggtatgtttatttgtcacgaattgttttttttttgtgaaaaaaagcaaatgtttaagacaccgactccatctactacgtcagcaagatgggtggtccgtgtgtagcagagggcgaggctctggggcagatgaagcgcgaacacaccgaccgacggatcgtcgagttcgttgcgggtggccccaagaactacggcatccgccacactgcgcgggacggcaccgacgagcgcgccaacctcaaaatccgcagcttccgcctgtcctatactgcgcagcagctgctcacctttgaggcaatgaagaacctgacgctggccacgtacaacattgacggaccaatgtgagttttgcaattaagcattaattttgtaaataaatttaaaaaaatttagcgatgatgccttggacaatgacgacctttacgtgtacgggggcggcgaacatcgtgccatccgcgtcaacttcccgcaaattgaccgcaatgtgtacgccgacctctacacgcaggaagcccacaaagactacaggcccttctacgccaaggggcgagttcggcctgggatgcagacgcgcccttttggctatgtggaggatgatggacagccgaacaaaggacaacggacgcatcgaagaaagagaaatttagtagagcaagatcccacacagcccggccactctgggtggttctga

SEQ ID NO: 76485 - DNA, 1922 bp, Heterodera glycines
aaaactttccttctcaacgcatcgtccatcaattcggaaatcccacaaagcaaattggccggctcagatttctctaaaaagtcctttttaaaatttgtttgttatattttgtggaagataaagaagtcggaattttgaccaaatgacctatattttacacaaaggtaccgatttgtttgggataaggcaacccaaggttttccattatcgccgcaaattcttcctccgattttgtaagacggggattgaatttcttttcttcccaaaccgatgaaaccattctgccggcataatctaaaaagatactttattcaacattaatttagtttaccatgcgccggatagataagataatcggggggaagagtgaaaatttgcgatttcacagatcggaaaagagtccgagcgtttcctgaaattatttgcacaaatatcaatgagcagattcacaaactcaacatgctgaaagtcagtccttccacagcctctgatcaaaagagcatcgccagtgaatgccatttggttggaatggcatacaaaagtaacacagcctaaaaacagggctattaattaataatgattacagttcggtttgtcctacaaattagaaaaatttaactcgccaaaaaaacaaatataacatatctagacaaacttgggacaaaacttcgaaatcagattgtttatcccattctttaaaaatctttgttaccatttgtgtgtccgggcgtttctctgacttccaattcgagtccatccccccaacgaattaaatcggagtgtttgacaagcaaatcagcccttccacccgcttttccagataaaatcgaaattgcttttggaaagtatttgttgcgcttgagttcgccagaacccgtcacatggtctgcatggatgtgtgtgttgaccacatatttaaggtcgagtcccaactcgtggactaactgaaaataattaagccataaaacagataaattttctaattaaaatacgtactgaggcatccctctcaaccgtttcgatcactggatcgatgaccagagcctgtctcgtctttgtgcatcccagcaaataggtgtaagtgaatgactttgcttcaaataactgaactgaacccattttggggcaaaacattcaccagaacatggaccaacttgccgaaacaacaacttcgacgccataagctttacaattactagattaataatggttaagaaagtatatatgatatgataaattcgggaattcataatcctatataataaagttgagtattgtttctgaaaattggaatgaaatggccaaaagtgccattttagcaccaaagaatgttgatgttagtaaaatgaataatagttttagaaatgttgcctggagaagaagttgtatatacgagtatagacttggctcaagatgagaatagacaaagagcagatgactatttggatgagtatttgaatgctttaaacccttcggggtttccacggcataaattgagacttaagaagaatgctattgttttgttaatgcggaatttgaatatcgaaatgggcctttgtaatggtgcgagaatgaacgttgagcaaatgcaaccgaatttgattgtgtgtaagattttgactggagacaaggcaggtcagactgtgtacattcctcggatcacgctttgttgttctgaagattacccttttgacctgcataggcaccaattcccgttggtgttagcttttgcaatgacaattaataaggcccaaggtcaaacccttgagcaagttggaattgatcttaggaaagatgtgtttagccatggacaattgtatgtggctctttcgagagcaagagcttggaataagttgagaattagattagatgatggcaatttagagagaaaggtgaagaatgttgtttacagagagctatta

SEQ ID NO: 76486 - DNA, 808 bp, Heterodera glycines
atgggttcagttcagttatttgaagcaaagtcattcacttacacctatttgctgggatgcacaaagacgagacaggctctggtcatcgatccagtgatcgaaacggttgagagggatgcctcagtacgtattttaattagaaaatttatctgttttatggcttaattattttcagttagtccacgagttgggactcgaccttaaatatgtggtcaacacacacatccatgcagaccatgtgacgggttctggcgaactcaagcgcaacaaatactttccaaaagcaatttcgattttatctggaaaagcgggtggaagggctgatttgcttgtcaaacactccgatttaattcgttggggggatggactcgaattggaagtcagagaaacgcccggacacacaaatggtaacaaagatttttaaagaatgggataaacaatctgatttcgaagttttgtcccaagtttgtctagatatgttatatttgtttttttggcgagttaaatttttctaatttgtaggacaaaccgaactgtaatcattattaattaatagccctgtttttaggctgtgttacttttgtatgccattccaaccaaatggcattcactggcgatgctcttttgatcagaggctgtggaaggactgactttcagcatgttgagtttgtgaatctgctcattgatatttgtgcaaataatttcaggaaacgctcggactcttttccgatctgtgaaatcgcaaattttcactcttccccccgattatcttatctatccggcgcatggtaaactaaattaatgttga

SEQ ID NO: 76487 - DNA, 968 bp, Heterodera glycines
atgcctatttccaattcactgcgcgaaggtttgtgagagatgcgagggacggagagcgtttcaagacggtttcattcgcctctggtggaccccgaccactgaaaaatattattagagcccgtaatagaaccggatcatgtcaggttttttaggactcctgatcccgacccggataattttgaaatttgacccagatcaaagattctttagaatttgagcaacaaaatgattggctggcgtacgattttttgaattcaattcaaacgccgaataaaaattgtcagaaggaggcaaaaagtgtctctttgagacgcctttacgaaatgtttccgaagctgtcgaagaaagtcatcggtcgagtggccaaagaaatggagtgagtgccgacaatttgggggatggagacgaaatgcgagtcatccaattgtgaattttagcttcgactttgaacagactgcgatttatctgcttgactatcctgatgatcatccgactgacccatcaaatactgcggtaaaaccctcggtgattgtgccttcgcttcgtccccgagtgatttcggcagaggaacagcagcggacgaaagggacgacgaacgtggggaacaacagcaggaccaatttgctaatggtgtgaccaaagaggggggggggggatttgtattgtgaaacctaacgaaatatattgaaattatatcatacgaaaaggttacagattttgggacaatgtttaacatgacaaaaaagttcacaaaatcagacttgttgcaaaactcatttctcaccaattttagcttccccccgaaagttgggacactgaggtccaagacgtggagaaggaattgcgtaatatggcggcggaacagaaacactgcagagagatgcggaccaaatacgtcggcttcaaaaactccaacattttcggcttttactccgcacgggtaacaaattgtaatttgtgtaaataca

SEQ ID NO: 76488 - DNA, 639 bp, Heterodera glycines
atgcgtggaaaaagaaccagcaaaatgtatgactatttcttgtcattaccgtatgttttttttggcaatatttctggtcactaccgtatgttttttggcaataatttttaatttattaatttaatttaatattttcccctaaattttaggccatttctttggcattcatagcgcttgccgtaataattgctacagtaatactgtttacaatagaaacccgtaatttgaaattctgcaattaattattattaagtccatcaattaaagaattgtgccaaaagtttttatatattttttaaaaattttcgggaaaatttcgaaaataaattatacaatttttattaaccgccctaattattatatattttatatatatatattaataattaattaaagattattaggaataataattaccaaaatattataggtattcatgcttttgacttttattatttgtgggcttacagtttccccctaattatctcaatttggctttactcaattgtgtaccgggcgtacaaatttgttcaacaaaatgaggaacacaaaaacggtggacagtacggacagaatgtcaaacagtaccaacagaatgccaatgccaaagtgatttaatgattgaattttcaattttta

SEQ ID NO: 76489 - DNA, 323 bp, Heterodera glycines
atggccaagactttggaccaataccaaaaccttgaacgtgttccaatatcttctttggtctttaccgtgaattttttcgggtgccaaggccaagacaagataatggcattattgttggtcaaacaaagtgccgccttagattgccaatgtgctcggcttccccgcgctggccgcgccaatgtacaagaatcggaaaaccaacatgccggagggcgtccagcttatggccgcgccattcaacgaggcgcttctgatcgcggcggcccaggaattggaacgcacatttggcggatgggtgaagccgagcccggcgaacatcttca

SEQ ID NO: 76490 - DNA, 859 bp, Heterodera glycines
atgtcacggttcctcgaactgttctatgccgacccgtggagcgaaggcattccggtgaaaaatgatgcatgggaggagagcatggcatttcaatgatgccgtgccagtgacgggtcgagagcattttggatttttgtcgagaattgacagcctcgagagtcgagaaattttcaagatggctgcgaattgattcgaaaacctgagaaatttcgcgacttgaaaccgatgaatttgttgtcattaacttggcaaaaatttctatgttttttttaaaattaacccgggactcaagaattctcggctcgggagttagttaatttaaaattttttgatgcattttttcttagcaattcaaaaattctcaggagaaatttaaggaggggggaatccgaagattttttttttttttgctctccgggccaaaaattttttctctagtgttattttttaaattttaagcgccagagaatgcaaaaaaacaaaaaaagccattttgtttgtgccaataaatgttaaattttttgcaattttgggttaaaattttaaaaaataagttaaaattgggtccggcgggggaaatttaatgaaatatgatacgaaaattgtgcaaaattttcaaaaaaataaaaataattttttaaattgtaaaatttcttaattttatctccagtcctacgaagagctgcgacagacttattatgacattcaagcgggtgtggccaatgccacccatctcggcctgcaaattgagctgctgaagcgatttgttgcgccgaaatcagaaaacgagcgggaatttgtgaggatttaaaaattaaaatgccatttatttaaacaacattttaaacattaaaataaa

SEQ ID NO: 76491 - DNA, 240 bp, Heterodera glycines
gttttcgaatcaattcgcagccatcttgaaaatttctcgactctcgaggctgtcaattctcgacaaaaatccaaaatgctctcgacccgtcactggcacggcatcattgaaatgccatgctctcctcccatgcatcatttttcaccggaatgccttcgctccacgggtcggcatagaacagttcgaggaaccgtgacatcagtgggaactccactcgttggaccgtcacattgtgtttga

SEQ ID NO: 76492 - DNA, 749 bp, Heterodera glycines
atggcaggtgaagaagaagaagaaacagtggtggaacatcctttgccgaaaggctgggagaaacgaatgagtcgttcatccggtaagccaaagtggcgtattaaaaaacaaaaacttaaaaatggtttgagttattgtgacatcgtatttttgacaggtcgtgagtattacttcaatgtgttcagtcaaaaaagtcaatgggaacgtccgacgcgtgacgccgaagacacggcaaaaaaacccgaaactgtccactgttaccatattttggtcaaacacgaaagatcaaggaacccaaagtcgtggagaagtgacaaagtcacacgaagcaaggaggacgcgaccaaaacactcgaatgtccgttcaaactttgggcaccccaagcggaaaattaccatttgtattggaaaattaaaggagctagcattttaaaaatgcacaagaatgcgaactccaacttaagacctcccctattccaaataaaacatgagttgtttatctttggtgttaagcttatcatgccgaattggttgcattggacgttggcgaacgcttttcccgattcaagaaaattgcgcgggaattcagcgattgctcttcggccaaacgcagcggcgatttgggcccattcggtaggaataaaatgcagaagccattcgaggaagcatcttttgcactgaatgtggggcaaatgtcggatattgtggacaccgattcgggccttcatttgatctatcgtttcgcttaa

SEQ ID NO: 76493 - DNA, 900 bp, Heterodera glycines
gttgagcgggaccgggaccggggcgggaaatcccgggtttttcaggtcccggtcccgatcccggtttttggaaaaacagaaatcccggtcccggttttgccagtcccggtcccggcaggactaaataagcactggtaagaatgggggtctgggtgagaaaagagaagggaattggtgagggatcagaaatttttgataaaaataaattaaattatttattttcatttatagcaagtgtgcatatgtataagtggtcaagtggctaaacctttttactttcattatttgtctcttcggatcaattccctgatggaacagaacatttttttatattttctttaacattattttaattgaattaattaataaaaaatattttaatttaaaattattatttttttcatttttaatagcctaaaaagccataaattaaccaaatatttggtcattttttgacaaattctgttcacaaatctcgctcaaaatttcaaaattcttccgacggcgcctatcggcaccgccggatccagccccctcccactgttccaaaaaagttttttgaaaaaacattgccacaaaaacagcgatttaaaagcaaaaaatttaaaagattgtaaatttatttttaaaaaatacagaattttgggactcagaaaattccaagaacccccccccccctgaaaaaaatttttaaaaattttcctcgatcccccaaaacgtaaatacaaaattttattggtgcatttttgaatattggcaattttcgtaacgaagtgcacttaaattttcaatttttttcaaaaaaaaattttcacttgggaaaagtcccggttggtcccggtcccgggttttttcgctgtcccggtcccggtcgaaaaacttggtcccggtcccgacttt

SEQ ID NO: 76494 - DNA, 755 bp, Heterodera glycines
atgtcatctctttccgaggaggtcaagaaagttaagcaggccgctgtaagactcaatgtatttgtgttcagtagtcttcgtaattgtttaagaacattcctcctccggcagtttgtaacagatttgtcgaagggttttcaagcgtttatgtgtatgtgtgcagttaaattaatgcttttgagacactgaagttatttaggttcgaaactcgaccatcttcacatggcggtgcttttgcattccgttacgatgttgaaatggtgcagctcactagaaacaaaagtttgacttcgggcggtggcgacgatgggaaaaatggattgctccgcggcgtttgttttgaattgatcaagttcgtgcacgactcgacgcagggatttggacaagcggtaattccctctaaatcgcattcactatttacctttattttaggcacaatttgtttacgacaaccgtaaaatcttattcacgaacaagcgaatcgaacaatttgtttgctttttgtcttttaaaattatgtaattatataattttaggtattggaaattgacacggaaaaagtccaaggaatcgttcgcgatttcctgcgtgggtcttcggtcaaaattgagatcaaaccctgtcagactgataaacatgagctggatctcaacgacgtcttttcttccatctcgcgccgtcctgatgagcagtctgacagatctttgcgcactttccttgaaatgctgacttcccagccatttctcaatgcgtaa

SEQ ID NO: 76495 - DNA, 189 bp, Heterodera glycines
atgccaatgagttctccagcgtccactcgttcaggttgggcatccgaagcggcaattggagttcgtactgtgacagcagttggagcaggtcacgcttggacaattaattgggcaattaacaaattggcaatttttacggcactatcatttagtctgattgatcaaaaattaatcgtgaccggaaaatcg

SEQ ID NO: 76496 - DNA, 441 bp, Heterodera glycines
atgcgttcgccgcccgcggtcggtcgccccccgcggcaacgacccgacggatcagtgcctttgtccgccccgggggtcctttcgcattcgcttcgcctcccgtcgcatcattttgtccagttgtgccatcaatggctttgtccgtgtcgtcgtcctcctccatcgcgaaaggagtgaccacggcattttcatcgaaattttgcattcgaaggaaagcaaaaaaaaaaaaaaattttaaattaacaaataaatatttccagaaaatttcaaattgttacgaatttctcgagagagaatggctaatatttctgcaaaatgcaaatggtgccaaattgggagaagacggactgccaaatttattgaccgtttcctcacccgaatttgcccatcatttggcacttttattggaagtgccaaatttggaaatggaaatttaaaaaa

SEQ ID NO: 76497 - DNA, 1073 bp, Heterodera glycines
atggaaaagcgcacatcacataatcacacaacagcagaagcattggcaagagctgtccaaatggagatggatttcatacaacgcattcttttgggcccacaacggggcaatttgacggcaattgaatatttgaaggcacaaaatttaggaaaaagtttatcctcaacaaagccaaatgacggcacggaatggaaaaatggggaaaaagtgccaaaatttaacatcgaaaagcatgcaaaaggaaatgatggagcagaaaaagccaaatcgacggaggataaaagcgaaacgaacggaaagcacaaaattgggatgggacgaatgaaaagggaagtgggcgaatgcaaagtgtgcgcgaggccgagcctttactgctattacggggtcaaatgttgcgaaagtgagtgccaacacaagcaatgtctattttggcattttaattgtttttggtttttaccttataaactagagactggaaattgcaaatttgtgggattttctgtgggatttgaattcaaaaatttaaaaaatgacttaaattataataaagaccaaaagctgttcaaataaacaattcgtcattgagttaaaaaaggttcaggtcatattaacgcaatttttggtggtgaaaaaacaatgaaattgaaccaaatggttaaaccgattaaaaaataattatattttcatattgttggataatttacaaattattcatataatcgactaattaaggctgcaagcaattctttcgtcgtattgtttccatgcgaactttgttcaactgttttgaaggaaaacattgccaaattggcgaaggtaaaaaatgtaaatttattaaacatttatgaatttaaatatggtttttgttcttttctcagatggcatccgatgccgcggctgtcgcctcgacaaatgccttttggccggcatggatccgacaatgatcaaagctaatgcgaaggacggagaagcgttggcccaatatttggccaggttggagctgcggaagagaaatgctttagcgaggaacaattgcgcggaacgaaacaattgaatttcgattgaattttgta

SEQ ID NO: 76498 - DNA, 1132 bp, Heterodera glycines
atgcctgcgccgcatgacaaaacgaccctccgttcatttttgggagcgctcaattattacggacgttttgttaaaccaatgcgagaaattagggcgccattggaccaactcctccgaaaggatgaatcctggagttggggagatgaccaacagtccgcattcgagcaagctaaggcaattatggtttcagaacttctgctgacccactacgacctcacagttccgatcgtcgtagcggcagacgcgtcaaaagatggcatcggcgccacaatcagccacatttttccggacaaaaaggaaaaagtcatcgagcacgcctcaacagttctgaccaacgcgcagcagaactacagccaaattgagaaagaagctctggcgcttgtgttcgaagtccaaaaattccaccggatgcttttcggacggaaattcacactgctcacggaccacaagccattgctggccatcttcggctccaagaaaggcatccccatttatgccgccagccggctccaaagatgggccctaatcatggccaattacgattttgaaacggtacatcaacaccgcatcatttggccaggctgacgttctctcgcgcctcattgccaattatccccgaccagaggaggatattttgatcgccaacatctgcaccgaaaccgagtgctacatcagcaccattctgcaaaccaaaaccgaacaacttcccgtcactgcagacgaaatcgcagaggcgacaccgaaagatgagattttagcgaaaattttggcattcacccaatcgaattggccaaagaaatgcagcgacccggacatcgcaccgtattttccaaaaagggacattttggaaatcgagggctgtttgctctaccaaaatcgcgttgtcgtcccgcaatcgcttcgcaaccgaatgctgaagtccctgcacatggcacaccccggaattgtgcgcatgaaagcactcgcccgccaacacgtatgttggcccggcatggattcggaaattgaacggattgtccgtcagtgtgaagaatgccaaaaggcgcaaaaagcaccgatcaaggctcacggagtcaattcaagatcacgattcatggtcacgaaaaccgtgaatttcacaaattttagatag

SEQ ID NO: 76499 - DNA, 1258 bp, Heterodera glycines
atgaacttcgcaaggcggagcaaggccaggcttccgggaacgccatcgaaatactgttcgaacaagtgcatcggagtaatgttgagattgacaatgtacgaccacgaaaccagagaaaatactaaatttatttggctgcccatttaggtggacaatttgcggacgttgtgcaggggaggtgagacgttggatcagctcatccaactttcggtcactcaggtggaggggatgaaggatgagacggcgcactgtctcgaccctgggaagcttgttgcgcgattggtcaacatcatttctaccattccccatttaaaagcgttaattaacagaaatcttttgcaatttctcatcggaagacgggcgatagcgatcacttcgccaccattggaagacattttaattttttgttgcggaagacgcccaatttttattatttgttagcatttattacttaaagttgattggctgttcccatttctctttcaggcgtccttgctacgagttaaaatcggatggtccgtttctccgtgagaaaacgcagcgaaaacggaccaatcaaaaaatgaaggaagaagcgcaagtggtgaagggaaaaacggttggtttgcccgatataattttataatgtttccttaaattttgtccttggcctcgtaaccatgaggggaattcctcccctttcttttgattcatttctataattttgtttgctttgtcattttcccttgccatttttcctatttgtttttctgccccatttcagttgtctcaaatgagtgaggccacttctgccactgcttctgaggatggcactggtgctggttcgtctacagctgtcaataaagagttggacaatgttcgtcgtcatttgaaacgcgtctacaagcagaacggcacggactctgtggactattaccgcttcgtgctccaccctgacagtttcggagagaccgtggagaacatgtttttcgtctcttttctgatccgtgacggccaagtgcggctcagagtcgacccaaacagcggactcgcctcaattggttagcattgtaaaaaattagtagtaattgcccttaatgaagcataaaatactaagtctatcggtcttcattattccatttcagttaaactgagccgtgaagaacgggaggaacgctgctctgcccgagagcgtccaaagacacagacagtgccgagattggactacacaacatggcatcggatggtgcaagagttgaacatcactgtatactccaat

SEQ ID NO: 76500 - DNA, 1147 bp, Heterodera glycines
ttaattgcatgctcgttttgtttgttctgccagccccatccgatataccagctgatctcgcttttgtgcttctgcgcttgggtctctttgttgtcgccgctcccatttaccgtttgggttaagcattcaattttaaattaaatcctaaaaataatttattccaattagtattatgtgcttggcgatggccttcgtcaaatgaaccaatcggtggccatgtgccatttgtaccgcacctcaatggaagtgcttaattaaccttaattgatgttatgaaaaacacaccctgattgttcaggttatccctcatacaatggacactctcgtcacacttttctcggttttaatttattattttaattttaaaatatttatttagcaattcataattaatttatcgctacaaattaaaaataaaaatataatttttaaatttgaaaagtttatttcttaggttttgctcgctgttgcaaggttttccttaaattcaagaaaccaattttcactaaaaattctaagatttctcacgcaataccaccgaagcacattaaaacttcggacggtaacactctttcattttttcgttttcactttttttcaagattgagcgtttctcccgtgccattttgttcatcatcataattagcgttctcctcggcattttgcgcttctttgagcacgatgccgcactatacaggtgattttctttcaaaaataagcaagtataccaagtcaaatatgaattttcggattaattatcacctgactaattttgaaagggtttgtgatattttcatttttaactcaaaaatagtttttatttttgaaaaattaaagtttctgcatggacacggagccgggccctttctgggcccaacgctgtatgctaacggacgggtgggtgcgctgggtcagaaaatatgttaaaagcatcccctgctggcctcagcccactgatcagctttctccggctcggccgtcccttttggaaagtgttccttcccctggccgatctgttcgcgcagttccttttgcctggctcctgtctgatccttctccacatcggcttcaaccgagagcccgtgatcgaaatcggcaacgaaaatagtcacaaccgatttggacgatcattgcgtgaccaaacaaa

SEQ ID NO: 76501 - DNA, 1270 bp, Heterodera glycines
atgagcaaaatcaaatgttacaagagaatggcatcagagaaaaatgaaaattatcagaatgctatatactcagaaacaaaagagtaccgggtaaattcagtgtttcaaaaacccacgcgcccatttaggaattatctgtcgacttctcggagcttcgacactgcttcgatgtccttttcccggcggggcagtgaatatccggagccgcttattcaccattgggtcactctttcgcctgtgccatcgccgatccgcggtgagccgtcatcttcctcataattgccattataaaacttcgctttttgtgtattttgttcgttaattgaacgtttaatatttatgtatattaattttaaataaacaaaataatcaaatgtttgtttttataagtaaatcctcacatggaaacaatggcacggaaaaaaggtgcaaaaataaacaagcaaatttaaataggtatttgtttttctcgtgcctttggggaataggcaattttcagtcattagcattaattaaacatcggatttttagtgatgaaagaggcggaaaatgagttttgtacaaggagggaaaggggagaatgataatggtggtcgggttttgcagatcaaacaatttcccgttgtgctgataaactttttcctagtcagaggatgaacagaataaggacattaacaaaagtcatttgcagggaaagaaccgacaaacgagcattaattatcaattgttaattggagatttaccaaattaaagggcagaaaaacaggggacctaatttgtaagtacaatgttgtctcagttgcgttcattttcggaggacaacttttgtgtatattaatcccacccaattaatgattcgccattatattttcatttgttaggaaaaaatgttaaattttacaatatatatatatagtcctattatggaatttaattcaattttcttcggtccaccagccgagcaccgcctgcacattggccatattttgagtccgcagccgatttggtgcggacaatgaaacggacaacggacctttaaatgggaggacaacagtttagggaatgattcgaatttttcagaacctttcgcgaaaaagccaggaaaagtgtggtcaaactgcggcgttctcctcatcagttcgtcttcgtcgttgcgctgctgttggaccacgaaaacggaggtgggcgacaggcgctgctgctgctggacgctgagcggactcgtcggagacaattcgaactttggggaattagcaaaagatgaggaaca

SEQ ID NO: 76502 - DNA, 2336 bp, Heterodera glycines
gtgagtgggcgggacttcaaatttaattcatttcgccttttagtgccatgaaatggaacggataaacaatggtgaagatgtgtcgttccacgacattctcaggtcaatttgcttagattatcgcttcaaaaaatgctccagcttaaaatctaaatatttcggaattgttaattaattgtttaatatttattggtgcatttaaactcggaatagataattaattgtgcttttacagtatgctttcctaccgtagtgtctacattcgcaagtcgcttcaacttgaagaattggtgcagcgtgaggaattggagtatttaattgaggaggaagtagccaaacatgtaatcaattttggttattaaccaattgaaagggctgattaattcgataattgccagacaattcgctcttggctggagagttgcttgaggcgcataaaacaacaacaaaacactgcccatgacaatgaaatgccccatattgccgatttgttctcccaaattcgcgcgaccaacgccgccgccaccgccgtggcatcgtctgccgtgtgcactccgattaagctgggggccgtgccgaaaagacggaaagaccgaagcggaagctaagcggcggagggaatggcaaacaatgcgaagcaacagacgaagaagcagcacatgccaatgccacaagtgaagagcaaaacggaaaaacagaaacaaaattaaaagcaaaatggaaaatgatatcataaaagtggaaaaatcggggaaatgaaaataaaacacaaagtcctaatggaattatttgctaacagctttcacttgcggaagtgacgagaaaagcaaacaaacgacgacggagcagcagcatcccggagcttgtcgaggtgaaaagcacttgcaaaataaccaattaataacagaggaagtgcctaattgctttataaatgatttgaaaaaaggaggcaaaacgttttgtatggggctctcgtctaaaatcgcttccacgcggttcccgcacgcgtaatggaggcggcggaagcgcaataatcaacgaggagaacggcgacaaggaaaaggtgagcagcgacggtgccgcgggcggatggacggcggagggccaaaaaacgcaacagaagccgaagcagcaaagcacaacggacagaccgaccattgccattgtgtcggaactgtcgggcacaatgctggccttggccaagcacgcgtcggtggaaaagtgccaaagtgtgaccatacggaaccatcccggcattgaggagaaggtaatgccaaggtgaccaacccatggcaaagcggggatatggggacaatctttctcggcttagtttctttattgttcctcatcttttgctaattccccaaagttcgaattgtctccgacgagtccgctcagcgtccagcagcagcagcgcctgtcgcccacctccgttttcgtggtccaacagcagcgcaacgacgaagacgaactgatgaggagaacgccgcagtttgaccacacttttcctggctttttcgcgaaaggttctgaaaaattcgaatcattccctaaactgttgtcctcccatttaaaggtccgttgtccgtttcattgtccgcaccaaatcggctgcggactcaaaatatggccaatgtgcaggcggtgctcggctggtggaccgaagaaaattgaattaaattccataataggactatatatatatattgtaaaatttaacattttttcctaacaaatgaaaatataatggcgaatcattaattgggtgggattaatatacacaaaagttgtcctccgaaaatgaacgcaactgagacaacattgtacttacaaattaggtcccctgtttttctgccctttaatttggtaaatctccaattaacaattgataattaatgctcgtttgtcggttctttccctgcaaatgacttttgttaatgtccttattctgttcatcctctgactaggaaaaagtttatcagcacaacgggaaattgtttgatctgcaaaacccgaccaccattatcattctcccctttccctccttgtacaaaactcattttccgcctctttcatcactaaaaatccgatgtttaattaatgctaatgactgaaaattgcctattccccaaaggcacgagaaaaacaaatacctatttaaatttgcttgtttatttttgcaccttttttccgtgccattgtttccatgtgaggatttacttataaaaacaaacatttgattattttgtttatttaaaattaatatacataaatattaaacgttcaattaacgaacaaaatacacaaaaagcgaagttttataatggcaattatga

SEQ ID NO: 76503 - DNA, 810 bp, Heterodera glycines
atggattcattccggccgttaaaatctccagaaaaattgtcatcctttgtcaatcgccaattcttttggtggtttaactccgtttgtgcattgggaagtcggaaacctttagaattgtccgacctttatgcactaaatccaaatgacacttgcaatgaactcgttcctcagtgggaaagactatggaaacgcgctattactggtccgaattatttaaaattaagattaatttgttttttcaaaaaatggtgtttactagagctaggcgggacctgggaatcgctgggattttgccatgactccaagcccaatttttttttggacaaaagcaccgggcgtttaggtctcgggatcccgccccggcccctgcccatttcaaaattgctggacctagtgcttacgtttcctttagactataactcgaagaactcactgcaatctcctgatgaactgtgccaaccaccaaaagaatccgtcataaatgtaacggacggggatgtgaatgtgcagcatcaacaggagcccgagtcggatttagcacctctgattcgtcatggcgatgatttaaccacccatgatgtctgaatttggataaaaagattcttaattgaatgcagtttaatttcagcaggtgatggccaattacgggtccactcaatccgaccactcgtcgtcctcctcaaaacgaaagacgtcgcctccctcactgatctggcgtctggtcctgctattccgttggaacatcatcaccgccatgatcatgaaatgcttctccgatttgctaacatttgcgaaccccgtcttactcaa

SEQ ID NO: 76504 - DNA, 246 bp, Heterodera glycines
cgctgacccacaaaatgtccaggccacgaaatgtccaagtctcgaaattgagttttttattattcggatgggcctaaggttaggcaaggggtaatataaaggctatattcgtattcagcgaccccgaaacccctaaaaaccccaaattagactcattttgtttttataaattttgaaaattttggacatttcgtgggtttttactcttttggacatttcgtggcttggacattttgtgggggcgcc

SEQ ID NO: 76505 - DNA, 1271 bp, Heterodera glycines
atggccccactttttcgcctcctcttcgtccgattctccgctcgactcctcctcttcctcctccttttcctcctcttccccttcttcctcttcatcgtcaagcttcgaccaattagggcagaacgacttggacttaatcaagcagaaaaggcacatcggagacattcagcaattgtgggatgaggacgaaatgaacgggtgggggaggagaaagccgaacccaaaaaggaaaagcatttagtaaaatgcgaaatgccctcaagccgacctcatccaatcggtggacccaaattcgaagccatgatggcaaatttgtgatccctttcataatcagcggacagttcagtcagtttcacagtttcataacgtttttgctattgtgttcctcgaatttagcgatggaagaacgacagaaaatccaaaaagcaatggctgcgattgccaacaattcatgcgttgaatttcggccaaggaaattcaacgagttcgattatgtggacattcaaaaccgaaaagacgaggggtacctttaaagataaaatcgaattcgagatccaatttctggattgggctgtctgattttaaatgcagttgctacacgcaagttggccgagtgcggggccgccaagtgctaatgttggagtcggggtggagcaagccgtgcgggtccggctgcattcagagtgagttcatctcacatttgcgaggctccttccgatcggtccgtttcgttcagcgttccccggctgtgtcaaacacgcgacaattgtccacgaattgctgcacaaagtcggcctttggcatgagcacatgcgcttcgaccgcgacgatcacatcaaagtgcattttgagaacattccgccaggtcaaagcggcaaaaataaataaaaaccagcacattttctttcagatttccacgctcagtttcgcaaaattggccaatatgagagtacaacatacaacgtaccgtacgactacctcagcgtaatgcattacggtaaggagtccggtgcgcggaggaacggtttgacaacaatggagactatggacaaaagataccaggcaactgtttactcatgaatgcctgataactattttcaaaattgaaacccacagaatttgattggcactgtcaaagacgcttctccaagtgattaccgtaagatctgcgcaatttataagtgcacaaaatgcatggggagagaatttaagtacggcaatgcataaatcaaatactactttttcttagacttgaaaattacttttcaata

SEQ ID NO: 76506 - DNA, 916 bp, Heterodera glycines
atgtccttggttgtggtcaagataaatgatcagccttgtcgagcggtgattgccacaaatttcactcattcattttgcgggtcgggcatcgtcaattcgctgaaactaaacgtcagtttttgccaatctttgcatattttgaccaaaacgactacagcaaattttgcttccctttctttacaattcgatcaaaccgcaggtgattgacttaaacgacgcaccaacggtcacaacgagtgaagggacaccgattgaattccttggccaggctctcgtccaattggagttcggcccgtggcacagcgatggctttacaccgcttttaatcgcttacgattgtcctgccgatatgctaattggtcaggatctgatcaacgtaagacgaaaggatgagcaaagattcacatgcacttattcaaggaaatcagtgcgacattgccaataaaattcgaataccacaaaaactcggtgaatgttgggggtacccgagtttcaatgcttgatccgatggccgccgaagagaaattcttttccgtgcgcgtggttgatccgcgaaataacgaggcaagtgatcaaaacaagaaaaaaaccaaactgacaaatgcaggaaattggactggagacatggaagaagggggcgagagagagcatcgaaatgggaggaatggtgaagagacgagtggaagtgacaagggaaccaaacgccgaaaaggaggagggcgaggaagagaaagaaaagggaggcatagaggaagagcaaaaggaagaggaagaaaagaaaggcatgcaggaagagcaaaaggaagaggaagaaagggaggaaaaggagaaaggctattatgagcaaaaggagggagaggatgagagaaaggaagaggaagatgagagaaaggaagatgatgagaggaagggatga

SEQ ID NO: 76507 - DNA, 852 bp, Heterodera glycines
  unsure (1)..(852): unsure at all n locations
atgggttagagtcccatttcttctgattattttaaagcaaatattatattgaaattattctaatttttgttttttttaatttattttttttattaattaactttatggtattttaaattaatgataatgattttttgaattaataaaataataaatatttttaattaatagaataataaagtctaaattaaatattaaaattaatcgaataaaaattaaaaataaacaaatattaataaaaatttaaataatttataaatctcaaaatgagttaattttaggattagacgaatccgggtatttgggcaaaactgggtccggatatttccgggtccagcaaagccgggtccgggtccaagtttttaaaccgggtacgggaggaacagaaagtggaagaggaacagaaagtggaaaggaacagaaagtggaagagaaagtggaagaggaacaaaagtggaagaggaaaagaaagtggaagaggaacagaacgtggaagagaaacagaacgtggaagagaaagtgtaagaggaacagaaagtgtaagaggaacagaaagtggaagagaaagtggaagaggaacagaaagcggaagagaagaagaggaacagaaagtggaagaggaacagaaagtggaagagaaagtggaagaggaacagaaagcggaagagaagaagaggaacagaaagtggaagagaaacagaaagtggaagagaaacagaaagtggaagaggaacagaaagcggaagagaaagtggaagaggaacagaaagtggaagagaaagtggaagaggaacagaacgtggaagagaaagagaacgtggaagagaaagtgtaagaggncagaccattaaa

SEQ ID NO: 76508 - DNA, 1558 bp, Heterodera glycines
atggatcaacgcccaactcaaactgatcaattaaatccaggaacagaagcatcaagtgggtacgagaagccagaagaacaaaaaaatggttagtatttggtgtttggtttttaggcttttatagttaacgcaatctttttagtccaattgattttcgaagaagcaaaggcttcttttttgactgcaaaatccaaaatcaaggatgaaattgcaaataaagaaagtgaagtgtcaaaacgtatttacggattggtttctgaagcgggtgcggctctacgtgatgagcaatttgcacatgagtcgtttgtgcaacagatcaatctaaaactccaaccggaaaaattgcgcttgatccaacttaaaaacaatcttagcactctgaaacatgcttacaccacgaaaggttggtatttttttcattttttaatatgaatttttcgtaggaaatatatctgcgggtgcgctggatgaggttgctgatcttggccaagcaatacagaagcaaattgactgtcttacgaaagtggaggtttcgtgcgataagcagatcaaggcagagaacgctcgctaccaccagaaacgcactgaactttggatggccattctccctgatattgagcaattagagggttcgaaaaaagaatttttcaattcacgtttctgtgaattacaaaatttggcccaaacaatgaataaagcccgaaaatctttgcaggtggtttaactcgtaaattgtacaatcttttttattttttttttaggtgggtacgattcgagaaaaagccgaccaatgcgacgttcatatgcttgaagaagacaaagaaaacaacgatgtccatttggtgggtacggaacaaaaggaaaccgatgatgatattattgaatttgatgaacactgattggttaattgttacaaatttaatttattttattttaaacgctgttatttcgaaaaatcataaatactttcaaaagcatcgtggaacttcttaactactgcttatggaatttgttgatactccatataatacgacctcaaatttacacagctgttccaaagttgactgaaatttaactaacatagaataacttggtcagacttaaagatatatcaaaaatttaagcttaaacttatgttttgctttcttttaataacttatatcatttcaatttaatttaacataattattagtgtactgcatacattacgttggtcagaaattgacattatatgcccaaataactttttaataacaaatatggtttgttaagactttctatcaagtcaattttattctaaatgtacaagaaaaattaagcggcgggttcgaatatgacccaaattttttgcttttgcctgtttaacatctaacaatccgtttcttactcgcccatttatctaatgtgataacaaattgccaagtaattagctgatcgttatttatcaaaaactttaaacttgactgcaacattttagcatgattccaccaaagtacaccttgcccatgttgggcatcatgctttttttcgggttatgctttggtggaaatgcaataaa

SEQ ID NO: 76509 - DNA, 2373 bp, Heterodera glycines
atgcaagaagcctgtgccgaaatgaccaacctcaagcggctacagcactactttgcaatgctgcttgcgcacgcccatccgtccaaccctcaggcgctgttcgacgagttcctcgacgagatgaacccacctgttgccgccaaccacccaggagctgtgccgaagtcagctgaagtccgcgcggctgaggtgatgctcaaccttgagtattacctcaactgcatggggacgaacaccaagtgagtaaagctggcataatattgtccatataatcattatttttaagagatgttgggctgcaaggactgccagtgggctacgactttcaacatcaggcgcagctcctggaggaggacaacatcttggacagcttctatggggaggatgctcggcaacgctgcaaaccaccgcagcaagttgccatcgagcagattggacgcctcaacccagatcaacgggccgcctttgatgagatatcaacatcaattcttggcgggtgcaaccagaagctgttcttcctcgaaggcgcgggcggatgcggtaataacggcttacttatttttctaaaagtataattaattgctaaagttaatttaggcaagacgtacttttacaacacgctgataaagtggtgcatcgcaggcaagccctccttggatggaaacgccaacgcacagtgggtacgcaaccaagaactgaagcggaactcagctgttgccgccgccagcaccggcatcgccgctctgttgctgataggcggtggaactgcacacaggcacttctacgtgccaaacgacgtgtcgcaggagacgccgccgatgctgaacttcgagtcggcaaaagcggagcaactgcgccacgcacaactgatcatcattgatgtaaacaaaaacataagtttgcttttcgttcatgataacatttttaggagattagtatgttgtccaacaccgtgctcgactacattgaccggctgttgcgagacgtttgtgcaaatgtcacaccgtttggcaacaaagtggtggtgttgagtggcgactggcggcaactgactcccgtagtcgagcatggaactcgtgaggaccaagtgggtacgtcgatcaagatgggagcgctctttcgtctgttcaaaaaaatcaggtttttttgtctactttgttttttacaaacatatttatgttattagcctaacgatcaacatgcggaccgcaccaggagaacaatcgttgcgcgattggctgcaggaaatcggcaatggaatgcaccgcgtgggtacggacagccaaggcttcaccaaccaactgcgcattccgcccgaacttctcgtggacgacctcgaccacaccattcacttctgcttcccagaagcactgtttgacgacccgctggccaacgcggacgcaattgcccacaatgccatcctctgtccgaccaacaacgacgtgcagcacatcaatgaggtggcgcttggcagaatgagcgggtgcggaagggaattcctgtccatcgacgaacctctggagcctaacgaagagatgaacaatttccgcaccgacttcaacatggaggcggtgcacaatgaaatgccgtccggaatgccgccgcacaaactgaccatcaaagtgaactcttttttgttttgataattttttaataaataaatccaggtgggtacgcctgtgatgctgatccgcaatttggacgtcacccagggactgtgcaacggaacccgacttcaagtgatgcgcacttcggagaacaacctgttctgccggatcctcaccggaccacgagcgggtgcgcagaacatcatcgccattccccaaattcaattcgaatacggccgcgcacggcaccaccgtgggctacgattccgccgtctgcagttcccggtccgcctttgctttgccatgaccatcaacaaggtgaaagagaataaaattcatacaattatctaaagaaatacgtgtacaatttgttaaggcgcaagggcagacactgcagcggatggcactcgtgctcaacgggcgccagtgcttttcgcatggccaggtgtacgtcgccatgtccagagtcacgcagatggatggcatcagggtgtacgcgccgttcagccaaagtgggtacgggacgcacatcgagaacgtcgtttaccacgagctgttggacttggagacgcagcagccgaggacaccgaatcgtggactgatggacgtggacaatgacccggacgcagcaataccggacgtgggcccaagagtaccggacgtggacaatgacccggacgtggaacgagataatggaaacgcagcgggtgcgaacgatcaagaaccaaatgatcttgatagttcttttgatgatttttttgattga

SEQ ID NO: 76510 - DNA, 2149 bp, Heterodera glycines
atgccttcaaaagaacagagacgaaaggaagctgatcgcttgcgacgccgtgctatacgaaacactccagacgtggctaatgttttggtgggtccgagcacaagcgaccaacaatcttttcaactaaatcagggttttggttctattagaaacgaaattttaataaatagatatagaaccatctacctcaaccaatgtccaagcacaaacacaaccacgaagtgctgttgaacctgctgtgggtacgtccccaatggatctggacaccagtgttgtttcgactccgaccaccaccggattacgggctttatctattattggaggtctttctttaagctaaatttcaactaaagcaatatatataaaacaattgacaggctctacaaataaaagaacccgtcacagttcaaacgtgggtacgtcaaacaatgcaactgaacacacggtacagcaacgagaggatataagtcacgctgaaagcgttgcaggttttttgagtttattttcccataattttctacaaatagttacagataatcgacgtcgcaaatcagcaccaacgcttcttgctgcgggtgcgaacacaccacgttacacaagcgctaggcgtgcaaaggttttggattcattgtttttgtgttatttctttttcagttaaatagtaattttaacggttttagctggccgaacttaatgtgacgttgctcgaagaacgcatgcaaaaggtggtccgagattatttgtcaagggagtggccaaagcagcctgtgatagcgcaaaaacgtcgccgctcaacgggttaaactgtttaaattataatatacgaaacacataatttacagatgcacgatgcactcgctgtgggtccggctgcaattgtttgtcgtattcacaatgcctaaaaaatgccactgccttcattgctgcttgggtgtatctgaaggagttcacgcatggcgtttttcctgcaccaatcttttttaccgcaacacgtaacataaagggggtccgtccgactgaacgatgtcaccggaacaccttcttgaagtgtgccgcacgttcttccgggcaccgagttgataatcagttttatattgtttaaaaatagaattatagattgactactatgacagtggtcagttcggtgacgcgttttgtggacattgctgtgcacgtcttcttcgtggcgaaaacgaaatcattaagcgggggcggcaaacaccttgctgtgccaatggcgcagtgcacactggacaaatggtggccgaatttcacgaactccaacagccgcctcctgcctatttacatggattggtggatgttgacgacgagagggttcgagatgcttttctgaacaacaacatggcgttcaacaacctgttcgcctttgcctccacacatggcgaaaaagcaccaccggaccaaatgggtggtcggttggatacatgcaaatataacggttaattagtcgtttagtaatcaatttaattatacttttacagggcagttttcattcctgttcagcgaccttattgctccgggagtccgtcgcccgtcatttgctcaagtttacacattgtcacccgaagacgctttggctgtccgcgaagaggcttttgaaaccgctgtttcaccacatgtcaggcgcacaatcatggagagactggaggcgctgatgcgggaaaacccatttggacagacctttcaaacagtgggtacgaaggtacaagcgactcgtgctgcaactggagaagtcccacacttcagagtaataagaggatatatatatgaaaataattttttaataataaagattgcactgctcacggatcgagacttgaaagggggtccgcttcagggacgcaatgatatcacagtgattgaacgggtggatgctcccactgcaaagcaggtcgctgtgatttgggttcaagaggatggtcttcctccccaaattagcggtaataaaaaacattacaatgaactctaatttaaaatattagcattctgggtgtccgacaaggccgggaagatgcgcgagctgaagagtggcatgccgcaaatcgacccgtgctgcttcccactgctccatccactcggcacccttggatggaggtggtacatgaagaaacgtgggtccgaggtataa

SEQ ID NO: 76511 - DNA, 3094 bp, Heterodera glycines
ggtttgaaaaggcctatgtccgtgttgcacagccaagaagatcggcgcaacagtgtagaaacgatggtactgcgggtgcggacgaagtgtacgactacgacgagattgcagccaccttcaaagtgcgctacatgacggccatggaagcataccttcgcctgaattcgtacaaaatcgtgggtacgtcacaccagatctacactctgagcgtccacgacgagctcggccaaacaattgtcgtcgaagaagggcatgaagaagaaggacggtggagggttcgagaaaacacacggcttacggccttctttgcactttgtgcaagagatccgcatgccgctcagttgacgtacgaccgagtgccatatcgctacacgtgagttaaattagaacctattaaatttaatgtttttggtgtttagttgggacttcaagtcgcgagcatggaggaagcgggtgcgtcaactggaagaagacccgcacaaggcgaaaatgttcgtgcgtgtgtataccgtgtcaccgcgcaagcatgagctatttgccttgaggtaataaattaaaatgaaaagttaataaagctgtaaaatagaacattgctcctccaccgtccgggacccaagagctttgccgaccttcgcaccattgatggcatccaatttgacactttcgtgggtacgtgccaacatttgggtcttcaagtgagcgacgaagtcttccgccgagccatgcaagaagcctgtgccgaaatgaccaacctcaagcggctacagcactactttgccatgctgcttgcgcacgcccatccgtccaaccctcaggcgctgttcgacgagttcctcgacgagatgaacccgcctgttgccgccaaccacccaggagctgtgccgaagccagctgaagtccgcgcggctgaggtgatgctcaaccttgagtattacctcaactgcatggggacgaacaccaagtgagtaaagctggcataatattgtccatataataattatttttaagagatgttgggctgcaaggactgccagtgggctacgactttcaacatcaggcgcagctcctggaggaggacaacatcttggacagcttctatggggaggatgctcggcaacgctgcaaaccaccgcagcaagttgccgtcgagcagattggacgcctcaacccagaccaacgggctgcctttgacgcaatctccacatcaattcatggcgggtgcgaccagaagctcttcttcctcgaaggcgcgggcggatgcggtaataacggcttacttattttaataaaagtataattaattgctaaagttaatttaggcaagacgtacttttacaacacgctgatcaaatggtgcatcgcaggcaagccctccttggatggaaacgccaacgcacagtgggtacgcaaccaagaactgcagcggaactcagttgttgccgccgccagcaccggcatcgccgctctgttgctgataggcggtggaactgcacacaggcacttctacgtgccaaacgacgtgtcgcaggagacgccgccgatgctgaacttcgagtcggcaaaagcggagcaactgcgccacgcacaactgatcattattgatgtaaacaaaaacataagtttgcttttcgttcatgataacaattttaggagatcagtatgttgtccaacaccgtgctcgactacatcgaccggctgttgcgagacgtttgtgcaaatgccacaccgttcggtaacaaagtggtggtgttgagcggcgactggcggcaactgactcccgtagttgagcatggaactcgtgaggaccaagtgggtacgtcgatcaagatgggagcgctctttcgtctgttcaaaaaaatcaggttatttgtcaactttgttttttacaaacatatttatgttattagcctaacgatcaacatgcggaccgcaccaggagaacaatcgttgcgcgattggctgcaggaaatcggcaatggaatgcaccgcgtgggtacggacagccaaggcttcaccaaccaactgcgcattccgcccgaacttctcgtggacgacctcgaccacaccattcacttctgcttcccagaagcactgtttgacgacccgctggccaacgcggacgcaattgcccacaatgccatcctctgtccgaccaacaacgacgtgcagcacatcaatgaggtggcacttggcagaatgagcgggtgcggaagggaattcctgtccatcgacgaacctctggagcctaacgaagagatgcacaatttccgcaccgacttcaacatggaggcggtgcacaatgaaatgccatccggaatgccgccgcacaaactgaccatcaaagtgaactattttttgttttgatcattttttaataaataaatccaggtgggtacgcctgtgatgctgatccgcaatttggacgtcacccagggactgtgcaatggaacacgacttcaagtgatgcgcacttcggagaacaacctgttctgccggatcctcaccggaccacgagcgggtgcgcagaacatcatcgccattccccaaattcaattcgaatacggccgcgcacggcaccaccgtgggctacgattccgccgtctgcagttcccggtccgcctttgctttgccatgaccatcaacaaggtgaaagagaataaaattcatacaattatctaaataaatacgtgtacaatttgttaaggcgcaagggcagacactgcagaggatggcactcgtgctcaacggccgccagtgcttttcgcatggccaggtgtacgtcgccatgtccagagtcacgcagatggatggcatcagggtgtacgcgccgttcagccaaagtgggtacgggacgcacatcgagaacgtcgtttaccacgagctgttggacttggagacgcagcagccgaggacaccgaatcgtggactgatggacgtggacaatgacccggacgcagcaataccggacgtgggcccaagagtaccggacgtggacaatgacccggacgtggaacgagataatggaaacgcagcgggtgcaaacgatcaagaaccaaatgattttgatagttcttttgatgatttttttgattga

SEQ ID NO: 76512 - DNA, 669 bp, Heterodera glycines
atgattttggaccggctcccggatattaggggaaatgaaggcggtgattcaatctgcaatttcttcaagaagtactcacagtacacagccgattggtcaaacaaaaaacgaatcgaatcgttagaggcaaaactaagcggtcgtgccgaaagagcttataatgccgctttggccaatgaaccatttgtctatgaaaatgttaagagaaacattttgcaacaattagaggacaatgattgcagagaaatgagcgcatttaatgacttaatgaatggggtcacacgaaagcatggcgaaaacttagacgatttggccgacagaatttcgagcctagtgcgtcgtgcttatccagggctaacaagaaacctggccgatgagtattccataaaacaccttatccgaagtttgaacaatccagatctagcattgaatttggagctccatcgccgtaacggaatgtcttttgatgaattcgttgccttggcttctcgtgcagaagcaacccaaagggctacaaaaaggcaaagtgcggaacaccgaccaaaccaggaacgaaaatatatgcacccaagcgaccgcgaagttgaaacaaatttcaaaaatcagttaagacccaatccagttgtttgttacaattgtaacgaacctggtcatatttcacggaattga

SEQ ID NO: 76513 - DNA, 612 bp, Heterodera glycines
atgccttcagaatcagataaaagaattgcgcatgaaatgagcatgcccacctctgattttttgcctaaatccaacaaaacattaatggacgacatcgaacaaaaggcacacaaattgtcagatcgcgtcaaacgcgaactactaacactcttcgatgaaaagcaaaaccacgataaaattgagcgagtaagttttaataattgtctaggccataattttggttttttacaaaaaatttagtgttcaaaaaggctactcagaaaaaaagaacaagttattcttacaagaaatgaacttattgcgtgagttttttttgctttcctaccaaatccaacattgttggttatcattaggaaaaaaagctgttttagactgtttggccgtcctgtttcgtccagcaaacgttgggacattccacctgaaacaacggcagaaccaaatttcggacatttttcaatgctagaaaagcactggtacgacgagaagctaaataggcggacatatatttccaacatcacacgacgagtgagcagagggatatagccccccccccccgaacctataaatgaaaatagaaaattttcaaaaaacagtagtttagtgcctaataaa

SEQ ID NO: 76514 - DNA, 2191 bp, Heterodera glycines
  unsure (1)..(2191): unsure at all n locations
atggacgacatcgaacaaaaggcacacaaattgtcagatcgcgtcaaacgcgaactactaacactcttcgatgaaaagcaaaaccacgataaaattgagcgagtaagttttaataattgtctaggccataattttggttttttacaaaaaatttagtgttcaaaaaggctactcagaaaaaaagaacaagttgttcttacaagaaatgaacttattgcgtgagttttttttgctttcctaccaaatccaacattgttggttatcattaggaaaaaaagctgttttagactgtttggccgtcctgtttcgtccagcaaacgttgggacattccacctgaaacaacggcagaaccaaatttcggacatttttcaatgctagaaaagcactggtacgacgagaagctaaataggcggacatatatttccaacatcacacgacgattgagcagagggatatagcccccccccccccgaacatgtcgcggattattcgatttttaagacccgaatgccttcagaatcagataaaagaattgcgcatgaaatgagcatgattttggtaaaaaggtcaacacctaatgcaatgattagaaattttaaatttagatttatgtgttcgatgtattaaaaaagcaaaaatgggcatatgacgcaaatcagcccacctctgattttttgcctaaatccaacaaaacattaatggacgacatcgaacaaaaggcacacaaattgtcagatcgcgtcaaacgcgaactactaacactcttcgatgaaaagcaaaaccacgataaaattgagcgagtaagttttaataattgtctaggccataattttggttttttacaaaaaatttagtgttcaaaaaggctactcagaaaaaaagaacaagttgttcttacaagaaatgaacttattgcgtgagttttttttgctttcctaccaaatccaacattgttggttatcattaggaaaaaaagctgttttagactgtttggccgtcctgtttcgtccagcaaacgttgggacattccacctgaaacaacggcagaaccaaatttcggacatttttcaatgctagaaaagcactggtacgacgagaagctaaataggcggacatatatttccaacatcacacgacgagtgagcagagggatatagccccccccccccgaacatgtcgcggattattcgatttttaagacccgaatgccttcagaatcagataaaagaattgcgcatgaaatgagcatgattttggtaaaaaggtcaacacctaatgcaatgattagaaattttaaatttagatttatgtgttcgatgtattaaaaaagcaaaaatgggcatatgacgcaaatcaacccacctctgattttttgcctaaatccaacaaaacattaatggacgacatcgaacaaaaggcacacaaattgtcagatcgcgtcaaacgcgaactactaacactcttcgatgaaaagcaaaaccacgataaaattgagcgagtaagttttaataattgtctaggccatcattttggttttttacaaaaaatttagtgttcaaaaaggctactcagaaaaaaagaacaagttgttcttacaagaaatgaacttattgcgtgagtttttttgctttcctaccaaatccaacattgttggttatcattaggaaaaaagctggtttagactgtttggccgtcctgtttcgtccagcaaacgttggaacattcgacctgaaacaacggcagaaccaaatttcggacatttttcaatgctagaaaagcactggtacgacgagaagctaaataggcggacatatatttccaacatcacacgacgagtgagcagagggatatagcccccccccccgaacatgtcgcggattattcgatttttaagacccgaatgccttcagaatcagataaaagaattgcgcatgaaatgagcatgattttggtaaaaaggtcaacacctaatgcaatgattagaaattttaaatttagatttatgtgttcgatgtattaaaaaagcaaaaatgggcatatgacgcaaatcagcccacctctgattttttgcctaaatccaacaaaacattaatggacgacatcgaacaaaaggcacacaaattgtcagatcgcgtcaaacgcgaactactaacactcttcgatgaaaagcaaaaccacgataaaatntga

SEQ ID NO: 76515 - DNA, 1481 bp, Heterodera glycines
  unsure (1)..(1481): unsure at all n locations
atggacgacatcgaacaaaaggcacacaaattgtcagatcgcgtcaaacgcgaactactaacactcttcgatgaaaagcaaaaacacgataaaattgagcgagtaagttttaataattgtctaggccataattttggttttttacaaaaaaatttagtgttcaaaaggctactcagaaaaaaagaacaagttgttcttacaagaaatgaacttattgcgtgagtttttttgctttcctaccaaatccaacattgttggttatcattaggaaaaaagctgttttagactgtttggccgtcctgtttcgtccagcaaacgttggaacattccacctgaaacaacggcagaaccaaatttcggacatttttcaatgctagaaaagcactggtacgacgagaagctaaataggcggacatatatttccaacatcacacgacgagtgagcagagggatatagccccccccccccgaacatgtcgcggattattcgatttttaagacccgaatgccttcagaatcagataaaagaattgcgcatgaaatgagcatgttttggtaaaaaggtcaacacctaatgcaatgattagaaattttaaatttagatttatgtgttcgatgtattaaaaaagcaaaaatgggcatatgacgcaaatcagcccacctctgattttttgcctaaatccaacaaaacattaatggacgacatcgaacaaaaggcacacaaattgtcagatcgcgtcaaacgcgaactactaacactcttcgatgaaaagcaaaaccacgataaaattgagcgagtaagttttaataattgtctaggccataattttgggtttttacaaaaaatttagtgttcaaaaaggctactcagaaaaaaagaacaagttgttcttacaagaaatgaacttattgcgtgagttttttttgctttcctaccaaatccaacattgttggttatcattaggaaaaaaagctgttttagactgtttggccgtcctgtttcgtccagcaaacgttgggacattccacctgaaacaacggcagaaccaaatttcggacatttttcaatgctagaaaagcactggtacgacgagaagctaaataggcggacatatatttccaagtgagcagagggatatagccccccccccccgaacatgtcgcggattattcgatttttaagacccgaatgccttcagaatcagataaaagaattgcgcatgaaatgagcatgttttggtaaaaaggtcaacacctaatgcaatgattagaaattttaaatttagatttatgtgttcgatgtattaaaaaagcaaaaatgggcatatgacgcaaatcagcccacctctgattttttgcctaaatccaacaaaacattaatggacgacatcgaacaaaaggcacacaaattgtcagatcgcgtcaaacgcgaactactaacactcttcgatgaaaagcaaaaccacgataanattgagcga

SEQ ID NO: 76516 - DNA, 1015 bp, Heterodera glycines
atggagcaggacaaaagggcccttgttcaaaagccggtggtcttggtaatgccgggggaggaggggacgagaatgataagagatgccgagggcggaagggtaaatatgctaagagatgaaggggagaagggaggcgagaatgatcagggaatctggaggagtgacgagttgattaagagggaggggggagagtatgatcaaaagctactacaacagagaatcttagccgattttttttatcaaataagatttaagaaaattctaaaaaatttctacaaatttcattaaaaattcaaaaattttcttcggctgtgttataaaaagctaattttctcaaatgcgctaattgaacgacatacatttaaacaaacaactcaaattccaaaatttattttaatttctttccatttttaggccccaacagatgaggactgtggagacgatgcggaaaaagaattgtccgaggcgttgtcagtggtcaacaaaatccgaatgggcgacgaggaggaaattgagtcggaaaatgtcaatacttcgacggcaccgttcactctgtccatcgccgaccttccgggcattttggatgatgcgtcgcgcaaccggtggggccaaaattgccacaaaagggagaagagggtggccaattgagcaaaatgtgtggcattttgtgtgaatcgatgtgggattttgagtccattttctactttttgtagccaatgcaaaaagtggtcagtcgctggcggcaaaaatcataaaaaatataataatttttccagtaaaactttttttaaaataatttatttaaacccctaaaattttggcggtctgttaaaaaaaaggatcgtcgacaaaaagttttgaaaaatgaattaattaagaaaattacatagaagtggacacaacaccaaaaaaaattgttgcaaaattatgaccgaactcttagggaatcgaacccgcgagacaatcaaaatcatgaaaagttttggttaaaaaaatacgattttttgcaaataaa

SEQ ID NO: 76517 - DNA, 1389 bp, Heterodera glycines
atggccacagcgaggagggaggatttagcagtaggacggacaggcaaaagagcagcgacaaaaaaagactattctcatcagttagccaaagaagaagagaaaggggaattgggtgggacagaagcggacggaggatgcgccggggggggggaggcgggcggcatgggaaggacatttactcaattgcagcgcccgctcaccgatggatatgagacgtaaatggaaaatcagatccaactgatacggtagaaatgtaatggattgcatatgagcaagaaaaagtaagcatccaatggaaatgtctggacgcgggaaaagtgtggccgctccgccctccgcccaccccccccccctatacatggatggggcaaggccgtcttcatatgcattcaattcacttccattttacctcaatcaaaatagttatttcaaaaatgttgtttcattattttttcactttttaacgaaaaagtttaagaaaatcccaatctaagttttttttctgttcatccacgaaatggagcaggacaaaagggcccttgttcaaaagccggtggtcttggtaatgccgggggaggaggggacgagaatgataagagatgccgagggcggaagggtaaatatgctaagagatgaaggggagaagggaggcgtagcaccttgttacccgttaactactttggtatattatttttatatgtttttaaaaaattcaattcatttatttgacttaattagtaattagtgtttttaagaaattataatagttttttaaacgaaattgatatatttcaatattttaaaattattttatttggatttactattttcattgtttattttttaaagtgaaattatatcaattataattttgcataaataacaattttcttattttattgaccatattgcaataatttatagaatgctattacttaattatttatctcgcttttctgtgtcttttagcattttcaattaacataaaataataatgaatataataatctattcgttatttttaatattagcttttcttgcatccgtgacgttttttttcataatcagttctatatttactttttgtaaattttaacacttgtatcatttcaatttttagtttatatcacagttatattttaacacttttgattttatatcattgaaattagcaaattttgttttacatattaaaaagcaaaatgtaatagaaattgctcattttatatttttattatttcttttcgttcatcttctataatgatcaaattacaacattattatcattaatcttttatgatgaatatggatgtaatatggtaagaaaaattttactgaaaaagtcacaaattcagtaaattattaaaacccattaaacattttaataaa

SEQ ID NO: 76518 - DNA, 646 bp, Heterodera glycines
atgattaatttattcatttataattttttgtttatggtggtaatttttaattatatcttaaaatgataaaatatttcaatataaactatttttaattatttatttaaattctcattaattttattaaaactgcggaataaacccatgtttttaaatgaaaattataaaaaaaaattaattcaagtgatctcggcaggaattttttgtttgtctttctgtgccaatcttttttttttaattctccgaatttcttttaaaattcttcctaaatggaaatctgtgggaaagcttttcgtaaaatccgccaccttgggcgtttcgtaaaatccgccattttagcgactttttcgacaaaacatgtcataactttgcttaagagcaaccaacttttacattcttggtaccattctatagccaaactttgtctctattaacaaaccaaatttaagaaaatttgggactgtctcgataacgatgcatgcgaatattacaagtgtccgttcggggtactcaaacaattatggggagcaaaaatccaacgcagaattaaagtacaggctatagggaagctattccggaaagattcggtctccccataaatctgggcgcatcggttcggggggactgccccgaaaacaaaaataaa

SEQ ID NO: 76519 - DNA, 724 bp, Heterodera glycines
atgacgcaccaatttatggtggcaaaatgcgcttatcagtttaaagtgccgcaagttgcggtaaaaaaagacatttttaattaaatggttaattaattaattataagtttcagtcggatttttatcgggacaatgtgctcattttctatgagaaaaatccaatcattcctccagtgaccgcatggattgtgttgccaaacattttcacaccactttcgatcattttcaatctttccatcattttgctaacaattacaacaatgtaataaaatttttaattaggtttttttaatatttttcatttcaggaaggaccgcaaagtgtgtaattggaatttaataatatgaattttatataaattaatttgattataatttagcaaggattatcggactgcgtacaaaaaggcgtttacgcaacgaaaaaacacttctgctgcagttgaaccgctttttcataggtgccaaattgtggcggtttcaaattagcgaaattgaaatttggcgcacattttggacaaaattaatctactgtagagaaaaatcagaattaatttcatgaattattcatttacaaaaagttaaagatcactcaaaaacgaacaagtgttaacattaattgacaagctaaactgctgcatcattaattgcttcatttaatattccatcaaaaaatataattttatcagaatcgcacttttttattacgccattaacataataaa

SEQ ID NO: 76520 - DNA, 154 bp, Heterodera glycines
atgatgcaccaatttgtgatggaaaaatgtgcatatcagttcaaagtggcgcatgttgcggcggtaaaaaaatacatttttaattaaacgggtaatttaaataattataaaatttgagtcggatttttatttggtcacaattacaacaatgtaa

SEQ ID NO: 76521 - DNA, 102 bp, Heterodera glycines
ttcttaactttttaatttttttatttctttcggctaatatcttctacaataatttgtcagtttggtcggatgtgcgtcaaacggaaaaaataattaaaattt

SEQ ID NO: 76522 - DNA, 67 bp, Heterodera glycines
cgggcctggacgttttcgcgtggccattttcgcgtggccgttttcgcgtggttgcatataaaagaga

SEQ ID NO: 76523 - DNA, 2586 bp, Heterodera glycines
atgcacaacgcaaaacgcatcatcagtgaatttgtcaattatgcggacatccttgattttatggcatggaatggagacaaactttgggatttcaattcaattaatttcaattctcttgcggttggttttttaattggccccaaaataaatttatttgggtgcttttttgagtaacgcccattttgatgattttggagttaaaaatataaaatacgaaaaaccgacatgtgtttaatataatttacttctattttattgtacatatatagagagaatttataatgttttactatttaagcttgcgcttcctgatccgccaaatgatttgccaaaagaaacaattggtaaaccgaaggatgtgccaaaatccaaaattgaaaaaccattcaatatgccaaaaacaataattgccaaaccgaatgatgtgccaaaacagaaaaatgccaaaaagaaagcatcgaaaaatgatggggggcaaaagaaagaaaaacttgttgttagccgaccatcatcacccaatggagtgccaattgagtttgaattggaaatcaatgaatacactaatggacaattgatcaacaaaaacactatttctggacaatgggacaaaaggaatgagaaaatcattgatgaaatgttaaaaaataaaaaagttggtgtcacacaattggggcccattcagtcaaaagcaggtatattagcacaaagatgaaaatcagaaaagccgcgtatctcaggcaaaaaagccatttttcagaaaaaattatcatataaccagatctaagatggattttgccgcttaaatggcaatctttgaaagttttttataaatttttatttaagccacaaatgagggtaaaacctcttatattggggcaaagtaattaccgaaaaataatatttatatttacatgtttcacgggaaaaattatttttaaaattataactgattgataaactttttagacattttgccattaaaaccaggacagttcgaaactgaatcccattttttctctgataaccatgcgaacagtcagcaatcaactgttgcatcaacatcgaaaaatcaagtcagaaatttttaattaattaaaaaataattattttagaaatctaaaaaagtgcctgagcgtctattaaaacattccaagtcaatggccgaatttagaacaacgcaaaactcaaatgagtcaataaatgtatctgtaggaccaaataatataaataaaccattggaattaattgagtaaaaatttttttagcaaaaatttattttaaataacaatatcgaggctaagaagataaacgtgtatggagatgggaattgtctgttcaggtttagaaattttcatgaattgatattataatttttaaatcaataataaatattatagatcgacatctttctatattagtcggtatataatcaaagtttttgatatattttttatgtcccaaaattttttggtttctgatgaattaggtccttcatatcttcagtcttagatagaatgctcaaaatgaaaagaaattgatgttttaatagattcagcggataattttctaattaatattataatctacgcttccggtcattaaaatgcgattttattgtattcaaggtcatttgccgtttcactgtatgacgatgatgatggcaaagcgcataaaaagttgcgcaaagctgctgctgagtcattaatccaatttgagcaggactcgtcacgcagttccgaggacaaaaacaaaatgaaagcaataatccgagctaatttatctgaaggcgattcaatgtctaattaccataatagcattgcggaatatgccacttattacgtgttaaagaacagaaattatgctggcgttgcggaatgctatgcattggcaatccatttaaatgtatgcaatgaaaaaaaagaaaattaacagaatttagtcaaagttccatataggctcgaagtaattagggttaattatttggccgtaaataaatattctcctactttgcataagttttgaattcttaaatttttcttgacataatttttctaattctcaagcaatagatcagttacatttttaatcacgaatttttcgaaaaattctaaaaattttatcgatatatcagatttggctccgaatctgccttcggaatgaaatttaatccacaaaatttttaaaatcatgaaagtaaacaattaattagcaccaggtttttagtttaattgcataaaatacttcttaattggtgctaaaaataaattaattggttatattagttttattttgtaatattttggttaacaaaggaaatgaaaaatagttacaaaaaaagttgcttctactttttttagcgtaatgttgcgctcgttaacagcatacaacacactgccattgttcttcattctaattttactcaaacggcaatttttttaaatttaatttttattttaaacatttaaaaaaatttttcaggattataacaatatcaccagtgataaatataaacaaatttgggaattggttgatgatccaattgtgatttggcatgatggggatgagcatttcaacagcatttgtttg

SEQ ID NO: 76524 - DNA, 1165 bp, Heterodera glycines
tcaccctcagcgggccgttcggggacggcacccaagaatggcacaccaggagggtgataatgatagagagggtaatccttgatttaatttgaaatctttcaattgcaggtcgttgtgtttgttggtggtggcattggcataacgccgtacgcctccacgctgatggatttggtgttggagagggcgtcgggcaaccatagtggcataaagtgccgaaaggtgtgatagaaaatttatttttattcaaaatcaattccattttttacataattcactttttaatcattattttgaaattaattgaattatttttatttttcggcacttttaaataattattttattttaaaggtttatttcctgtggatttgtccgacgcataagaattttgaatggtttgtcgacgtgctgaagcaagtggaacggcatgaccaggacggcatccttgagatacacatttttgtcacacaattcttccataaatttgatcttcgaacaactgtattggtaagcagattgtctttgtttgacagatttgattaaaaagaatcagcttaattccgattttgaacttatttatcaacaccctaattagtcatcggagaattcgtcactgatacatatacatttttgaaaaaataatacgataatccacacttttgcctgaattatagggacagaaacctgattttatcagttttcacaattttatcaaggctaatatgttttccaaaagtttgaattcattaacaactttagtgccaatttactaaacaacttcaccttttacaatacaataaatcactgatcgaatataatatattatttagatgtaatattcactaagctaattatgctcattagtctctaatttgttgaacgtatatatttatcacattttcaacagtatatctgcgaaaagcacttccgcggtgacaacagcggcatcagcatgttcaccggtctgcgtgccaccaaccatttcgggcggcccaacttcgactcgttcttcaaatttttgcagcaaagtcggcacccggaagttgccgagatcggcgtgttcagctgcgggccggcccaggtcaacaaacaaattagacgcgcctgcactgaggcaaatcggttccggaacgcgccgtcatttgtgcaccgattcgaaacattt

SEQ ID NO: 76525 - DNA, 1639 bp, Heterodera glycines
atgttcaaagatctgttcccctcgctaggcttctgtcccttccatgcccttttgtgggtgctcaaaggctatttaatattccgttccatcaaattcttcgaaatctttgtgaggagtgtttggggtcattttttcacaagccctctaaatttggccccctacaaaaaaagttggacaggtataattaattaattaatcatcatttggacgttccttcgacaaattcacactttcagtggtgacgggctgcacggatggcattggcagggcgtatttggaggaattggtggccacaaaaggaattcgaaaattgtatctgatcgcgcgcaactcaactaaattggaagctttgtgctcatatcttcgtaaacaaatataaaaattccgattaattttggactttaagaggaaaattacgagggatgcgaaatcaaaagagcgatttttgattttgagaaggatgattttgaaaaattgccaaccgagctgcagtcattggaagtcggcattctgagtattcgcttttgctattgtttggcatttccatttgattgccttttgtcctcagttaattgtgccgggacgggccccgaccaagtggccaacttcgctaatttgccccccgggctttcgtctgtcattctgcgcgtgaaccttctctcttgtgttaaggtgggtatgcttttgccatttgataatcactaatcacttgtgtcctccccccacccaaatttccctctcatttctaatcaaaagatgatcgaactgatccttccgggaatgctgcaacgcgaccgaggcatcgtcgtcaacttctcctccattacggtgttttcccatcgctgagattcgaataatcagctgaccattaatccgttcagggatggcgtcccctcccttatatgtccacttatccggccaggtgaccgcgtaaatccgatcaaaaaaggcaatggcaaatcctttcaagcaaagcagcgatcagcttcttcaccgactctctgggagatgaatttgcccacaccaacgtcaaaattcaagtgcgtcgtttcttctcctaatttggccctttctctatttttgctcttttttcagtgtcttttcccacttttggtcgcaacgaaattaactcaatacgctgcagaagatgcaaatctgttagtgcttgatgccaaaagctacgcacgacaagcagtgaatataattggcaattatcgaatttccacgggatgttttatgcacgacatgcaggtgaaaatagagactgggtgagaagggaggtcgagaaaaagagagtagaaaaagagtgggagaaagagggaggatgagaatgtcatagagagagatagagataagtgaggaagagaaagagggagataagggagagagaggatgagatattaattaagatgacgagaggtcattagctaattataaattcagtaattcccaaacaaatttgtttttcttttttcagatagcatttggcagttttattgggttcaatttgttcaaacttttttacgttcccttcggcattctcggaattcacaaaagaagaatcgatgcatacaacagaaagaaattggcaaacgaaagaaaaagcggaggaaaaggagaaggaataaagtcggaatga

SEQ ID NO: 76526 - DNA, 991 bp, Heterodera glycines
atgccttcagcttataacccggctttcaaagtggcgaatccgacaaattctgtcgaattgactggaaatgagcagcaacaactttcacagaaccaaggacagatgcaatcagcagatgaacagcaaagcaaccgctcaaagcaagacgcaagtcaaagggacgaaaaggggacggacgacgcccgaggggaggcagcggaaaagcccaagcagttcggagttacccagcaacaggtgaggatggtggactaaggccatgaatggtcatattgtgtggattaaggcccagaagttggaccaaccatcggtgatcggaatgaatccactgcagatgagggaccacctgcggacacagctgaagaagaacagaaagccgtggaaccaaccttaggaagaaaaccattggaaacggagggaatggacaattttaaactctcagggaacgatgcgatgatacctcattaattacgaatgaaagcctttttttgcagaatttgagaagtgaataaacttagagacagataaatgaatacaacaagagctcagttccacaaaaatattcaatttggcaacctccccacaacagggaaagggatggcgctacttgcaaagagccctcttttgaattttatcaaaaactaggggggacccttttgttttgcaaaaaattttttgatagaaaaccatgaaaatttgttctacggagttttagtcgtcgctgatcacgaatctgacatttagattttttgttcaaatttaggtcaagaaataggaattggtcaaaaaactatatcaatttatctcttcgaacaatcgcctgaacaatgtgaaacataaaatttgtcacgaccaattttaaaattaaaaaatgtaatattaactcaattaggaggctaaaaattcccaacagtcataattgttaaattactcattgattgcccattgttttattgccgtttcttcgtgtaccagtcacaaagtattgaatgaa

SEQ ID NO: 76527 - DNA, 534 bp, Heterodera glycines
atgaaggaaagatggccccataacaacagtcatccctccagtggtggatgtggtctagtggctaagacaacggatccacgtaaggggccccgagcgtctaccccaatttttcgcctaaataatagcaatttactcgctaaatttatgtttttggttttcattgcaatttgcagctgaaacaacaaatcatttcatcttttatcttcactaataaaatgtttttaattaaggtaaaacggactgtttcattagtgtgaaagatttatggccaaaacaaaaaattgactttatctgactttttgagtcaaaatgccaactcgtaccaaaatgagttttgagaaaacgaatcctagacatagaacacaaacttaaatttcaatgattaaaatttgtatacgagttggctacaacgaatttttacgagtgtcatgacacctgcactcaataactttttggccaccgccgaaatgactccgaccctttgattgtgagagcaatcgtaatccgaatttttcatattacataggtaataaa

SEQ ID NO: 76528 - DNA, 1976 bp, Heterodera glycines
  unsure (1)..(1976): unsure at all n locations
ccgccgacaattttttccaaattgctcgctgttccgacaagatcgtaaatcagaattaattcatgatttaacagtacttgaaaacttttcaacatccgatcacaaaatggtcggatttaaaataaaagaaaaattcagtaataaaaatcccagagtttatagaagagattttaaaaatattaattttgcaaaattaagtcgagcgatacttgaaaatagatttgatgtttctataaattcggtgtataccgttgaacaaaaatataacgaattcttaaataaagtactgaaattatatgatacttttatacccaacagacctctaaaatcgataataaaacaatcgtaccctcaaaaaataagagacttattttcagagaaattacggttacataagcttgtaaaaaaattcccggaaaaaagtgatctcatcttaaattacaaaattatttcaagggaaatgaagaaacaattaaaacaattcagaaatgaaaaagagtcaaaaattatttcccaggggcaaaattcagttaacaaatttatccgaaataagttatcaaaattttttgagattcctactctaattgataatgctggaaatatgttttccagcaatgtacaaaaatgtaaaatattagcagaaatatttcaaaagtcttttttaagaaaatcaattgttaatggtccacaaactcagtcaacacagaataagaccaagctttttgacattgaattgaacgctggcataatttggaacatattaagaagacttccccggcgtaattccacttcacctgataatatcccttatattttattaaaaaattgcgcagatccaatcacaaaaatattagcagatatatttaggctaattttggattccggtcaaattccggaaatatggcgaacatctttggtagtatcaattttcaaaagaggcgaaaaaactgatccattaaattacaggccggtttcattaaccagcactgtctgtagagcttttgaacgaattttgagtagtaaaattttagaatttctgaacagtacaagattctttgataaagaacaatttgggttcttaaaaaatagatcgactacaactcaaatattaaaaacgatggacgatatatataattctatacaaaagaatcaacaaattgacataaataatctatattgattttgtcaaggcgtttgattctgttccaattgatttattacttcaaaaaatcaaaaagattggaattgaaggaaaaatttataattttttaactaactttttaaaaaatcggagttttaaggttaaaatcggcgatcaattgtcagaaagtttcaaaatatttacgggagtgccccagggaagtgtcttagggccattactctttttaatttttataaatgatctgccgtcctttatttcaaataaagcatcatcagttggcataaaaatgtatgctgacgatgttaaattatattatgcccatgaaaacgatgaccattcaaatcagttggataaagcggttgaggctttggaaaaatggtcaaaaataaatgggttagaaatttcaactgaaaaatgttttgttctttatttagggaaaaataacaagaaaaaagaatattttattaactcaaaaaagatttcagaatcggaaagtgtacgtgacttgggaattataattgactcgaaacttaatttttcagaacatattagcaaaattatacgaaacgcatatcttagaattttccaaattttgagagtgttgaaaagcagggaaataaaaactctaacagcagcctataaaacttttgtacgacctcaattagaatacgctaccaaagtttggaaccctaatttaaaaaaagatatagataaaattgagcgtgttcanaaaatttttcacaagaaaagcacttagaaaatgtggttttgtgtacaaaaaatatggggaaagactaaaaatcacgggtttaca

SEQ ID NO: 76529 - DNA, 602 bp, Heterodera glycines
caaagctgaagtccagcggatttgggatgtttttgtcgatggaatttggcccatttttgcgccaaacattcgccatttgagccttgccagctatgaaattcattacgatatttatgagcataagccaacgccaattgagccatttgaattggtgaacgaacggaccaacgagaagctgacattgaaaaaagaagtcgcttccttttttgcaattagtcattgggtgttgaagcgatgtccaattcttggggagacggcggcggttcagcagcagcagcagaagaaagacgaaaatttgtgccgtttgaacaatgtctccgtttttatgctttgtaacactaattgcattgggtgaggagcaacaattttcctttttttttttgttgaaaacattcaaattgccttcaatttttaggcctttgtctccaccggcagaagcagcagcagaaagaacgggccaaagcagcgaaaagggcgccgtctgattatgtggaaatgaatttttggcacttgatagaaaacttacaaattaggtcgatcattttttgtatgaaattattgatttgccatattttaaagtttaaactcatatttatttttaa

SEQ ID NO: 76530 - DNA, 1059 bp, Heterodera glycines
atgggcaaaatcctatcgaaactatttggcaaaaaggaaattcgaatattaatgctcggattggacgcggctggaaagacaagtttgtggcacttcacattttttaattttcctcttattaattgttgaaatttcatttttggactggtattttatcaaatcaaaaataacatttcctgtctggtcaactaaaaagaaattggtgcctttttgttctaatttgctattaaaaattccaaaaaatttacaggtattctctacaggctcaaattgggccagtccatcaaatccattccaaccgttgggttcaatgtcgagacggttgtgtacaggaatatcaaattcagtgtttgggtaagaaaaaaagtaaagcaaaaaaaaagaaaagaaatttatggatttgagagaggaatttcagcaaaaaaatgtcagagacacgccaaatccagtgattttcgtgcttaatttctgagccccgagtcgaaaaaaaacccgggatttagcagaaataaatgccatgcggtgatttgggaccctaaaaccacccgcgggttcatgttttatattgtttacttccacgggttcatattttaagttgtttacttacgtttaactcctcaattgtataaagttttcccatctcttccataaattcgaatttcttttggttcatttcgcttcccctttttaggatgtcggcggtcaggagaaaattcgtccgctgtggcggcattattacgtcggcacacaagcactgatttttgttgtcgattcggccgacagagacaggttttcccgacacaaaaacacctcgatttttctcatttttataaaaattttgtgctaagttctcacatttggggccatttgctgtacaaagaaattaaatgggtcaaaatttccaaaaaaaaacattttttttttgaattttgctaatgcattttattaattgggccaggattgacgaggcacgccaggagttgcacaaaatcatcaacgaccgggagatgcgcgacgcgctcatcctcatcttcgccaacaagcaggacttgccgcagg

SEQ ID NO: 76531 - DNA, 815 bp, Heterodera glycines
atgggcgagagcgcctctttcaaaggcattcccggtgggcggagttcggtgaaagctgacgaagcatacagcgatgttagtactccaacatcaatagagaaagaatgtgttactattgtcttactattagtactaagaaatataacgatttttaggaagacaaagatgtcaacaccaaaagcgaaaataattccacgttgggaaaaaagcgggtactgttgcagaattgcaaagaaatgttctggaactctcaatcgaaaatcagaaaaaaatgtcagatctcttgacaatttcaattcatttgtcatttattttgatcaattttagcatggatcaacatgtgatcaatggttaacgaagccagcagcttccgttgccgacaagatttttgacgaagatgatccgacttttattgttggtgataaaacatttcgaacattgtaataacagtgccgttttaacaaattaatgttatacattttggacatttatcacaatttatttttgaaattattcaaataaatgttaaacatttcttatgaagcatatgattaagttgttaaacccaatattttaacaagcatttcataatatttttgaaattatagccaatggcagaatttatggaaaacttagaacagaagaatagaaggggtgccaaaggattttacgttgaccctgtccttgaattacggtttttatctgcgggcgatcgaaacttcgaactgatcagacgataccgctttcctgatgaaggaattgatttcatttcaagtcttgtaaaggatgaccttcagccaaaacgatggcaataa

SEQ ID NO: 76532 - DNA, 493 bp, Heterodera glycines
atgcccaatttgtacggcagcattgtggacaatttggcggccgggttggtcggcggtgcgggcgtggtcaacggcgagtcggtgggctccgactacgtgatctttcagcctggcgcacggcacacattcaaagaggcgtttggaaagtcggagcaaacaaaaaattattattttttttacaaatttgaatttttatttatttccagacaaattgccaacccaaccgcgatgattttgtgctgtgccaacatgctcaaccatctccatttgaacagttacggcacggcactgcgacacgctgtggagaaagtgctcaaagagggaaaagtgcgcacccgcgacttgggaggtgtgtgtgccgtgccattcattcattactcaatcaaaatttcataaaatggcaccaaatttgtactacaatataatgttttttccaggctttgccaacaccagcgattttgccagtgaggtcattgccaatttccaaatgtga

SEQ ID NO: 76533 - DNA, 558 bp, Heterodera glycines
gcaaagaaaatgggacgaataccggagaaagtagcaaaaacaaaacgaagaaaaagaagaaggcgaaaaagacaaaaaaggaaaaaaacggggagaaagaaaatggcaaagacatgaaaaacacttttgaggacaaaatgtcacaagacaaagtgtcaacatttgatgatacgaatgaaaatgttaaaggtgacaaaatgtttacaaaaaattgggaggatcaattgtcagaggaaaaagagtcgacaaaaaaattttacgatacagtgtcgttcgctgtatcagagaaaatgccaaaaaatgatgccaagggaaattgccaaactgacaaagtatcaccatatgaaaagactgatgataatgatgacaaagcgctgacaaaaaatttggaaggaaaagaaaaggttgacaaaacacaaaataaggaaaaggaaaacaaaattaatgaagaagaaaaaacaaagcataaagattctggtactaatggtgaaggaactgttgcaaaaaaagaagccgctgttacaaatgccaaaaccaaaaaagcctatagaattgcag

SEQ ID NO: 76534 - DNA, 5610 bp, Heterodera glycines
  unsure (1)..(5610): unsure at all n locations
atggacgccaacaaaatgattcaggtgaagttggaaatcgtttaagcgtcattaatgaatatagttgtttaaacattttgtagaaaggctatgtgaagctgtggactgccaacaaaccgttgcctcctcaaaatgtgccggatttacagaaagatacccggcccaaagtaacggcggcgacagaggaaatgattttggcactgaaagtgttccaaaagtttcgaaagaacaaaaattgttgggcatctgtggaaaagaaactcttaaagtcgcaaacctttttgagtttggccgaacccaacggaaaggacgcaatgcgaaaagcggcggtgcgattgtgcgcagaaatggaagcgaaaattttggcacaaattgacgaaacggcaaagaaattgttggactgaggaggacgaattgacgagcattttaggaaaaagatcctttccgattttgattctttgatcagtgaaagtgcggtattgttcttgtaaagcgccatttatccacattcgctttaaaacattttctcttttttcattgtcagctttctcttccctttcttttcccacgggtccctctgtttaaacggaaacatttcctcgagagtcagtcagagttgatcaactgatgattagggaggcgattagagttccgggttcggaaaccggtcatttttgaaaatgccaatccggtccgatccggcgaatttttgaccggttttttcggattatgatctagctaagaattcttgatttattcatttttactcttttccaaaatatcttggatttcaatttcttaaatttggtaatacaatttaaagttttatgtttcttgattatggctgaaattaacaaaaatttttcgtgtttcgttttcgccaacaaaaaactttcgttttcggattctaaaattttaaattttcatttcgttttcgtgaaaaataaatattttttcgtttctttttcggaagttatttttttggttttcgcacgtctctgaatggtgcccttttgattcaaaagcgaacccaatcagacagtatgatgtcatgaaccttagacagtaaacttcgtcaagaatgactatcggattcggagaaggaactctcgacctctgtcgcttatggaaatacaatagaaattggggttggttgacctgcactggcaaaaaaattttgtttaaaattttcgaatgaattttgaaaactttttagtgtttagaagaattatttcttgcagtgcatttacgaatgtgcagaagaaaatcaaaaaattggtccatgtcaatgcccaattcgttcaaagtgaccgatcgctgctgcttctccctcatttccacgctgagcatccgatcgatcaccagggagaagtagcgaagccgagaagcggaaaaactcacctgaaaagtgccgtcgcagcaataaaatttgaacaaaatgaattattaaaaataaaatggcaaatttcaaatacaaatcaacattattcgaaatgatcggcaattgtctaatgcaattaattaattgatccncaaataattaggcgacctttcctccgctttgtcccgcttcttcgtttgttggtggacacaatggcctaaattaagcataatttaatttgatgaacattttaacaatggcaaatgccgttgttcacccaatgcaattcttgccaccataaaatcggaagaataatccattcaaattgtttgctcatctcgagccaggcagtccggcgaagccctggcacttgaattgttcagccttgcgcatggcctcgtccgaaaattcgatgtccgaggcgccgtaaattatgtggcgatgatttgcgattcagtactttcttccaaaagatgacgtcacaaccgaacccggctttgctgttgattttgaccaattgcagcagatgaaatgaggcggtggtcggcggaggaaagataaattcgcagcttttgaaccaatagaaaatattggtcattgatgagatgagtgttagattttgtattcggggaatgtaaattttcggagactatcgtcaacttaaatttggataatcctttttcagttcagttcatttctttttcaattttgtttgatttggtttttacttggcaattaattcttttttctgcttcatctctacacactgttggctcaatgtgttcgatttgctgccgtcctttcagcttggctttggcattgctctgatcagcgcccaatttgaccacagagtggacgaattgttcaaaacatgacgatggacattggacaaaatgggaattcgaagcaaaattggaatgaattgcactttttgaaattaaatttaattggacatctaaaatttttcttttcgtctacccctcccttctttatgcactatttcgttccaaaatggtatcaaattttttttgtctgtttttatgaaattaaaatataaaaaaatatacaaaagttactttcgatttaaattttgcttaacactgcatttaatgcccaccgtgagcggctccccttttgtgcactattttcgtttttaaaattggttccggattttttggctttttgaaattaaattgtaaaaatgcaaaacaaactctctgaagaaatttcgggattttcagaaccatcctattgacggattgggacggtactcttcccacatacatatggtattcggcctggtgccggtcaattggatactgttgtactcgggttgtgaatgggtaaggaccatcttgcgccggttctgaacatttgggtccttccttaatcactgccacacccacaaagtcaaattccgcgtccgcccgaagtcggcggagtgggggacatcgacactgacggtgccgctgtccgatgacgctccgtgaaaccctccggggcgtgccaattgtttcgttttttgccatccagagagattatttgtcgccctgattttcacgaatcttggaaagatttcgcttcttgttaatgtcatcagtctcgaatttagtagaggctcttcagcaatgataaatccaagttttagccaagaatattttgaattatttaaaaaaaatcccttttcgcagaggtgtctatttgagccaaatctgactcccaacattttgttgaattcaaaaattttttacaattatcgaaaattttaagacttttgaatccgcatttataattattaactaagcaatcattttaccaaataattagtcacactcgaaatcccttaaatatttcagcctagcaggattgaatcagtcgtcgaaactcttaaattgtctttgaatgccattgcgctgatttttggcgtctatcggtcgcgtcgcatccactgcattttcagaggccaacattctcaaccccccctccccccccccagtcgtttatctcaattgctcattggtcatctattccatgccgttcctttgaaaatggcgtcgtttgttgtgctctttgatcattggtcactaattggtcattaattgcccattaggacgccaatcaccgcacattattcactctcaattcattaatttcctccaatattttcattttttgcactttgtcctccaattcgaaaaaggttatttagcgcagtgtgcgtggcttaagcttttattaatggaagcataatttttcagatgtcctacctacgattcagcgccgaccaactcgacactttgccattgtcagcgttgctccgcgagttcagatacctcattggcttgaaggagcattttgagcgcagagcagttgttcttgccgagcgcgtttttggggctgatgtcatcactttggaagatgagcagaatttgcggcagctggcaaggaatattggccagttgagagcatctttagatacaattaaaagacggctcggctttgctgtggatgcgggcgctactgattcggagtgaggaggagaggcaacaacatcttaacccaaacggccctctttagggccacaaatggacaaatgaacgtaaatggccaatgtttttcgtgaagaataataataaaattgttataataaaagaatataaataataatctttaaataatatggaattttttgcaaacttggggcgggtttaggcttctaagtcgacttttttcatgccaattttttgctatttctcgatttttactttttgtgctgatttggcattttggtgctggttttgaggaattttctaataaatttcagcatttaaaaaattattaacaaaaatgcaattaaaatgaaaactacaaccctaagaatcgatctgaaaaatctcagaaaaatacaccactatggaaaattttaccaaaaattcatccgaaatttatttagtgcccggcactccgttgtacactcaatacggccaggcacaggaaattgcgatttttgtggtgccgcaggccgactcggacaatgccacgcagcccaaaattcaatacgctttccgtggccaattcgcgccctttcgactgccccacgttttgcgctgttgggccaatcaggtgacggaaattggcaatcagaaaaaaggggggaattcggcaaaaacccaaaaaatgccaaaacaaacaaacaaaatttttactaattgacacaggtttatgtcggagagattgccaacggggaaggagtgttgtggtcattggaaatccaaccggaagcggccaaagagtcttttgctgctcggggacgcgaaatgttggcgaatcccatgcatttgagctcaccaaatcatggtaaaaaaggagagagagacgggcatggcaaaggcacggaaaatttgggagggcaatacttttttttgacccactttaatgcataaaactttttaaaaaatataaaccccatgacaatatcaaaattttatcgcataatttcaggcggatcatttgtattttcaaatgacatacatttaataattttttcttattaaattttaaaaatcgtaaataaaccgagacataagtcaattaaaataaattccgaatttttcatttgtatttatttaaatttacacattacattataatcgcttcccccattttccgctttcgaattcgcagacgatgcccgtcgctttgaagggtacagcaattttgtgtacggctcgtccgccctggtgctccttttggtgttgtgttgcggttgctgtgccctttttctgttgctgtggcgcttctgcttcgaccgcgctgagcaggacgcaatggacagaaaggtgctgcttctgcacgccccaatttttctggatccaaattttgtgtcgtaaaaatgggatttatcgaaaaaaaccgtcgtcatttgttttctttttccacctcccaccttatagcattgttattggtccatgtgtctttttgtgattaccaaactgtgtgtaaaatggttgagggacttgggggctttaaaaaattaaaaaacccaagggaaactcctccccttttttttgatgtgccaaaaattgaaaaccaaactcatttgcagggtttcaagccgttgcgcagcttcgagctggtggaggacgacgacgagctggtcagcgaggagagcgacattgagggggacgaagagaaaggggcagcaaaagcccaagcgaaagggacagacg

SEQ ID NO: 76535 - DNA, 303 bp, Heterodera glycines
ttcgaagcattgacttctcgagattgagaactttctgaggcttaaggccgagaatgtcctcaagactgacaatgggccctgatgagtcccgggctacgcacggttcacagtccggaccaacaaaaatattttagagttcgattcacacggagttcagttaaatcgaacatttttttcgggattcatcatgcacatcagccaaaagttaaatcacttttgaaattgcatatcaattagagattaccactccatccatatcaatcggcaattcatttttctaattaatttttgtatatatgaatt

SEQ ID NO: 76536 - DNA, 1252 bp, Heterodera glycines
atgccatttaaaattgacattttgtttgcgtgcgcacttttcattgcggcatctgccagcccaattttgccaacttcggcagatgcaaaagatgccattaaaccgtcggatgatcatggagatgaaatttcaacaccaattagacacaaattagtgaaggacacggatggtgaggaaacagccaataaacgggcattccgtaagtaaaacgattaaaaaatttgaagaatttatcacgaatttttgtagtttttgatggacaaacgccattcactcctggagtaatgccctttgttcccggtggaatgccgccgaatgttcctggaacgagcccaatgattcccggaatgatgccgagtgttcctggaatgatgccgagcatgcctggcatgacgccgaatgttccaggaacaagcccaatgattcccggaatgatgcccaacgtgcccgggatggcgccgagcgttcccggcatgccacctaatgttccaggaacaagccccatggttcctggaatgccgccaaatatgcctgtaatgccgcctaatatgcctgggatgatgccgaatatgcctgtaatgccgcctaatatgcctgggatgatgccgaatatgcctggaatgcagccaaatatgcctggaatgcagccaaatatgcctggaatgatgccgaatatgcctggaatgatgccgaatatgcctggaatgatgccgggaatgatgccgaatatgccgggaatgatgccgaatatgcctggaatgatgccgaatatgcctggaatgatgccgggaatgatgccaaatatgccgggaatgatgccgaatatgccgggaatgatgccaaatatgccgggaatgatgccgaatatgccgggaatgatgccgaatatgcctggaatgatgccgaatatgcccgggatgatgccaggattcactccgcagtttccaggtatcaatttcaataataatcttattaatccatcgctcaacccaggaggattcaatcagatgccgaatcaaattggatgaaaaacattttgacaaacttcgatcagtgataacccagcgatataaatttcacttacaattaaagcatttcatttttttttaattttcaaacaaaatgcttataaaaacttataatttttgatttgttatctttcagaatcatatagtaatattttttttgcataccggtaaattgtttaaaaaatacattaaaatggataaaaaacattagaaattattgatga

SEQ ID NO: 76537 - DNA, 144 bp, Heterodera glycines
agacaagcattcgagtccacaaagaagggttttggacaaacagtggtgctcggtgtcattgaccaggagctgaaaattccaccggacatgcttttaatgggccgcacaattaaaggggcaatttatggaggtgtaatcaattag

SEQ ID NO: 76538 - DNA, 1266 bp, Heterodera glycines
atgaaaggtttgatggatgccggcaagaaagcgttcggctgtacgcgcaaatgcatgaacaccaaggcgggcaactgcgagaagacactcaagtgggacagagatttttttgaaattttagaaccagggaaatttttgaaaaattcattcctcatgggtttgatggcacatttttagccgtacaaattgccggaaaaatgccgtccattttcatcccctcttccattcttcgttaaaatttcgcgccaaatattttgaatttgcccaggtgcggcttggacttcccgccggacaacgtggcggtgcaggaagtgaagaagtgcgccctcaacagcggactgaacaccgccaacgcgcaagcgctgtgcaaatgcgcgtccgccgcgggcgttaagtgagtgatctaaatttgttttgtccattactcgagactctcgagttttcaaacacaaaatttattttgggataagaaacatctctgctggttactattagtcgagttatgcgggaccgggaatctttggaaaagcggggaactggcttttcaaaaattctgggacctgaggaaaccgggaattcccggaccggtcccgcttaattctaattgctagggcttttcgggagtggaattctcgaaattttgggacagagactctcggaaactgtcctaatgatcgatcacctccgtctagagatgatcacataaatagcatcaaattgcatacaaattgattggccaaactaatcgatcatttttccattttcccaggaatttgacgccagccatctgcgcaaaggtcaaagtcacctaaacaagttcatgtcgtccgggcgctgctgatgactgactgatcagtgtagtaacagagagatgagcaattttagtgatcgattgaccgaaatcccccaaaatgttttgacaccggtgattgatcgatagttatcatttatcattttggtggtcccttccaccccatttgtttcccatgacatcacctttttcaatttaacacaaagcatttctctcttttcactggcaaaattgctttttcttatctgtagtaaaaaaagaacatccaatcatatggcacgtgtcataatgccaattataaatgccaaagacaaatggctgcattaaataggggaatggcttggtatgaagcttccaagatggatttctatatccatattttatggccatattttgcgatttttatatccatacatcaaagaagcgaaatttaaaaatagtcataattcaagtta

SEQ ID NO: 76539 - DNA, 299 bp, Heterodera glycines
atgtacaaaaaagccaaggaatggattaaattggaaaaagggcgtgaaaaaggaaaaagtgccgcgagtttttatgacccattttggtcactctggcattttaccttgatgacgtggtgagtgcaataaaaatatttttatttctatttattattaaaaatataaatttttttagcccaaatttatttaaagttaaaaatcataatcttccgattttttgctttagcttttctgatatgctaacaactctattttaaattatcatattttacattcaaaaatatttttatttccctaaa

SEQ ID NO: 76540 - DNA, 361 bp, Heterodera glycines
  unsure (1)..(361): unsure at all n locations
atgcgctttgggttgccagctgtgaagccaatgtttcaaactgtaggaaagatacggtatataatacagtatcaaaatttggcacataaattatatgcacttttaggccgattattctgaatttgagagctcttactaatgaatttgacagattatctgaatcgtattttggcataggcaatgatgagtcatcaccaaataatctccacttaacaaatgaacatgaactgaactacataataacaggtaatgaatgattttgccgaataatttttattgttnaagcgattgctntttcattgctaatacagaaaatttataattcttaaattaaaaaaaacaaaaaaaatttttaaaaata

SEQ ID NO: 76541 - DNA, 2305 bp, Heterodera glycines
atggacggtgtttttatgctacgaatgttgacaattcatgcgggaattttggtgtgtactgaagttgtcgatgcgatgtgggaagactttatcgcgagtaataataaaataaatgaattaaatcataattagctttaaaggcaaattaatacattccaaattttaggcctataaataaaaaaaattttatttgacaaagaaaaacattgaatatctgagactttttgaaaaaaaatcattttagttgttttttatttttatttttaagaaaatgtattaagaaattttatgaaaataaattttgcaaaataacaacctatacaaaattcttttcctattaatttagtttgagattttgaaaattcttttaacaatttaaacatgcattagaaatttcctcactaattttgcgaatttttgtttatggcaaataaatttttttttattttgcccatattttgggtattttattttccagccgtagttggcatttagtcaacataaacactcatcccaatttttatttatgaagataaatttttatttttaattattttgagattatttttttcgtattttgttgatcagatcgtctccaattgcgcaccgcggccaccgaatcgccgccggccgtttcgacgccgcccaaaccgccaccggccgtaatttgttttagcgctcctaaggcgtcttatgctgctactggtggtggtgtcgaatgcgtcaccgcagcaacaaccgcgtccgatccgacaatataccggcgaaagacaagcgtcctggtgccgttgcttagcgctgtgcaagagcagtgccacaaaacggaattcgcacaagatttgccaagacattccgccacatacacagcggcaagcggagcaactttggcagtcgcgtcccggcaaattttggtgccaccgcggaggtagacaacgtaaaatgaacggaatagccagcagggggccgtcctcggcgagttgctctgacgttactcaaaaacctcaaaaaaatgttgattttcttttggccataattttttcaaatttatacgaattttctgaaatttttaaggttcttagaaaaatcattgggctttaagttttatcaaaaattaaaaatataatttttgagcaaggttatgaataattttctgttcaaaaatttcattttgataccagacaatcaattagttcattcctatttttcaaaatttaaattattcagcatatttgaaacctcaaaaagtgataatttagcctaaaatttaaccttttgataatttgaatttttaaacagagaccaatttttgctgaaaactcccaatccgagcgaatatcattcggaacagcgacaagctcttcgccatttaacagtgagcagtgacaacaagccgtcaaatgttgccgccccattagtgccaaaatatcaccaattctcaatgatgtcaaagtgccgacaacgacatttggcgccggcatcgtatggcaaaatcggctgcagaagtcgaagacggacaagcagtagcaatggccaggggggcattgtgccgtcgtggagtgccatgttcggaagcgcattggcaccgttccaaaacagaagtttttcgttgaacagcgccgttgcccaacaactgccatcagaaatccccgaagtctcttcgtgtggagaagaagcatctctagttgaggtgccggctcaatttggcaacatttaattaagcaaaaggggcgtggcgaggccatggcgaaacggacaattagtaccgaaagagcttaagcaagaaaacatctctttttagtctttgtctcttaataggatctattatctatccaaaattcatcaaatttctgatattcaacattgcaaggtttagttttttgtaagttgtttatccccttttaaaacattacattttaaaaactaaaaaacattttatataattttcttattaattaccaatattttttagcattcaaatgttagcagtaaatcaattaaataactcttaatttttctaaatcgttttctaaagttagaagagggagaaagcagcagctgcgtaacaaatcaacgcccaacaaacgatgagaaaaaggaaagtaacgaaactgatggggacgaagaggcaaatgtgccgcgctgttcaacctcaaaatggcacggagaatgtgccaaaaaatgacaaaaccaataacataaaatgccaattcaaattttcaagaaaaatttttagagtgatttattcatgttttttgatgaaaatttattatgcatatgtatagaaatgtaagaaaatgcttattta

SEQ ID NO: 76542 - DNA, 1028 bp, Heterodera glycines
atgcatgaatatataaaccaagccttagctatgcaaaaattagaaattggtatcaaagaacgaaatatatttaaatgtcaagatgcagagattatatccgataccaatttttcggagataaaaagttatcaaaaaaagatagggaattataaatttaatatcaaaatgttgtataatgaaattagagtaactgcagtaagtcatttgtttaggcctgagaaaacaaatattttagtccatttcttacagaaagaaatagagaaatttttctattcgttatttcggcatatctaataaaatcgcaactttttttgcaaaaaaacgaaacattttcgttactaatagaatcgcatgatttttagtgtaatatttgagccttactgcacaaaagaccaaaaagttttgcaagtttgaaggtcatttactaatttcgtttgctgaatttgaactaaattagggttgcgtcagcattacaatgcaaaaagcgactatttaagaaactctaaattttcattactgatatataattttgccttcaaacattagtttatgctattttattttgatttaacatttcttttccacttttagaaatgtccgagcaaaatcaagggtccgatgatgttttgccaatgtgggcggtaccggattttgatgaaatggaccaaatgccgcagcggcaaaaacaaaaaaaatcccaacgttgaaggagtttcggcaccaatggaaggaacgaagacttctgtgggagagggaggaagcagaaaaaaaagaccccaaaacatggaagaagaggaccgatgagatgaagaaaatctgtgaggagagattggagcaatcaaaaggtgcaggcggcagcaacaaacgacaggagccggacacatacactcggaactgggacgaactactgcgccaagaaagagaatatttggacggggggctatggggaaaatgatgagataccccttctccgccctccagctcccctccccctcccgcttctaaatatgttgttgtttttaaataaa

SEQ ID NO: 76543 - DNA, 564 bp, Heterodera glycines
atgacttactgcagttactctaatttcattgtacaacgttttgatattaaatttataattccctatctttttttgataactttttatctccgaaaaattggtatcggatataatctctgcatcttgacatttaaatatatttcgttctttgataccaatttctaatttttgcatagctaaggcttggtttatatattcatgcataataagccctggtaatttttgaattttatcgatcatttctaagaatgaaaaatataaattttcgatttcaggggcactaaatgccgctatgtagaaatttttcacccgtttaaaaagcatatttgcaaaaatttcgagattatttgatcgtttaattatttttccagaaattttccaatttctcgtaattttgttttttataaaattaatttttggtctattgtcgacatctgggattatagttacttctagtgttatgacatcattcaaaggatagaaaagcgaatataattcttcttttaataggacatgttggaacaaaacctcggctgtgttttcgctagggcatctaagagggca

SEQ ID NO: 76544 - DNA, 453 bp, Heterodera glycines
atgaattctgaaaaatcagaaaaagctaataccattttggtggaagctgcaaaaaaagagacagaaagagcctggagggatgtagctgcgttagcagaagttggcgattttgccaaatcttctcgggaaacgcttaatcgtgcaataaaatctagggaaaaagctccgtatgctaatggtgttcgggaattatatcttaaaatgtcagattcaatttgggaaattttcaaaatcatggaccaaatcaatttggagtcaataaaggctgaatctgcgtggcgtgagttcgaaagatgtaaaacatttgaccaggcaacaaagtttgaggaacaatcgcaaaattcattaattgaagcccgaagattacattttgagtcccgaagggtgcagagccaaatgttaaattatgaaaatagactccaaacaattgtttgggagcatatgggtatataa

SEQ ID NO: 76545 - DNA, 1570 bp, Heterodera glycines
atgttatttaatataatttctttattattgttcttctcatattttgccgaaggtaatttttttcattgatattgataaatgctttttttctatttctattaattaaattatttatattttgtttttgatgaatatagagatacgttatttcaatgttaaatggtcaatttatacatttacaaaaaattggtccaaagtttaaatttcagtcattttaacgagtgatgacgaaaagaattcttttgcatttgacctaaagaagcgacttgaacaatttaaacgaagcaacaaaaatgaaaaagcaaatgagatggaagaaattgaaaataaagtggagagccaaattgaggaagcaattggacttatcaaaaatttgacgaacaatgaaattcaaaggcttcaaaattttaatgaatttggtaatggcaaataggaaaacatattgaaatcaattataaataatctataattgcttttaattttttttttcagcgaaaaactcaatcaaaatttaaaatgtaaaaatgtgagccgtgacaaaaaaaattaaaattttcgctctttagtgatacactttttccaatttaataaggttgatcgttaataattatagaaaaagtaaatcgaaatgccaaaatcaatgaaaaaggtacctagtttagcacaaaagtttgaacacaaatgaatttttatgttgtatatatatatatatattttatttaataacattaattaaggctcaagctactccttcgattctgataatttaccgacaaaagatcatagagcgagcagcaatacttttcatataccaaattgtgggattagaattggcacttctgctgaacataaagcaaagtctagaacgagcaataggaacaacaaaatgttcaacgagttggaacagcaagcggctggcatcaaacaaacattgtcggcacaaaaaactgccaccaatgagcaaccacaaaacactcttagtaacacacgaaaaaagttgctggaactccgagcccgaatggacaaagttggcattaaaccgatgcacaaggcaaactctggcgaagaacgaaaacaatcattgacaattagtccgaccaaatcgccaaaaggcattgttgtggataagcgaaaaattcaaagggacaaaatattaaacaaatggcgatggttgatgggaagtgttgtgttatccatgcaagaattgtacttcaatgccgagaagtcacaaaaatataaaccgattgagcgtcagttgttgagtgaaactttaacgaatctgaaactagcaaaacatgaagcatcgaaagattccgcacaaattcttggactgttatccaatgccaaaaaattctttgatcagtaccaaacacatagaaagaaactccagcaagctcagaaaattggtcatgaacatctttcggaagatgatgacctttaccaaagtgatttgggctcagagaatgaacaagaaaactcgggtaaaaatcaggggttgcctgtggtatttattttccgtaaagaaaaatggatgcttggtgcgataaaagatttcaaaaaagctccgtaa

SEQ ID NO: 76546 - DNA, 1789 bp, Heterodera glycines
atgtcaatgatcacagatttggaacgacttttggacagttggtattaaaaaggaatcttatttttaataatttattaaaatattttaaaatttctatataaattcaaaatttattttatcagaccaccgtccaactattgtccaaacattgtaccttataagacacgggcatcgccttgatatcattgaggggattgacgggggttggaagaagcaattggaatcgaaaaaggacttagtattgtccaatatatctgatcaagacttgccattatccgaaatgtctgatcaggacgtgccattaacgaaacacggttttgaacaagccaaagagcttggagaatggtaaataattattaaattattatggcaatgtataaattcatgccaaagtgtctcaataagtcatctgaattttgtctaagtggtcaaagagtgttagtctctataaaggcaccggttcgaatcctctccatgcagttcgaaatttcgatagttaaggactaaacctataacagggctgggatcgtccaagcccttttttcaagtacagggatgccaattgccaagtacataacgggtaaaatttgtgaaacacaagtacacatagaattttttcaacacataattaaaaaaatgcgtttttattcaaaggtttgttttggttcgccggaatgaatttttccaatatctttttgtttccactaattagttttctcatttcgcgacattttaggttcaaatcaattccaattgatcaaatttattcgtcgccttttcaacgcacagtcgccacagcaaatggcattttggagggcagaaatggtggcatttatttgaacattgagccgggcctaactgaggtacctttttaaattattttattaaaaccaatttaaatatttcagttctataaaccctgtcaacaaaaaattgaatatttgcatcaaaatgattcgtatcaactttttaaattttccaactcgaaatattcgtctgtatataacaaaaggttaaagaaatttttttcttaattaatacatatttaatacaattataaattagaatatctatttaaatacaaaatattaatataataggttgcttgagcttggaatcatgggacgacctttattaaaacagccaaaagaactggaaaatgaaaaagcaatcaaattggaaaaagaaaaagcaaaagaactggaaaatgaatgcaattctgttgttgagcaaacacttcgtcatattctaaggacaaacaaaaatggttttaaaattatttaatggaaaatttaaaataactatttttaactaatatataaccgtattcttactttttttcttatttaaaaaaataagtaataaattatagttttttaatggaaaattttttttaattcattgaatatttaaatattaaatttattgttttattatataattcctttttttaaatataattaaataaatttagccaaacacgttgtgttagtctcacatcttggcgtcattgctctcattcatgagctgctgagcggtgaatgggttagcgttggacagactactgtaagcaaatttgtacagtatgctgaaaaggacagtcaaaatgtggacgatgaattgaaacgattccgtttggaatactccagcggaatgtctcatctctcagaaacccattatttgcgcccacattgaatccgctgatggattgatgctgctgagtcatttcctaaattcctccatcatgagtttttgaccaaaatttcattagattttttctgacaataaa

SEQ ID NO: 76547 - DNA, 1071 bp, Heterodera glycines
atgaaacgagagcgtaatgtccgccgccttccgcaggatgaaaaaactgtgagagatcataaggcaagaaatttgcaacgcgatgacgttcatccagtggcagaaaagagcgaatgggtgtgcctgcgccaaatgtataagtcgtcccggcctctctctctctgctacattcttaaaaagcataatatttaaattaaattggatataaaattagatttaacaataactgattttttgttaactttcgattttggcatactttgcgtttcaattgtttgcctcgttttccgttatgaaaaaaataataaaccaaaaaattggagctgattaaaacccttcggtagtaaaactcgggaacaaaatggagcagttcgttgttcagttcagggggaagtttggtgttaattttgatgaatttcattagttttgggccaaaagtgttaataaaaggataaaaaggaccaattgggcttctgaaataaatttatgtcaaaacgcaatgaggtgatatttaaattggctaatttagtagtaaaaattcgacttgaacatacttcgttggcacacaaattgacgacgtaagggaaagccattagaatgaaaatgagtaagaaattggcttgagtctagaagaatggaaaatcactttgtgattcatgaaatgattgagttaatcatgtttagctttgatgggacttgcaccggaaagcagatcctggcttttgtgataaagccgaatgttccagaacaattttaggacattcgagtttaatagacccgatgaaaaaaccataggaacccttatcagtttgcaatgttttgtttcttttgcaaaaattatagacaatgtgagctaaaaaaatccaaaccgtagcaatttattgaatatttcacagaatgtatgtagattaaattcatatgttattatgtttgtctaagaaagcagacgtaattatcagttttatttgcaaaaaatattcatttgagaacatggtctgtttgtgtttgtgtgccatttgaatgacggactgccgacctctcattttcttttttgtttgtgagaatgaatga

SEQ ID NO: 76548 - DNA, 706 bp, Heterodera glycines
atgacttcactctacgcttgcggaggacttcactctacgcggcggatatacgcggcggaggatttcactctacgcttgcggaggacttcactctacgcttgcggaggacttcactctacgcggcggatatacgcggcggaggatttcactctacgcttgcggaggacttcactctacgcttgcggaggacttcactctacgcggcggagtacttcactctacgcggcggaggacttcattctacgcgacggaggacttcactctacgcggcggaggacttcactctacgcggcggaggacttcattctacgcgacggaggacttcactctacgcggcggaggacttcactctacgcggcggaggacttcactctacgcggcggaggatttcactctacgcttgcggaggacttcactctacgcttgcggaggacttcactctacgcggcggaggactttgtcttcactctacgccagcggaggtacttctctctctttctcgacgcggcggaggacttttcactctacgcctgcggaggtgtatcagcgtgcccggggattgaacttccactgacaaagtcattatccaatacactacacgggccgctgacaaattgcaatgtaaataatatttcaacataatttattataaaaaataattttccccgtttttttaaatgaaatggacaccaatttcacaatatga

SEQ ID NO: 76549 - DNA, 629 bp, Heterodera glycines
  unsure (1)..(629): unsure at all n locations
atgtcaaaatttccttcacataaattcaaatttaatattaaaattgagcacacagaatttggtaatgggacaaaatatttcttccatttatattgtgctaaacgcgaatacaacaatttttatgctgaaacaaatttgggtaaaaaagagggacaaatcgaattttgggacggaatttgtgaaaataacatgtacagacttggtgtgattgtcgcgcaaagtacagcaaatcagttgacattcttaattgaggtaattatgaaatatagaaggactaattaattttaaatattaagtgcattaatttatttttatattttaggaagatttttatgtgaacatacaatgccaaagactaatgctgaatgctaatcagcgtgacatcaattatgacctggacattaataaaaatggagcatcaggagcagaaataaaatgttatcaaacaaaggaaagaacagagtcagaaagtaacagaaagatttttagaaaaaatgaatttatttttatttattaaaaattaattaggacgccgaattggagacgatgtagcaggaccaagtgaacaaaaagaattgccanacaaaaaccgagtgccaaaaataacgcaggatttgttggcaaatttt

SEQ ID NO: 76550 - DNA, 982 bp, Heterodera glycines
atgaattcttctgcgatggaagtgcaaatcataaaggaatcagaggtaaaaatgaaattttcagatgcgaattttgaattaaaataataattaaaattaaaaatattatttttgattccagttgtatctgcatttcaaggacgagcgtccttgctggccatttattggcttgtccttgacatttggcatgctcgcaactgtggatttttattttgccctcattcaaatcgtcaatcacaatttggtttggcttggttatctcggccattccactggtgatcggtgcgatttcaaatgctccgattttatactagactaggtaaataaatagatttaaaaaattgcctaaatggcattcatattcatccattttatcagcagccaacatatttaaattagaagctataaatttttaatttaatcgaaatttcgaattttcagcgtcaaaaatcctaaaaataggtttataaaaatcagtaattttataaatttaataaataaaaaggaggaatagcatttaaaaattagttcatataaatttatgaaataataaattacctaataaattaattactgcgtttaaataagcaaaaaatctaaaaaaaaaaatccatttataattttaattaaatctaaatacttcaataattaatggaaacactttccagtaatgccgaatttgtgacatcaatttagatccataaaataaaattttttctttttttagttcgcactatcgcgagacatttgctgttgaattgaagaaattttcttctcttattggacttggcaacttatctcttggcaacaataccatcagcgctagtggtcaattatttcaaacgccagcaattcaactaattagtagtgctaattagcacgctaattaattgcacaacagagccacataaaacagaattaattacattgacatttaacaaccaattaaggaagacattcaaattttgtcatttatgtataa

SEQ ID NO: 76551 - DNA, 2060 bp, Heterodera glycines
aaaatttcataacattgaaacgcttacatgagcaaaatttgtcaatatatgaagcaatagaaatgattaaattatttcaagacaaagctggagaagacccgaaaggagttttcaacacgtcaaaaattattacggattcggcacataatattaggcaagaattcccttcaggcaatacaacgacgagtgaaaaaggtcgaaaaattgcattttggcaattctttcaacacattacaccaaatttgatgagaatgttagacaataatgcagcactctatatgagcatcgatgagaacaaacttctaaagaatgttataaaaaatgtgaaaaatgaaatagataaaaattttgtggaaatgtgagtgattttttttggattggaatgaattttaattggcatacctatactgtttttaaagcaattttcgattttcagattgaaagaaaagatacagaacgttgaattccatcacagtgcaatcgagggagaaattgcaaaatacataaaagaggaggttgatgctaaaaagaattgtgatgaacaattaaaggctcattattggtcaatgtgagttaattggttttcatgggactctatttttaattgtttattaaggcttgacgcaaaagaattagatgcggattcgtatctgaaagatattgaaaacgattttatacagattgccaatgataaagaaagtgaaaagaaaaaaatagagggatattttgaaggactgtgagtggtttgaacaaattttaatttatgattttgagttctctgtcctcttttcccatatttaatttaatatgttaataaaatttatttatttgcattttaaggcgaagaaaatgggatgatgtcatttcaaaagaggcaaaaattgaacttatgaaaaatattcgatatgatttggcaataaatttcgaattcaacccgagcaaaggtgagaaaatacacagcaaatgagcagggctgctcgaaatctgtctggaagaattaaaaaaaatttcagcttaataaccgaattttttcaattttccagagaatatacggttgatgtccaatttttaggcccacaattctttaccattaaaacagaaaaaatttattaagatatccatgaccgagtcaaatcaatggattttgatgaaaaactcaatgatgtgcgtcaaatttcttcattcgtatcgaatgaacattatttacccatcatagtaaatttgtccaaaattgaaattgtcaactataaatatgacactaaaacagcactggaaaagctacgagaattggtggacggaaccattaaagaacaagaaaatgaattggagaaggcaaacaaagaaaaaaaagggatagaatggaaaaaatgggaaactgatcgggaaaaacaaaaaacatcaaaagaatttgaagaaaacactaaggcatctgaagaaaacgacaagaaaaagcaaacattggaaacgaataaaaaagaaatggaaaatgaaaagagcaaaatggtagcaacaaataaagaatttatagcagtgatagaaaaaataaaaaacaaagaaacaattacagcggaagataaaaaagctctgcaaaatttgtgtgcattcaccaaatggtacataaatcataatggaacaattaacggaattgcaacgaaattggagcaaacgatcagcgaacaaaagaagaagcagcctaatctagaaaaaaagttacatcttaaaacaaaggaagaaaaacagttggaacaagtgaaaaacatccagcaaaaattgaagggcattgtggacaaaattggtggaattgaaaaaagttcaggaacgaatttgtgggaattttgtgctgaggaagaaagtggaaaagaaaaaaaggtggatgaacaaaataaagaaataattgagacaaatgcatcatcatcatcatcatcatcattatcggagccgaagcaaaaaaagagcaaaacgaaaaaagaggggacggcggacggaggaaaaaagagaacacatttattggataaatttggcggaatactacatcatgaagaaacggctgaagaaaagct

SEQ ID NO: 76552 - DNA, 926 bp, Heterodera glycines
atgtcgtttagaagtcatccttggattctcaaccaagaatttgaaagaaaagcaactaacaatgagtctgaagctttggatgcgacgaggcgttgcgccagtcatttggggccgcacctaaacaacaaaagcataaaaaaggaagtgggaaatgtaattccatcaaaacttaaggcaaaacaaaaaatgcattgctaatttttgttgttttgcgacaaaagccaaaataaaaggaatgaataaaacacaatgccagggcgtggatagagcttttttcgttttataagttctgcaagaaaaacttttttccctccaacatcaaaaaaaaaaaatttgtccaaattttcaatattttagacgggtaccactttaaaaaaccccaaaaatggcacatacaatggccccgcgaatggtctgcatggactgctccgccgcgtccgcatcggccgtgtcggtggtgcgcccgtgctcctgcatgccgcggtgccggtacgtcactgtgccctccatgtcgcccttcaaatagcgcacacccaacgtcatgttcttctcgcgcagcgcggacaacagttgccaagtgtcgaaaatgccctcattttcgaggcctgaaatacccattgaagcaactatttgcgccaaaattctttaaaaaaatttcaaacggcgcctttcgactcccccttatttttcctcaaaaatgtccttttctttttttttggattaactttgctagtaaccatttgctcgagaattttttcttcggctgcacttaccccgagccttactatttaatttttttaatattcctgcaaaaagcaatttaaaaatgctttttttgggtccaaaatcctatttttgacttattctatttttatctggaaaaaattgcgagcactgacttttcataataatttgcaaaattgcaa

SEQ ID NO: 76553 - DNA, 2514 bp, Heterodera glycines
atggtcaaaatttccgatttttccccggcggcgcctatcggcaccgtcatgccccgagaacttctatttattcaaagaaaaatggcccaaaatcgcaaaatttggtaattttttggagaaaatctgttaacaaaatacactcaaattttcaaaatctgttcccagcggcgcctataggcaccgcgggaccccaaaaactcgtatttttcacagaaaaattgtccaaaaattgaaaatttgaacatttttagtgaaaatctattaacaaattgtattaaaaaattttcccggcggcgtctaccggcgccgcctgcccccacttcccaaaattttttttgaaaaaacgcgccgcaaaaaagctttttattttgaaatagaattttacaaaatgctttatgattttgactattaaaaaagttgtagaaaaatttcgcgtttcgcaatttcgcgttttttggaatttcgcgtttcgcatttattttcatttcgcattttttactttcgcaaatttcgcgtttcgcattttattttccgatttggcccatccctgttccctaggcaaaaattgatcatgaatttccgtttagcatttccttcaccacgactttggcccccggtctgactcttgtttttttggaccattagcatcagagcatcactaattgggcgggggggggggggacgtacgacgccgactgacccaatttgtcatcataacttttttcttctcatcaattaaatccaataaatttgaagtcattcgaatgtttttcttgttttaatttatccttaagctatgtaaaaaaactgaacgaccgaccaactgcggaggctttttgatttggttgataaagaaaaaattattatttaaacaatagattttctcacagttattcccgcctctccagttattaggcgagcataccatcactataaatatgtaattaagaagcacacaaaaaattggtgtaaaaaaagagaattggtcaatttgctgttaattaattataaggcgcatcctttgatctgttttgaaactgaataaaaaagtcaattaaatgtaccaaagtgatcagatagaaagagaataaatttgctaaagtttgtccctttttccattgatgagtcatcggatgaacaatttcgatgtaccatttgattttttcagtaccaaaatacgaaaaaaaaaattttttttgcccaattttaaggtgaaatacttaatatttttcacttttattttttgcctaaaaataccgccccgggccgccggtcaaaggcgacatgaagtttgggcaccagaaatttgggcaccgggaagtttgggcaccagaaggagggatttcaaaaaaataaaacaaaaaaatatgtaaaatgttaataaatcattaaaatttagtaacctttaacaaaccttgtgcttaaaaacttgtattttcttgaaaattaaaaaatttaagtatggaaacctggcaatcttatttcgttaattcgtatatgtttaaacgtagagttaaacgtgtactagtttctgtttggacttagacctgaatacccggcttattgttagttgggcccaaaatatcaagagacccgtctaatttgggaaaaatagggttcggaccccgtgggcgggggcagcttttcgcgggggcgggggattgcgggggtcagagtcgcgggggcgggggtgagaaatttctcgcccccggggacgggggcgggggtttgtttttaattagctccaaaaaatctcacaaaaaattttttttgaaagatgtgtttggctccacattcctttattcgatatatcgcctcgattcaattcttttttggtataattgcacagatattgtctaaaaatgaccaaatttaaggattaaaattatgccagaatagtcaatttttatgggtgtttttgtctaaatccagggtttctatttcaaaattttcaaaataagaataaaggccaaaaaataagattttagggtcaaaaataagaacattttgcaaaattgcttcaaatatttttacattttattcgatcaaaaatgtattctattattatatttttcataaatttcagtgcattcgggatcactaaatcagatttttaacattttttgcggcacatttcaaaaaacttggtgaatgtgcgaggggagaggccggtagcgccgattggcgccgcaagcggaaaatttttaagactttatatgaattttgttagaaattagtcaatttttttttagaaatttcctttttttagatgagaataaggtacaaccccaaaaccagaacatttcttagaaataacaacatagaaaaaccctgcattatttggaaaaaaaatcaaaagaaaacgtaaacgcggtgtcgaactcataacaaaaagtatggttaatgttgaagaactaaccactaaaccataaatattttaaaaaacataagcaaatttactttatttcataaaaatttgtaaaaaattgttaaaaaattcgaaccctaaataaa

SEQ ID NO: 76554 - DNA, 695 bp, Heterodera glycines
atggcaaatcatttcaatcgtcaaccgttgctgctgtgcgttctgtcgctgtttgtactgctccaactgctcgctgtgctccgtccgccggccatcgatgccacggggctgcccagcggtggcggctgctgctgctgccagcaacaggcggcgccgccgccgcccccgcctcagcagagttgctgctgctgcggaggtggaggaggaggccgcaggaagcgccagctgttcagcgggctggccgagctggagaagtacgtggcggagcaggaacagcgcatgtactgttgcggggcaacgggacgaaaacgacggcacacgggacagccggtgggcaatttgacaaattaaaaaacaaataatttaaaaaagggtaattaatagctttgacatttaaaggtgccaaaatggagcataacttttatttaggcaaaatattttttaatcaaaaaaaaattttttaattttgtttgcctttttaggtttcgagaagagtcgaattttggggaggaagcgcactgagttcgctgatgtaccattgacaggagagcacagcataaataacgccttttagctttttttaatttattttttcttttttatttgattatttttgtagttttagtttcggcttttacttttttaatagcaaatttgttgttgctaatgcccatatacaaaacgaatgaaataaa

SEQ ID NO: 76555 - DNA, 527 bp, Heterodera glycines
atgaaggtaaaaactagggtaagactggaccggtttaaaattgtgccacgcttattggatgcaacccgttttgccacacttggttaccaccggtatttctttttgtcgttaaccgaccgattactgctttacgatgacatgcaatagattattttttaattcatgacaaataaaattcagattttgactccaaattcaattttttaaatgtttttttattttaaaaaatattttatttttccttttcgtagcatttttatattacggtacgctattttccaaaaaaaaaataaaagttctgactgaataaggggcaagcaagggccaagtgcaggcgccgatagggaaactcggtatttttgaaatttattttaaattcatacttttcgaaaattattccaacatgtactaaattcaaatacataatcctgtagatatgtttaattttcagattgtgtatcttaaattcaaggccaataggaaaaatcaggattttttaaacaatttaaattaatttggaaaataaa

SEQ ID NO: 76556 - DNA, 1346 bp, Heterodera glycines
atgatgaatcgtcaaattgatacaaaaaagcaaaagcctaaaattacctatgaaggccagctttacaccttcgataaatcaagtgcggacggaacgagaaaattttggagatgcgaatacaagaactcctgcaaagggagaatttggacggatttggacgatcaattcattcgtttggcaactcctcatacctgtccagtgaacgcagcaaatgttgaggcgcagaaagtgaagacggcaataaaacgacgagcactcaccacgttagaaccgccagcagtgatccgatccgaagcacttcagaatgtgccatctccagctggacttttggttacgcaggatgcttcaaaactggtactgtttagtcgatgatatgaaaagcaatcacgaaagaaatcttaaggtaattaaaagggcacggcacgaagtcaatgcaccacctgcggttccacaaagcgttgaccagctgattgttcctcccgcttaccagacgtacgagtcaactgacggcgaagtggagcagtttctgttggctgactctggtgtgtattacgaggccggaaacgaaaatgccacgtttcctgcatgcgaaatccaattttgcttcttccatttcgtgcggaatttgcaaaaaaaaaatcaaggaacaaaatctctggcaggtcagtaagcatattcagtttgtttttgtaattttcgtgtctattcagagatactgtactgacacagtgttggctgagaatctgaggatgctcacttctgtcgcgtttctaccgctgagtgacatcaggacagctgtcatcgcattagacacggagtttgggaacgtcgcggcactccgaccgctcattgactggttggtctcatcattatcagaagtgtacttcaatttttgtgcaatttttaggttgctcaacaattacattggacaaccgcggccaaatgggacttggtctcaaccactcttcccaccagaacaatggaacgtctacactcgaactctgaatggagaagcaaggacgaacaactacgcagaggcagaacaccaccgtcttcaaggcgccttcaattgccgtcatccatcgatctggcacttcattgacgttctccgccgtgagcagaagggcaccaatgggaagtatgcgtcatttattgctggacttgagccaccgaagaaagctaagaaataccaagcggctgacgagcgcatctttaatttggtgcagaattataatccggtgaatccaaactatgacaatgatcacaattaccacataaatcacaatcatcatatcattttggaatttcttcgtggcatttcgcgcaattatcatatgaacccgtga

SEQ ID NO: 76557 - DNA, 2051 bp, Heterodera glycines
atgccaagtgagtcgaaaaagcgtgcaatttgttgctggagatcaaccaacgcgggcggcccctcgggcatggccgaacgaacattgacaaacgggttgaagcgggaaaccaacctgaaaatcatgatcagtcaatcgttagtacgacttgcaatttccgattttatatttatggttacgatatgttaacggtattgcatgtacgtctgtttattcatggactgtttggttactgtatttctctgtgcccgcgctgattactatgtcatatttagaaaataataattgccgtgggtttagtttctaattaggtcctctaccatacccggtggcattttcgatcatttttttcttaagtacatcaatcaccgactcggtgttttgcgcgttgatccgtgcaatagagcgtcgagccctctcaaaaatctgcatatatcgctccaattcgcgtagattatttaggctttcattcagcagccctgttgttgtggcaaaggaatcccgtcgactaactgtctgaatcggggcgttaaatggctggctcaacagcattaattaagtttagccattcattacattgaaaaatcaggcatttggttttgtggtcttaccacatcctattgcggctcccggtaaattggacaccagaaaattggacaccgaaaattggacaccgaaaattggacaccgaaaattggacaccaatggaaaaatggacaccagaaaattggacactgttgtaaataaaaatgaaaataaacaaaataaattactaaacaaaaattttggcttggcctaaaagatctttatcttaatctgccatatgttgtttataagcgtaaataatatggaaatgaatttgttattatttttgtaacttcaggagaagaaaaacatcatatcattcataaagaaataagttttattactcatttctggtgcattttttggcccattgatcaatcgtcacccatttctggtgcattttttggcccattgatcaatcgtcacccatttctggtgcattttttggcacattgatcaatcgtcccccatttttggttcaatcttagtgtccaattttccggtgtccaattttcctttattgtccaaaattccggcggtgtccatttttccgcttggtgtccaattttctggtgtccaattttccggtgtccaatttaccggtccccaggggacaaattcggacaaaattttcattcattctaacctttttttcattttcagggaaagaaagcggataaaaaaggtgaacgacagcagcagaggatttcttttttataatgtgagaggggaaagccactacaaattgctgtcatcaaaaagtggcatgatttgactgaaccaatcctctaacattttcattactaagtgccgaaggttttctgaattttagagattacctggcaaaatcccgggaaattgtctctcgtatctctaaaacaaaaaactgaatttttaaatgttacagcaaagaatggcgctggtcaggcgaactcgggcgaacgcagcaaattggataagtcaaccgcccgcggcgtcgggaacggatcaccgaaagaagcaggtaaaaggagagagaggggtggaggagaaatgagatttgtttgcgagtttaattttcccttttcagccgtcccggccaccacgccacagccagcagcaggagaagcgagtggtgagagagaatggggagacgaaaacggcaaattcattatttcttttgttcgttcagcaaatgccgcggcgaaagcggaggtttcacagcgcaaaaaggaaaagccggacattttcatcacgaagaaattgcctgagaacaagaagcgcgaattcgtttcaggtagagcgaagcaaggaatacgaataggcgaatttttgcaaaattccgttcgttttcaggcaaaaacccggactacgagacgctcaagcagttggacatgcaaatcttcctcaaaaagaaactgtcgggaacgcaggcgaggccgcacgacttccaatcgcaagtgtcgtcgcaacaatcggccatgtag

SEQ ID NO: 76558 - DNA, 1041 bp, Heterodera glycines
aagttaattggcatttgttcgcttttagttaattacgttcgcccggtcattgtgctcggggctttgaaggatcgcataaatgacgaattggtcagtcgacaccccgacagattcagcagctgtgtgccacgtaatgggccatcttttccctaattagcatcgtacaattccgtcactaattgtctctcttcagatacttctcgcccaccgcgggaaggcgaagtgcacgggtaatttgcgacaattaattggatttgctttcttcgattcatttcaatttattctccagacgcaattattatttcgttacgaaggccgaaatggagagggacgtgaagagcaaccttttcattgaagcgggccaattccaaaacaatttgtacgggacgagcgtagcggcggtgatggaagtggccgaatctgtacgtttttggaggaattgtcaaatttcggcatttctcgactttgttttactttttcttttggcttaagggaaggcattgcattttggacgtttccggcaatgcgatacggcgactgcaaaacacagcccatatttatccagtttcggttttcgttaagccgcttaattaccaacaattacggtaagaaaaggacgggcgatcattgggtactgtatccggtaacactgattgtgaggctaattgtaaggctggttgagcccattaaacttggtctcacggggtttgggttcgctggtcacaaattcctcccattacggtcaatccctaacagcgaattcgaattctaacaaaagtcagtgccaccaacattttcccctgctgggcttccctttttatatccgcctaatttattgtaatttccttcagagaatgggactctttgctcagtgaagaagatgccctgaagcaatttgaacggtgtcaacgccaagaacaaaacttcggggatttgttcaccggtaaatgccggccactagtaggatgggatttatttttatttaaaatcacgaaatatttaaataaacataatcccgtccctaagtaattagtgttgcca

SEQ ID NO: 76559 - DNA, 1461 bp, Heterodera glycines
atgcaactgcaaattgcattagcactttcaaaggaagaatgtgaaaaggaacgtgaactccgtcgaggtgatgacatccgcttgcaagtaaatgagtttaatttttaccatttactaatattatgctattttaatactcaactttgatatacagattttgatttttaataaagtttgaaattatagttaaatatattaatcgaggcataattcagtcagactggtcgagcaaattcattaattttagatcgcaattgaagagagcaagcgtgaattggctcgttcttcaagtctttcgtctccgtctggtggaattgaccctgtcgaaaaacagggcacctccaagtcgcacggagctttggatgatttgctttcattgggactggatgacgtgttcaggagtaatattccaaatgcgactgcgccgggtagttctgcacaaacacaacaacagccacctcaactgggcgttttcaacgacccctggtcgccacggccttccacaactattccaatggttgaaactgcgccgcctgtctccgctcaccagacaagtattttgtccattctcttttgagcatttctcttcccacacagttattcaaaacgacccatgggcacctgcggcttcttcctcggatccaagctttgtgtcctttggttcttcgtcgacgactcgaacaataaatcccgatgggggccacgttctcggtcctctcatgcagtcatcttcaaccaaaaatgacccatgggcatcatttgaaacacaaagttttgctgcatccgaaccaacgaaacaatcatcggatgatttctttggaaacattggtgaacctgcacaaacgacgaaccaaccgacaagtcagggacagcaaagagccggtgtaaagacacccgagtcctttcttggaggttttcaaaagttgcttttgcctaatacaattgcaatttaagagaattctgctcttgttaatcttgataatctgcttgggccttccaaccattcgactattgcccctaaaaaaggtgattatttcttgtttcgtgccataaaattgttcacattcaaccctttcagcgactaatccgtttttggtcggttcatcaacgactgccatgaccaataacaaaaataatccattttcaaccaatgaaaggccgagcccatcactaaatgaaatgatgcaagcaaaaaacggtggaggagcgtactgatcattttcctctatttatgttcaaattctaagagccaccccttcctaaatattcttgtcatgcggactcacattttggagtctgctctaattttcccccgttcataagcacatctattcgtgatttcttacttaaataattgtactgacccaaattttaaatccttattaatggaaaagtgatattcatgataaaaccccgcattctgttgtttttatgtatttatatagggacaaatgaaataaa

SEQ ID NO: 76560 - DNA, 1211 bp, Heterodera glycines
gtgtattttcttcaaatgtttcatattttcttcgtcaatcgtggttatatgcttgttttggagccacctgctcttggttccgtttacgatttgcagaagtgagtttatttatttggctgcttctgtattccttcctttaggtgtatcgctgattccataaacattgatataaatgagcaggtctgatcgtttttttaatcaaatatccctcatttttgattcagtaccttttcctctctggtggtgcttctatcaatcgcaatgcgatgctttctgcaatttctgacgtgggaaccgatacgaacccgatatttctcgttcgtcgaatcactaatacccaatcagaacctaccaaaacaaattctgacggaattaatgagatataccaaggtagagaatctcagtgtgttcatacattcttcctattttcagattgggagatttccatggatcgtatgttgggaattgtgcccacaaattcgccctctgcaattagtgaatgtgtcgaccttggcaaaaagtgcgctcaactcgctgaaaatattgttcgcttttgtaacaacgtgctaattgagcatcaatttctatatcaggtcagaaatgctttttagttttgaatgagaattttaattattttcttcttcaaaatgcaattgtactattttttaaattttcggctccattaatgcaatattccggaatccaattgtgttgattgaatacacaataaatttttaaaaacttacatttaatacttaagggttggatgtctgtgatctcaaatttggatgaaaatattctgcgtattcaacgtcgtttggacaaatcaattggacaagcagaaaaattggagacatttcggcaaaacggacgctctctgttgaatgggtttgacaaaatcttggaaactttaaagaaagtgcgtcttcttttttgttatggtgttcttccatccttaaggctttgttaagattgtgcttcccccttcgcttctttctcttggccattcttccacaaatttatccgattctgatggatctgctgaagaaataacacttttcgattggatttcgtcaaaagacccggcctactcgctcagctctttttcgcaacatgtgctcgatcacttgggaaaaacgacggacgaagagctaagagaggcgcaacatttgttggctatggtccaagatgtgtcgcaaaaacctcagtaa

SEQ ID NO: 76561 - DNA, 736 bp, Heterodera glycines
atggagaataaatttattcttgttccttccgacttgtacaaaaatttactaaaaccagacgccggagaaattaatgttgataatgctaaaaataaattgtcatcacttttgaagcagagaaaattagacgctacttcaaaaaatttactttataaccaggaattgaggcgtttcttgaaactaaggaaggaaattgaagacaaacccgtaaaggttgagctttcagatggctcattaatggtgtttaaaccaaaacagcgtgaaagagatagcaaaattcctactcaaattgttaatgacgaaggattggatgaaacaggctctattccaacacttgaagacccttacactactgctgaagagagtgatgctgagtcaacaacatcaacaccaaagacgagaccactgataaaaccaatgcgtgttgggacaagtaaatttcgtcaaaaacaaaagtcttttgtagtcaagaaaaaaggaaaaattatgtcaattataaataatgaccctgagaaatttggggttggctatagaggacatatactgagagctgatggaacggcatatttaaaaagtaatgttaatcaagcattagagcgaatattgagacggtcacccgagaatgctccatcacccataggtacaaaagctttagagcaacgactgagaaacgacccgaggactagtggaatattaaaacaaaaatttaatgaacaatcgggatcgggcgttaaaa

SEQ ID NO: 76562 - DNA, 1315 bp, Heterodera glycines
atgtcttctacttcttcaaagaagactctccaatctgtagtggagcaagtaattcaacaagacgcagaaataaaaagcagtgagaaaccactaaaacagaatgagttggaaaagagtgaacggaaatcaacccacaccgtatataacttgcttgaccacaaacaatccttttggaaattggcccggccaaagtttgcagtgatcaactttctctgcccagggtgtcgtcgaatcaactataagcacaaggaccagttcaagttgatgggagaagatgagttccactttacacaagtgatgtgtcccggttgcgtaaagtacaatatgatgcagactgatatctataacaaacacacaaagaacccccactaattgtatttaagattaaaatttaacattatataattaataaagatgattgatgaaaaattttttcacttgaacgatttgaaattaaaattgccttttggtatggtaattagtggaccatccagtagcggtaaaacaacatttttactaaaatttttgagagaaagagatgaattgattagcccacacccaaaatcagtgctttattgttatggtcaatttaatgatagtattcctgtactacaaaaaatgggagtgcatgtgcacaaaggacctcctagggacgaattgctgagctctctaaagaagcctctcttattaattctagatgaccttttaacaataattgatgagaaaactctatccgaattattcattaaaaaagctcatcatcttaatatgggtgtgattttcataacacaaaatttgttcgagagaaaggtgaaggtagcccgaattaattcacaatatattgttttaatgtctgctccgaatgccgcgctacaaatacgtaatttgggtgttcaactgtttccaaaaaatcttgcatttttcctaagtgcgtataaagatgccactttatcaccttatgggtatttatttttggatttacacccggcatcgacccctttactgagaatacggacgaggatatttaaagaagatgaagaaaaagcattgtatattcaaaatgattaatttacctaaaaatgttattcaaaacttggattttttaaagaaattggtaaaaacaaagtcttttaaaaagagacaacaaatatttaaagaagcgactagtgaacaaattgcattattaattgaaattagttataatatattaaaggggtactttccgctcacgaagagacaaaaatatagacttttaccatacgcaaattttgtgagaaaattaggaagagttagaactgagaaaggtgtaaataaa

SEQ ID NO: 76563 - DNA, 819 bp, Heterodera glycines
cttttgttccaaatcttgtggttcaccccgaggacaacgacccactcccgacaggaaagggacatctcggtgagctgactgacgaaaagccggacaacattttggagttcatcagcgctggctgcaaaaactacggctgaagttggaacgtaaggacaatgggtaaattgagtacgacttgaagataagggggataacactggatgaacaaactgtgcaaactatccattatgacagtgtgaaagatcaaattatgcgttatgggtccgatgaccccgcggaccccattattgtaacatacccccattttattcgtcctaaccttatccaaggcaaagtgtacactcaatctctaactaagcattatcaacctgtcttcacaaaaggcattattaataacgccttccaagtcctcgaatttggttatcgcaaatgataagtatgcattctcaattaaattttctgtatattagttttcttattgttcccttcttttctttctctctgtttatatcactcatgtgggacggaatgacccctggttgatcctctccaacactccaggccatccatctgagatgaaggtggacgagctgttcattattgtaatgcacagcctggtgcgtgagtgtttggattggggaccgaagggtgaagccgttccctgggtgtgtttgctcacttttttcaaagggaactctaagaattctgatatgccttcaaatctatcaaaagagttgcatactttctttttatcatttctctttattttctattttacacttgtatttttcatttgaatgtttattcagaaataaa

SEQ ID NO: 76564 - DNA, 556 bp, Heterodera glycines
atgaacagctcgtccaccttcatctcagatggatggcctggagtgttggagaggatcaaccaggggtcattccgtcccacatgagtgatataaacagagagaaagaaaagaagggaacaataagaaaactaatatacagaaaatttaattgagaatgcatacttatcatttgcgataaccaaattcgaggacttggaaggcgttattaataatgccttttgtgaagacaggttgataatgcttagttagagattgagtgtacactttgccttggataaggttaggacgaataaaatgggggtatgttacaataatggggtccgcggggtcatcggacccataacgcataatttgatctttcacactgtcataatggatagtttgcacagtttgttcatccagtgttatcccccttatcttcaagtcgtactcaatttacccattgtccttacgttccaacttcagccgtagtttttgcagccagcgctgatgaactccaaaatgttgtccggcttttcgtcagtcagctcaccgagatgtccctttcctgtcggga

SEQ ID NO: 76565 - DNA, 2520 bp, Heterodera glycines
atggaccccttccccctgttccgaatgctcatcggaggcccatggatcctagtggcgatcggggccggagccgtcggactgctcgccttatatttgtatatcaaattcaacccagcttttcgcatttatcggtcgctgatcacggttatcatcctcctcgggttggtcggcagcggagaaagtgggcaaattccaccaaacaccgactccgtcagcttagcaggggctcaagccccttttgccttcattccaatcggcgggattttagtgcttggcttggcactcattcgtctcacaactccacgccgacgcccgacaattatcatttttccgccctcccccctggtcttttccatttttcttctctccccactacagctcggagttctctgcccaaaaggggaccaatcagcaaaggggtacccccctgagcgagggggcggagcgacggcgcccggcgcaacacccctccaacgtctatttaatacagcggtccagagaagaatttcacttccttccacatttaccccccattcactctcttattgtcattccctttgtgaaccgagtatgactgacgacttcgcaaatggcgggttcggcgactgcaacgacgactttggtgggggcggaggtggggaagtttcccctcgggcacaggcggggagagatgcgcagcggcgaaggagcctcagcaaccattccgagctgggcgcacacggtcggccgatggcacgttgcaaaagcctggggcgcccaaagccccttccgcccaaatcagagcgccgttgcgtcgcggacgatgtcaacttgttcgccggcgagaactggggagacgacccttggcaacgggtggaggtcgaacgcttctttcgggagcaggaggcccggggaaagcgaatgatccacgagcggacgggcgaacaggtcccctttccatcaactttgggccttttgcccgctaatcggcaggaaattgccccggggtggacggtcgctgactatttcgctgaaacgaggtgccggtccctcaaatggcctcaatggccatgcatttattcgcccggaggtgtgattgggagttcgaagcgcagtaggactcttcagcaaaaggggcatgtcccctggcgtctaggccagacgcattgtgattggcacccgctggaggaattgtggtggacaacgcagtccgaattggactcggaatgcgatggcgcgccgatgacgagagaaagagcgcgggcggacagcacagaaagagtggcgcagccggcgggtcgttggggaatctctcccccaaattggccgacgaaaggagcacttcatcgaatcgatgccatcaacaacggccgccctccacgcccctgccattcaatttggggccgaagtccatcaccccgccctgtctcccctcccaagcacctcccaccaactgaagacaccattcattcacatcactttcattgccatcaaactctttctcatcaggggactttcccctccgatcgttcggaattggccttctccaaaaccccatcccttcttagatcgtactcttcctcctcctccttttgttctttctccaccttctcatcaaaaatgtaccgcagccgtgacacggaacgttcgtcggggcgcacggctcgacgtctgcgcctcttggaattgacggccgccgaactcgcccgaggagagttcgaccataatcgcatggtccagcagcatggtggaaacgctgaccgcgtcctggccgccgccgaccacttgacagaactgcgcgggaaattttcccgcaactggtcgaagtgccacgacattcctgggaaggaccgtcttcgacaccgcttcgatgtggaccgttggttggtagtggcgccgagcaatgccggagaaaacggtgggcaaaacgacgggcaatcccgaggaaaaatgcgttcggtggtggtggttgtgccgcccacctcgccaccagtgggggggagtacgcctgggaccgtggcgaaaaagcacccgccgacatcaccaaaaaggggcctgtcccctagtgcgctcccaggcccatcaaataggggcctgccccctctgtccccgactgtcgccattgccaagccggtcgaggagatcactcaagtcgccgaacttttgggcaaggtcggcgacgaaatgaaccgaagaatggcggaggacgaggagcgatcggcgacggggggcgaactcttgtccctcccatcggaagacgaagtggtgccggagacgccgacgccctcgtcgccccgcgccgggagtgtcgcaaaaaaaattagcgacgagaatggcagaggaaagaaaggagtgagcgccctccaccgagggccgggaatcacgggtcagggctgtttggtgttcaacgccaacgacgggactcctcgagagctatcgtcggatgatgaagaccgttttgggggaggcgctcgggaccattttgatccgatcggaatgtgttggacacttcttcccattttatttttctctcacttttaa

SEQ ID NO: 76566 - DNA, 1206 bp, Heterodera glycines
atggacccaactgacaatgagcaagaacacggcaacgacgggaatgagcgaaccggaggctcacccacaacgcaagtcggggcagttccgccgagcgcgaagaaaggaaagggcaaaccgaaagttgtggagacttcggcaattcaaagcaattcgggcgttcagcccggagggactcggaaccttcgaagtaatggcattaccatacgtgccattcgggaccagctggaaagggcatcgggccctctcgccgatcggatcgcggaggcacgagaactgctcgagccggacctcaacgcaggagacaagcctcagtcagcagtctgtctctcagccatggaaaggggactgcgggagttggtcgacattttcaagggccacttcgatcggggcctagcggcgatcggggacgaggcaccggagctgcatgactatctgtatgatgctttcaccgtgccactcccggcagcgacgagatgtttggggcttcgatcgcacccgcccccggccgaactgcttcaaatcgcgatggaacatcttgctgatctgcgcacggtccgtcgaacactcgaggacgtggaaaagctatctcagctttcatccgagactcggtcaggaacaggggacagcctgcccgcgggagatgatcccgctagccgtcgcacgccgcctccacagcaaatccatgacccgactgatcaccagtccgacgagtggctgtttggacgattcccaagacggttcgagcagctgaacatccaagagggacgtcgggcggtgacgcccgtgatgcgaagcgtcgcccaggtcgcccaatacccggtcgtaaacgcaggaggagccggagccaacattcgagaatgggtcaatcaggccagtgatcggagggaacggactcactccccacggatccaacaggcgggcaatcggccgcgcccaccgggtccaaaccgttcagtcacgggagatccaaatccctgtagtcgttttcggatacccgaacagatcaggggcagagacccctcggttctgcgcgccgcccgacgtaacgaagcgacaacggcattcgaaaccgtgcgcctccagccgccgacattttcgggaaaaccggaggattggacgacattttggtcgtatttcaagcgggcagtggacgacaagcccatcccgggcttcgaaaagcagccttacggcttcgctgcttaa

SEQ ID NO: 76567 - DNA, 517 bp, Heterodera glycines
atgatttatttgcttcaattattggcaattgcttttgggctcttttcgaattcattgctcgagagtaatgttgtgatagtgagcaaaaatgacaaacgaatcggaaaggtgagctaaaatacaaataaaccaaacacaaatttacaaatttatggcttgcagcgcgaaagtttgagaaaattttaattttgagtagtccctttctattatttagtaccaaaaattttcgattttccttatttgtgcccccttcaaggtttccttcacccaaattttccaaaaattcaaattttgtgaaattctattaaaaggttttttcgcggcgacggtcgtaaccataaaaaatgaaaattaattaaaaaattccattttttttctccaggtaattcccccggggcgttacaaaatcgctgtttgggacaaaatgaagaaaaagaaaccagattattgtgatgatgtttttatcaaaatgaaaaaccaatcatttctcactgaagaagcattacatgacgagtaa

SEQ ID NO: 76568 - DNA, 899 bp, Heterodera glycines
atgatcgcgaaaaacatttgtgggatgtttttgtttgagaatgttttcagccctttgcataaattcgtcccatcatttctcaacgaatgtccatcacttcgcattgtctctttcatttttgacgacattttcgccgaatttccatttgatgacagtgccatcacatcggatggacaagcggtggttaagtggcttttcactccacttcaaaacgctgtgccaaaggtgttgatctgcacgttggacatggatgacgagaatttggcgtcgaagattgaagccttcaaagcggtgattttcaatgatttttttttttggcttttcgttgttttttttggctctaacagaattggccacttcaaccataaaagttgtaaaccttttggtttttcatgtccccctcccaaccgaaaagtgtcattcattttcatatttattaaccaatttttccacatttttaggcttttgcctcggcttcatctcccgtcaatttcattgtcgtcatgtgttttattccttcgtcttttgctgaccctgttgtgccatttgtgttgaccaacgaattgacccgtgaacaattggcatttaaagaaactgacaaaagtgacgactgttttgtgttggtccgttgtccaattgtgcgtgatgcgagcaaatgggcaaaatgggaagaggaagcgattggctgggaatgttttgatcagtggaatcaaattctatttaatgtggacgaaatcggagacgggtctgtgaatgcttaaacgaaaaaccaaatttattgcttttctttttcgatttttagacttcttgatgcaactcccggctcaagtgatcagcagaagtgaatgaatgaattgttgggaagtgatcgatcaatttgaattatggatttaaataaa

SEQ ID NO: 76569 - DNA, 907 bp, Heterodera glycines
atgaggactaagggagagaatataaatgcaaatacggtaaaccctatcgtaattacggatattcaaattgaagaatcgtcgttaaatacggcaggaaacggggtacaaattgttcagatcagtgagaatccattagaaaacaatggaagtcaaaaattgaattatattatggtgaataactcaaagggtactatgggtcaaataaacctctcggcaaatttggagacgataaattggaccgaaattcatcgtctgtttcctccccctaaaattgcattgaaggcaccacagcctgaggaaatgactctgagccaacaaccgtcaacgtcaaatggtgttgctgaagagagtctcccgagttgctcaacgattggaatttgcaaaaatgggaaggcatttcgcatctgggataatcgcggtcgtccagtcggcattgttagtccgtctttcaccgactcgcaccgaagaccaacaccttacttccgcccacggcaactccagccggtcccgcaacaaccgcaacaacagcagcacaaccagcaacaaaaaaatattttttataagataaatttattcttatgatcattttttgttaaatgtcattatttatataattaaatttaaaatagaaataatagtcaaataattatcagttttaactatagatcaaaaagatgtaaatctcaagagagtataaattaattatatttatattattttcacggcacaatgaaaaatagcatacggaacttaaaagtcaaattttaaacataattgtataggaaattagccagcgatcagccaaattatcttaatttaaaatgaatttgctccttactgaaaaatgaagttatttgctaatttattatttaaaaaacttaagaaggatttgcacgaatttaggaaa

SEQ ID NO: 76570 - DNA, 443 bp, Heterodera glycines
atggtccattggacgacgaaggtgtcaaacggtgccaaagatggctctggtggagcagcaaagaacatcggcgatgtcgcttgggacaccaaccagtacttctctcagccccagtcggccgacgttgagatgagcgcgtacgtttgagtccccgcgggaacgaccttttttgagagagagcgagagggagagagatagatagagagagggagagagatagagagagaaagagagggagagagagagtgagagagtctctcgtactcaatttgtcggctttcaaatttttcatttaaaaaattgccaaaaaagaaaatgccacttttgtttacagttatgccttgctcacatacatgctgctggacaacaaagagcatgcgctgcccattgtccgttggctgaccgcgcagcgcaattccctgggcggcttttcatccacgcag

SEQ ID NO: 76571 - DNA, 55 bp, Heterodera glycines
gatcatcttggtacccgtggttgggcgttggcggcaaagatgcaagcaccgtatt

SEQ ID NO: 76572 - DNA, 610 bp, Heterodera glycines
atgactcaacagctaccaacgggtttcgggcaaatgccgccccttggccaagtcataattaaaaaataaataaataaaatattaataatttattatttcaggttgctcatttggttcaaccaatgctcatcaatgcggctgaacagcaaattccggtgtttctttttcgtcatgctttttatttttttaaattaaaatttcagcaccctttcaatgctgatggtacgcacaaccaacattttttgaatggttgtgttgcagaagtggggcagctgctcccgttagctcatttttattaattttaaaaacataatacaaagttttcaggccattgtgcctgatcgtcgtgtcagttgagcaccgtgcggcacaacagacaacagctggcccgcttcctgtcaccaactgcgttctgcgcacgggtgatggacaccgagtggaggcttctggctggcaagcgtatgcgcatgtgttggcctccctatccgtcgggagcgcctattggttcattaactgcgttgcgcgcgcccgcttccagcgcctgggctgctggttccgcgttggggtcggaggccccaacgcgcttgtggtgccgcacgtggccccacag

SEQ ID NO: 76573 - DNA, 1914 bp, Heterodera glycines; identical to SEQ ID NO: 1885

SEQ ID NO: 76574 - DNA, 287 bp, Heterodera glycines
atggccagctgcggcggcggcggcggcgaccgatgtgctaaaggatgcgatgataatgaccctaattatggtgataatatagggatggttcgaataatggaagcgcattcattcttcctattgtgccgtcgtccttcctttctttatgatgtgctctgtagaaacagatttacagattactgtagcttaccatttcatttcccttttgccttccctttccctttgctcaaatttctctcatccgttcacaatgcttaaaattcaaatttggcgtttcgtccacacaa

SEQ ID NO: 76575 - DNA, 462 bp, Heterodera glycines
atgggtgccggagggggggtaagaccgtatcgatcgtgaactaccagacgggtcaattagactctcaattttaaacaagaataaacgaatattaaattattcgagaatttttttttgtatattttacaaagataatcaaaatacgataattaattattgatcaatataaatgaaaaagcaaattaaacagaaatagtacatatattaaaaagatctaagaaattcctgtacataaaagtaaatcgacaaattcattgtagtggtagcaaatttcattatacgagatataaaaaacaaaaattaataaaatataaaaataaaaattcacctacaaaaaatgacttcctaccctaaaacatacaaaatttcagcataattctattaatgttggcaaaattttaaacaaatcaaaaattgttagaaattttatgaaaactttgtaaatttctcaaaaaaaaacaa

SEQ ID NO: 76576 - DNA, 586 bp, Heterodera glycines
atgtctgggccaatacaaaaagggatcatcaatgcactcaaagctctcgacaatgccaaaagcgccacttcactccttctacaccccgatccggacctgtcaaactgggaaaatgccgtcaacttggaggctcaatttgatcgcgtcgtcaaggaaatccgtacaatggaaatgcagatggacagtctacgagactcatccaacgcttggattgaacttctcgcccgcctgaccggagacgacaaagacaacggcgaaaaagaatacatcaaattcgacaaaaatgagaaaattgccgagcgatacgacgcagcaacaaccaaacttcgggatttgcgagatctcgaagcaacactcagtgccaccgctaaactgcacagaggcagagccgacagagaagcaaaggcggatcaattggccaatccgcaacaacaaccgcccatgccaccagcaatggcagcaccaatgacagtgccaacattcacagcaccgctctaccaattccagccaattcaactggataaatttttcggccaaaagcgaaaatggcccgaattctacgaatcccttcaatcggcaatcggca

SEQ ID NO: 76577 - DNA, 2601 bp, Heterodera glycines
atgcagatggacagtctacgagattcatccaatgcttggatcgaacttctcggtcgtctgatcggagacgacaaagacaacggcgaaaaagaatacgttaaattcgacaagaatgaaaaaatcgccgaccgatacgacgcagcaacaaccaaacttcgggatttgcgagatctcgaagcaacgctcagtgccgcagccaaactgcacagaggcagagccgacagagaagcaaaggcggatcaattggccaatccgcagcaacaagcgcccatgctaccagcgatggcagcaccaatgacagtgccaacattcacagcaccgctctaccaattccagccaattcaactggataaatttttcggccaaaagcgaaaatggcccgaattctacgaatccttcaaatcggcaatcggcagtcaatcaatcagtaaagcgcagaagctgaacttactccgcaatctactgggcggagaagcgcgagaactcatagcgggcttccggctggaagacgcaaactacgagacggtccttcagctgttaaaggacacgtacggagctccggaggaacacatcagaagtcttcacttcgaactggccaatctcaagccgtgccgaagcctacgtgagaccaaagactttctgcttcaacttgagcggcttacaagggagctgaacaatgccggagaggacatcgagggaccgcaggtgttcctcatgctggagaagaagctgactccaccattcctacgaagcatcctcacaaagaaaggagaggatccggcaaactggacgacaaccaaattccgggatgtgctaaccgaagcagtccggaaagaagtccaaatccaagaagtgatgggagaatatggccatcactacgtccaaccaaaagcagaagtcgtctcagcagcacctgtacaagcaccgagaacaccaaaccaaaggtcacgaaggcctaaccaaccaatggcactgcgtgatatgacatttatcgcctcatcactggacgagggtcacagacatcaagggtatgtaagccaacagcacacgcaacaagcaaagaaacactgccaacaaatgcgaaaccaagtacagagcgtcaaaaagggtccgccatacccctgtattttctgcaacagcaatcattggcatgacgaatgccaaaacgtcgacaccctcaaccaacggatcagcatcgtcagagaaaagaagctgtgcttcaaatgtatgaagccaaaccaccgcgcatcaaattgcgctcgaccatctaagtgctatcactgcaaatgtcggcatcccacggcactctgccgagatcagtacaaagccgagaatggcatcaacacgcctagcacctcttgcagtgaagagaagccaaatgccaacgatggcaagcgatcaacagtgatcgaacaacaacaaatgtgtaatgccatccaaagcaaggaaaccagagcgttgctaatgacgacaaaggcaacgatcttcaatccgtcacggccatccctcagcatgatgggaaccatcttcattgacccgggaagccaccgatcattcatctcgagcagtgcagctgaacaattggatctgaacatcctcagcacggaagaatgctacttgtccagcttcggtgaacgagaaccgaagcgatacataagcgaccgcgttgcaatcggcattttatgccccgaccaggacaggttcattttcaacctgaacgctttgaagttcctgctgaatgatttaccggtactacaactaaacgcattggataatgacgaacttcaacaaaagaagctttccctgccgaatgagtcacggcaaccggacattctcctcggaatggacgtttggcaccagctgaatgttcaaccaattgaacaactgccaagcggatttacgatttgccaatcgaaaatcggcaatatcatcagtggaacagggcgaatcgagcttaagcaaccgtccaacatctctttcgtgctaatggtcaacaacgatgaatcgccacaaagcagtaaagcggctcagaggcagaaaaacattcaacaaaaagaaaaggccgaactgagacggcatcaacgcaacaaactcttgtccagcattgcaacattgcgatcaagacggaagagagaatcggctcccatcagctcaaaatcaatcgtgattgatctttcatcagacagcgacgcatccggcattgagatcatacaaaatccagtcagggatagacaagccaaatcaccaaatgagcattcaacggcaccaattcctatggcagtgcaacggctaacgccaacaaggaagagttcatcagttgccaagcgaccagcattttcttccagcaaacaaccaaaaggaaaagcagcgaatcccacacaaacaagccaaacaaatgaactcaacagaaaaatgaaagccttgtcgccaaccgcaagtggatcaggcgccaaccatcattgcgtcgctacattggccagaagctcggactcaacaacagtaattgataagggcagtcaacagaattgcctaaacatgagctcggcaacaatcagtaagacaccatgccaacagcactcgtccgagaagacgttaaactaa

SEQ ID NO: 76578 - DNA, 906 bp, Heterodera glycines
atgacgtcaaacaagcaacgacaattggtccataaggacgttaaactacgtcaccaattcaagcaaaagcactcgagcatgcagctgacagcacgtttccggaagcaaattcacatgtcctcaacgattgaggaggttcagcagcgaatgaaccacaacagaccgcaaccgcggaggtcacaacagaggggactaaggccaactcaagcgcctaaaatatgccaatccgggatggcacagtatacaagcagggtcgagggatccgcctttcaccctgcgtcttctgcaatggcactcactggaccacgacgacgactcagcgaacactcaacctggcaattgagctcttcgcaaaaaatcatcaagcccgagcagagaatgcccattcgccaagtctgaaatgacgaatgacgaagcacaattgtggtcaacgaatgacgaattggaagtcaacttccctggaccaatcgccggacttttcaaaggcgaacaaatcagcacggcgacaaactgctttgctcaaccagcaacacttttctccaccaagttcagaactgtcaatacgcaaccgaattctgccaactgcccgacaactcaaccctgatttggaaatcaacctgcaatggcaacgaatgccaaacatgcgactacgagaaggcggaagtcatcaacggaaaattcactgcggcctacggagaatcaatggccacttggatctccgaagatcaccaaaagacattaactttcgccaaaaatgcgccagaactcatcgcctgcgatggcacacgcatcgtcatgtccgaacagaacttcggaattgccaaggagcaatacgacgacattgtcaccaccacgacaagatggaaaagaggcatccgaccagaacagctcgcaagtggcaaatag

SEQ ID NO: 76579 - DNA, 1130 bp, Heterodera glycines
atgtttttgcgtctgaactgcttggccgccattctgtttgcactgtgctgcacctctagcactttttggctcggttccgctactactgatgaacagaacaaagcgccacatgttgaccaccataagctgaccgaaacacaacaatatgaagtgggtaaaactaacaaatgtcgccaattaattgagacaattagcgatgctcgagagtgcgttcgagtcgagagattcaatttaatagcttttgttttaatgaagttcttagcaaaatgcaaaaaaatattatttacataatattttatgattgattcgcaaaaattttaattttaaagagcggcaaggaaaccgacccgaagcatgaccacgagcagttccttggcaaggacgaggccaggcagtatgaggagttgacgccggagaagagcaaagaacgactcgcgtaattttcgaaaattttatttaaaaaatattttaaatattttacagaagattagtgccaaaaatggacctaaactcggacggtcaagtggatgagttggaactacgggagcacatcaatttcatgcagaaacgttatgtggtgcgtaattagttgaggggatttaaatatatttttttaacttagccgaaagctttttaatttttattttgaaaatttgggtttataattttttattttaagtaatttcgctgaaatttttaattttaaatttttgaattttcacattttatatttctcattatccctcatttggtttttttgagatttttttaagctttttttgacaattttgacggccttcgatgttttacttatcttttgatcgattttctatgcttcggttcactataaatttcgttttttttaattttttcaatttattttcttatactggctaatccttaaaaatataatggtttatttttgcagaacaacgatgttgagcggacatggaaaaattacaaggaggagcagctgaaggacggcttgctcgattggcaaagactacaggtgaagaaaatctaaacagagggggaaaagggtggaaattctaaaaaaatttaaggaatttgatttacggaaaaccacaggagggccaggagatttcaccggaatacgtcaaaatgattga

SEQ ID NO: 76580 - DNA, 947 bp, Heterodera glycines
ccgatttagagcagaatcagcgcatttccttcttcaaacaagtcaccttccaaatcggctttcttatccttttcttttaaatgcttttgtttagaacaaaaaacaatttccgatgtttccctaccaagaggagaagtcgcgggtttgtctcaaaattgatcaaccgtcaaaatgattgatcatttccattcagtgggacgattacggtgaaatcattcgtccggaggaatatataattgtcgattccgccgctgcgactcagcaattagcgacggtgacgaaagagaaggacaccgcaggcgatgaggaggagggcgaggagcagcgaagggtggcggtggaggaatggccaaccaaatgcatttcgtacatcgccaaaatagaggcaacatttgagtgattaattaactcactgatttcatgtgattgctctgtcgcttttagattttgtgcaaagtcgaattcatcgacttcgaagggcgttcagacggcgaatccatcaaaaagcttctgagtcaaattaagcccaagcaattggtaattggttgcccattttcttgtcaattcttcctctgacaatgagacagcgcttaattttgttaggtcatcgtccatggcacggccgccgccacgcgtcatttggcacaatattgccaaggacagcaaattgtgcaggtgtgttgggtccatcgcgttaatttgttttgcaatttgattttacaaatttattttaggggaaaactttcaccccgtcacttggcgaagtgattgatgccacaattgagtcgcatattttccaagtgacactttccgaccaactgatgtcctctctgctttttcaaacggtgcattaatttttaacttttttttttttaaatacggtaccacaggtgaaagaggctgagctcagttggttggatgctcgcatcattcgcaaatcggcgatt

SEQ ID NO: 76581 - DNA, 823 bp, Heterodera glycines
atgttgtgcccatttcaaatcattagtaaaataaatgccaaggtcctctctctgatggttcgtttccgggatttttaggaattggaaagtcatcaataaaataatttattttttggtttttgtgtcctaaatgtaaagttaaacatttatttgaagcgattttaaggccgtttaatttacagtattgattaaatttgttaataaaattttggagtggagaaaaggaaatatttgaaagaacatgataggccttaagatcatcggcaaatagtttaattttaacattttcagtttcgcagaattttggtaaatcgtaaaactgtcctggccacggatcccacggcacgtgtgttggcgctggccccgccgaatgtcgccgtcgtcaagctggtgctggagatgcaggacgcactggccgccggaaaccacgtggagccgatgcttgccttgttctccggcacaggtaagttgagatatgccaaggaagttgagcggatttccccccacctgctcgccaccgcggtggaggcacaggactttcaggaactcctacagaaggaccaagaccgcgtcaaggtggagcggtacctggacgcctgcgagcggaacccacgcctggcccaggaaatggcagttgccaaaattgtgcaggagcacaaaaatcgccgcctgtgcttcgccactttgtccttctgtgagcaattgccggcactgtttggggaaacgacgcatttgatcatcgatgaagctggacaggcgccatacgtccagatcctcaacttggtaaagccactcccctgcctaaccaaagtgctgatcaccg

SEQ ID NO: 76582 - DNA, 953 bp, Heterodera glycines
atgcttctcaaattggctgattacttccaggtgagtcctctgatcacttatcacatcttctttctttgtctgatcattttaatttaaatattatattatttgtgtaaaaatctctaatattttatatgaatgaaacaaatgaaccgttctgtgatttctcgtaatccatcataatatttggcactttttgacttagccattaatgctcccaaatttgctaatgaatttgttatttctattaaaaccgccgcttcactttcaggtggcctcgttgaagtcgcgctgcgaaacgcatctgatcaattgcgtggaaattccgctgatcgaccgtttccttctgattgaacgcttcggactcgacaatttgaaagtgattattatttaaaaaatttaaatttaaaaaataaattttaattaaatttccacttttagaattattttttgcatttgaatgttgacaacttccgtgcctttttcaaggcaaacaatgaacagttttttcctgttatcagcaaagaatttttgttggctttatccgtccgacttttggatgaatgaatttgttaaactctgccgattgggtccgagtttgatcaaatttattttttggcattttcataaaatgttgtttttttttacaaattttcctcattttcgatgagagaattatttactttttggttcaaattatttgttttcaaatgggctaatttgctgaatatttgggcattttttataattaattatttttcaaattcaggataaagaacactaaaatttagatttagaccccaaaattcagatttttttttgcaaaaaatggggtcagcggccaattttccaattttgcgaaggcgtccggccatgtaaatcatcgttggcttttttcgaagcgcgttttttccaaaaccttttttgcgcttttaaaaaaacaatgtctcggttccaataaa

SEQ ID NO: 76583 - DNA, 972 bp, Heterodera glycines
atgcttctcaaattggctgattacttccaggtgggtcctctaatcacttatcacatcctcttttccctgtctgatcattttaattaaatattaaatttaaccaccataatgctaatgagttttgtcctaataaaagtgccgtttcgctttgaggtggccgcgttgaagtcgcgctgcgaaacgcatctgatcaattgcgtggaaattccgctgatcgaccgtttccttctgattgaacgcttcggacttgacaatttgaaagtgattattatttaaaaaatttaaatttaaaaaataaattttaattaaatttccactttttagaattactttttgcatttggatatcgacaacttccgtgcctttttcaaggcaaacaatgaacagttttttcctgttatcagcaaagaatttttgttggctttatccgtccgacttttggatgaatgaatttgtttaactctgccgattgggtccggctttgatcaaatttattttttggcattttcataaaatgttgtttttttttacaaattttcctcattttcgatgagagaattatttactttttggttaaaattatttgttttcaaatgggctaatttgctgaatatttgggcattttttataattaattatttttcaaattcagcataaagaacactaaaatttagatttagaccccaaaattcagatttttttttgcaaaaaagggggtcagcggccaattttccaattttgcgaaggcgtccggccatgtaaatcatcgttggcttttttcgaagcgcgttttttccaaaaccttttttgcgcttttgtgctaatattgtgattttaaaatatatttggcgttttgttatttaatttgtttcatttttgtttgtgatttttgtgaagtgttaggttagttttatgcggtcgtcagttatccctattgattgtcctcgccctattttatttggaattaataaa

SEQ ID NO: 76584 - DNA, 644 bp, Heterodera glycines
atgacacaaaagtggttaaccttgtgttgtaataatcacaagatgaaggtaattagaacagaagcgaatgtattagcggtggggggataaattatggaggatgccaacaaaaagaaagtgcaattagcattgtcactgatgagagtgaaaatagaaagatgaaagaaatgccatatttatagaaatataattccagtaaacagaatttaaataaaaatttaaatctaagacaccgggcgataaccatggtttaattggaccttgtcccgatataattacaagtgaaaagctatattatgtacagacattacgctcgaataccttccatgtcccgtgaattacgcatcgttagccgacttcgtgtcccataaaacttgtaccgtatacgttccgttttttaaattgatttcctcatttcccggtacagcagcagaaattagttgtacacctatgatgtacctatttcgtgtgtgtattggattacacattttgccgatgccgttgaatgaatggtacgactgatccattcgagaaaaaagaatggtggcgagtgaaatgcatcgcatcgccggccattccattcattccattcgctttcacttcacccatttttggccatcggcggacggaagaggtcaaataaa

SEQ ID NO: 76585 - DNA, 1603 bp, Heterodera glycines
atggttgtaaagccagatcacgtgcatgttctcccaaattcggttgaaaagactgatcagatgttgatgctccgaaattcgatggttgaaaagccagatcacgtgcatgttctcccaaattcggttgaaaagactgatcagatgttgatgctcccaaattcgatggttgaaaagccagatcacgtgcatgttctcccaaattcggttgaaaagaccgatcagatgttgatgctccgaaattcgatggttgaaaagccagatcacgtgcatgttctcccaaattcggttgaaaagactgatcagatgttgatgctcccaaattcgatggttgaaaagccagatcacgtgcatgttctcccaaattcggttgaaaagactgatcagatgttgatgctccgaaattcgatggttgaaaagccagatcaagtgcatgttctcccacatatgatggttgcaaagcctgataagatgttgatgctcccaaattcaatggttgaaaagcctgatcaagtgccttttttcccaaactcgatggttgcaaagcccggtcaagtagtgacggtagcgaagaaagagcggatcgttttgctgccgcattcgctggtgtaagtgtcttatcagttattttcggtgttggaggtgatagttcagcagccaaagaagagagtccttgaactgaaagtgcttctcggccatgaaatttttgctttcctttctttgcggccaattgcagcgcatttggcttcctaattggcgacgcatttggcgatttgccaattgtcggccgcttcgactttttcttcagcgtttcttcttcgcgcactccgtcacaaaatggcggcgaaagtgccaaaatggccaccagcagaagagcagaaattacggaaacggcatttaattgcatggcaaaaaaaataaataaagtgggggctaaaattgtgattatattattaatttttctaaataagtaataattattattaatataatattaaacaatatggcatttgtacaaacaaacgcacgcattcagagaatgaatgaattgattgtaaccagcgcaaatgcttagtatgtgaaaaattcacattatttgctcttccaccaattttgttaggcttttcgccgtgctgctaaaatttcgcatttcattcgccttgccattctttgctggccagcagtgcaactgctgttgatgaaaaacgttaataagcaaaagtcgggcgaaggtgtaacccccgggggcggcacgcagcgcggccaatgggaaaatgatggcaaaaagcataaacagaagcagcagagatgttgttatatcagagtatgttttttccaaattttgaacgaaataaatctttaaaataatttttgaatatttatttcatttgttttaattttagttgttttagtttgatgaaatatttgaaaaagcaaaaactaattttttaatttaaaattttttgcggatttatatatcaaaattttcaggtatatattcattctttcaaaaatgtttatgcattgtgagatacccggacaaataaaaacacaataaaaaatgagacaaataataataataataatataaaaaagaaacaataaa

SEQ ID NO: 76586 - DNA, 1762 bp, Heterodera glycines
atggacaacaaaatcggacagagagaagaggaacagaagagacaggaagagaagaaaagggacgaggaatgccgaagagagacggaggaggaggaggaggaagagagggaggaggagagggagggggagggatcggaaggagacggcacaaatgccgaagaaatgacggaaagggacgcggagcaaacgcaaaacgcaaccaaagtgagtgtggtcggcatcaaaccttcttctttcacttttggaatattctggtgtttgattccttaatgactctgatttgcttaaaaatgtaaaaacggagcgaacaattcatcatttgataaatttaatggcttttcgaacgattccacggtaaaaggaatccctttttgccccattgttttgaaatattttgaattaaaatatagaaaaagcttatatcttaaaaagtgaatgcttttaaaaatagggagcagaaaaaaacaaacagagtgttaatattaacctcatgaagcaaaagattctatctttttttgacaaaaaaatatatctgggggattttagagagtgctgctgttttgaatatgatgttaagcatttgagtcaattactaatcctaatttataattcgaattcaaataaaaacaaaaaataaataaatttttagatttgtttctgatacatatgaaggatttgaaaatttataaatgtgtttcagttttgtgatcagtgatcatgaaaattccatggatttatgtcacggacaacacaaaaacattaaaaaaactaaaagagtccttcgattttcatattttatgtgaataaggacaattgattttccaatcacttcataaaaaaacaaatttatcgtaggattctccggcggaaaaaatgccatcggcgaacggcggaaaaaacagcgcaattaatgccaacgacagaaaagggacaacggcaccatcgaacggcacaagtgcactgactgtggagaaatatctgatgcacttgcggcaaaaggaggagcgggtgcgttttgtgacataatttttagaaaatttgaccatctcgatgcgtttgcattgattatttatcgattgatcgttctcaaagattcggcaattggaggaggaaaatcggacgctcagatcgacactgttggacaaatcgcgcgtttaccaagcccaagtggacgaactgaccaacgaattggtgcgaaacgcggaaatggtggcacgtctgcagtccgagttggcactgaacaaaggtgccagcatcatcactcattcggcgcctcccttaaggcgagtttggcgtggcggcactttttgtctgatcgctctcaatttggtcagtttttttcagagatttgcctcagccaaaaaagccgcggaaagtgccgtcctcctccgtccacacgcacagcaccagacaccagcagcaacaacagcttttgtccacccaccaattgcagctcaacggcggccattcgacgcgtccgcaagcgaaagtgccgacaaacgcgtcactgcagcagcacgccgcgtccaaatgtggtggcatcgcccatcagctgcagcaggcgtcgacgtcagcgaccgacgcagatgaaatttgtgtcgcgttgcaacactttgtggagcgaaatcggaccaatcagccgcagcaacagcagcagaatggggcgggggtggtggaggcgataatgggcgtactgaaggggggccaaggcgaaggtggcacttccacggcacagccgacgcagccgagtaaaagcatgtga

SEQ ID NO: 76587 - DNA, 2495 bp, Heterodera glycines; identical to SEQ ID NO: 12859

SEQ ID NO: 76588 - DNA, 923 bp, Heterodera glycines
atgtacaaaaagtggtccaaatatgtacataaatatgtaagaaaaatcccaaaatatgtaagaaaaaccccaaatatgtaaataaaatttttttaatggtattttttgggaaagaaaatccccgtaaagtatgaaatagccacaaaatgacataaaaattactttttttggtattttaggcaacattttcaaacttattttttctttataaattttcaaaatatgtacaaaaatatttgccaaaattttggattttttttttgaggatttccaaaaatttccgtaaaaaatactcaaaatatgtaaaaaaatgaaaatatatatgaaaaaaatccaaaatatgtacaaatatgtaagaaaatcccgaaatatgtaaaatggtgggaaaatccgtcgaaaaataatcccccaatctccatttatcccccaatctccaattatcccccccccctttctgggaaggttgaaaaataatcccccatgggggataattagagaaaaggtctcttcatacgatagtggtgaagcttctaagaaaaagtacatttaatacgaaaaataagttttaataaagtgcgcgaactttttccgcaccctgtagtataattagtaggtaaaacatctttttgttatttgcgtataaaaatcaggactttaattttgcatattttgactttttctgcatatttcatgcatatttttcccttttttatacatattttcaggtttttttgcatattttgccatttcttgtcaaatattttccgattgaatatcccttcggaaaaaattgattatgtataaaattaaatccaaatttgaatggatgcgcgagtgggtcaacagtgagcttcttgccgaaaatcttgagaaatttttgatttgcaattgcaaaaacaacgataaaatttatgaggaataaa

SEQ ID NO: 76589 - DNA, 2620 bp, Heterodera glycines
atgacggaaattgcgaaggatggacattttgtcagcttaatagaccagtaatttattaaatattaaagtcatatttaaaaattaataatttagtggcgtcataaaagaaaatgagaaatatgtgacaatttcggagttaggcgaaggaaatttaaaagaaaaatttaaagatttaaagacattaatctccgaaataaaagcagcatttgcacatttaagtgaattagtcattatcctcaaggaagttatgaatgcgctggttaaattccacgaaggtaatttaatttttataaacataatgggcccattatgagctttaattagcgaagggatttaagcgacaaaaactccaaaatatatacgtaaatatgtgctaataatccgcaaaatgacaagtaagttttaagttttgtttaatatgctttttattattttttttatgagctccagtggccagaaatgcatgaaaaatgttttttgggggattcaagcttagatagagcctattttctaggtttatttttagagcctaaaaagcctaaaaaattttgtgaaaaactattttggcattttgccctaaatttattaagaaaaattcaataaaaacgaaaatgcatccccaagaatccaccccaaaaatttcagaaaaatacatccctaagaatcgacccaaaaattttcaaaaataaacccctaagaaataaaaaaatttctcaaaaattaatctcttaaatttatttgtttattttcttgacaagaattttattttaaaaattatgcaattttaaaaaatttctgatttttaagagaacctaaacagtagcattaagaaattgtaaaattaatggtaaatcaatgcttttttagttggaattcatttgcatttcaatccaaataatttatttgtgtttaaaagaagaaattatggtcttggaaaaatgctgatcaaattatttgtgtctgatggtaaattgtttaattaggataattaagataacatatttattattagacattatttaatttttattcaaattaataaattatttttaatgaaaattattttagaacattttaattcttataaattaaaaaatattatctttaataatttagctaaattaaattaatattaaatttgctttatgttaaggtttcgttttatttgacaatcaaaaaaaggaaaaaaatcagaaaaattttatggttaaagttaaggaagaagatatagaatattcaacagattttgctgcgcctgagctgcttcaagtcagaagttattgttttttatttattgaatttcatttcagcaactttcaaatggcactgatgaaaagggcgaagttgaggtgagctaactgatttttacgtttaatttttccattcatattttattttcatatatatatatatatatataatcactgaaaaataataataatgaggttaattattttaaaacaaaattaatttttttatctttgacagaaattagggagggggtgggatttaactaaggaattctcgaaaaatgtcaaaatgcacaggaaatggcgaactatgcataaaaatccaaaaatgcataatcaactttaaattcaagttgttcatatacagtaaaaatatgcatatggatttaattgacttgcttaattataacaattaatgaattattccaatatcaggtcaccccgaaaatggacatttggtcagcgggaattaccatttttgaaattgctttctcagaaatggttggcttttattcgacatgccaccgaactgttgttggggaattgtttcgaagtaccaaattgaatttggatgtggaaaggccagcagcaaatcatcttttaaaattaaaactgccagaagaaagtgctcatgccggctctgaaaaatggtggaaaagatattgggtagtgatcgatgacattctcatcgtatggcataaattgccagagattgcgtttcttgcggtggtaagccggggaataatttgaaaaagcaccaatccatcataccttagagaaattggtggtttgttaagctacttttcgagttattagcacctatcttctaggtttttatgtttagagcctaaaaacctaaaaaatttaaaaaacctattttgatcctacatattttggcgttttgcacaaattacaatattaacaaaaatacaataaaaacgaaaaatatatctctatgggcagctcggtgatgtgacacttactccgttacatttgcggcgccgatatactgtggcaccccaaattaatgcttaaaaattaaatctcaaacactattttgtttcctttatggtcataagaaattcttttcaaaagtaataacgaaccactgaatgaaatctttttaaaaatatttttcagcgggggctttaagaaatcttttcaatttttcgaatttataaatttttaaagctggacagcgacgggatattgtaaggaagaagttagctggaccttaaagcaagtaaagcggcggttgatacgaggcggatttgcctcagaacgcaatggcctagttgccaaaggactggatttccacccctggcttaacattttgcctatttctttattaaacagaggaaatccataaa

SEQ ID NO: 76590 - DNA, 680 bp, Heterodera glycines
atgggcacaccatcagacacaccaccagcagcagcagacatcaaagacgacaacaacaacaacaacaaaaagaaggaagtgggcggaattctgaacatcggcaacacatgctacatgggcgctgcactccaatcattggccaacgtgacagcactcagcaattttctgatggaaaagtgggtgccaataatgtcaatgtccaatgccatcaatttatgtttttacccctcttttttcagcgaaaaccgactgcccaacaaactcgtcgatggaatatgtgcaaatgatcaaaagcattttggtgttgcgacaaccggcggcgccattcgaactgaaggtgtggtgaacagtgtgccgttggtgatggtggtgttgcgtttcatgactcgccgttttttcaggaagtcatctccagccgtaccaatttgttcgctgattcgttccaacatgacagccaggagttcatccaattctttgtggacgagctgcacgagtcgatgaagggcattctgcgcggtgttacgcaaggcgtcagctgtgacatgtacagaaatgacggcgtgggtggtggtgctgatcaacgtgacgaccaaatttggcgcaatgcaatcgacgtaatgccaaattttgtgattttttttgtaccgtttaatttggcattttcagcattggagaaatga

SEQ ID NO: 76591 - DNA, 1253 bp, Heterodera glycines
atggcaatgtgagagaatcagcgacctaactgatctgatctgatccgcttttccgttacgcatatttcagtcccatccctttaaacagatcttcaaatggcgcgttttcatcgatggtcctccggaaacaccatagtgagtgggcggcggcggcagaggaaaagtgcaaatcaatcaaattaattgtttccccattaatccctcctctcccctttttttagcgcgggatgcacgtttacggcactgctcaaattcccagcttcgttcccgttttatccgccaacaatgactttcctcaccgacattcttcatccgaacagtaagaaaagcgcgcaatgattcatcaaatcccagcaaaagcccccacccgtcccttttcagttgacacgagtggcaaagtctgcatcagcattcttcatccgcctggcattgatccactgggctatgagcaggcgtcggagcgttggaattgtgaccgtaccgttgagtcaattttggtgtccattcaactgctgctggcggagccgaacttcaacagtcctgccaatgtggatgctgccgtaagtggattgattcttcggcatatgaatatagtatatcaattttcatcaaaatttcaggttttgttccgcagcgacccggcacgatacagggaggaagtgcgtcgccgcgttgagatagtgatggcggcaccaacacaaccggaagggcaggggacgacgcaaccgtcggaagggcagaggacgcaagcggcggacgaacaggggacgcaaccgccggaagaacagagggcgcaaccgccggaacagcaagggacgacgcaaccgccggaacagcaagtgacgacgcaaccgccggaagaacagagggcgcaaccgccggaacagcaagtgacgacgcaagcggcggaagaacaggggacgcaacagccggaagaacagggaacgcaacagccggaagaacaggggacgcaacagccggaagaacagggaacgcaacagccggaagaacagggaacgcaacagccagcgacaccgccgcctgaagggccgcagcaacaaacggacgaatggtacatgtgatgtgatgtgatgccctctgagtgatgatattattacacttatgtatgtattgtatgtgattaacagtctctctctgttcatttgccctgcttttgttcactgtacatatgtgtatatattgtcattcaccaattactgtatgtatattgtatatatgtgatgtatcgagca

SEQ ID NO: 76592 - DNA, 784 bp, Heterodera glycines
atgcacagaggcggcggaaagcatggtgaatttggccctttttataaagaaattttttgctttatttttggcaatttttgagagaattttcgttatttttgaaaaattttggaaattctcaaaggacgagagaaactttccacaggcttttctggaaggtgtgtacgtgcaaaatttgcagacccaaattgaggtgctggagctggaaaatgcatatttgcgaggctcaactgaaagggttttccaattttcaattttaatttaaatttatttttattcatttttagggcgctttgttcgtccggcagccaaaccgacgcttttcctcagtaaatggccacagcagaaggaggaggacaagcggaacaaaagaagaagcggagacagcggcagaagcagcacggcactattattatgcgacgagaagttcaaccaacgcaattcgagtggaatcggaggaggaagaaaaggaagaggaggaagaagaggaggaggaaatggagagggaggaggaggaaaagcagaggaggagagaaaaaagagtaagggaagagggggggggggggtaaagaggtaaggcaaaagggaaaaagagtaagggaaaagaggagaaaaggaagacaattgaaggggaggaagaggagagtaaggaggagagaaaaaagagtaagggaagaggagaaagagtaaaggaaatgaagaaaaaagtaaaacaaaacaattttaaggggaggaaaaggaggaggagatggagaggaggaaaagcggaagagggggaaaacga

SEQ ID NO: 76593 - DNA, 1111 bp, Heterodera glycines
atgtttcttgtgccgatgttattggaagcccagcaaaagatggcctccgggtggccaatttatctgtaccaaattgagcacattaattcgggatatccatctgatattcctgtcaaaggtgggcaggagggcaattgcaaacactcaaattttgaaattttaatttttcaaaatttaatttaaattttaattaacttttaaatttaatttaaattttaattaacttttaaatttaatttaaattttaattaacttttaaatttaaatttttccaggctcttcccacggcgtcgaattggaccctttgtttggcattcctatcccttacgaaactgaaaatgcgacggaagcggacaaacacttccaacgggcactgatcgaaaccatcacaagcttcacaaaggccgggtaaatttagcaatgacactttaaattagtggttggtggtttctcggcttgttcttcttcatgatactcgagagtctcgacttgaaaaaattctcggggttttggcctcgagactttggattaaatttgactcgacaaaagtctcggatttttggggccgtctcggtctcaagtccttggcccaattctctgtctccagtctcgaggaactcggtctcgagcatcacaagtccgtacctatttttgggtctcaattatcaaaatggcagtaatttgggtggcgggttttattttgtgtttttaagagttccgcgcatcaattcgttggccaattggcgtccgacagatccccacgcaccgtttcagtacgccaattttagctcagacaccactcaaatggagaaatcgctagcgccggaaaagttggaattctggcgccagctcagtgccgactttccctacgacatcattgagggcaccaaacgcgagacgcaccaaacaaaggacgaactctgatcagtggcgaaggaaggatgatcagagataaaggcaaacattatgccaaaaaaggcaaacatgccaaatcaattaatttaatcaattattttgtagcaatccaacagtatttgtatttaaatttcatctcaaatgtcaattatgtaacaaacaaaatgaatgtaaacacatgacatttgccaataaa

SEQ ID NO: 76594 - DNA, 720 bp, Heterodera glycines
atgcccgccaaacctaatcttctctcgcaggagcttgccgaattggaaagaaggaaaatggagctggaacagatgatcgcctcagctaagaaagaagtgccggaaaggaagagccgtcgtccaaagaagtgccaaagttcggacgagcccgcccctcaagacgagcccgaggaaaagggacctaaggcggcagctctctctgatgctccgactactcagccatcccatccgccgctcggcatcgtgcctccaccacccccatcacctgttggctccgacatggccgaccttttgcatggtcacgtcaataagtgggcaatggaacgtgaggaggccgtgcattttttgcagaagaaaaaaagagatgtcgccgtgcctgttcacgatgcactcaaaaagttcaacggcggcatcaaacgcctgagaacggcgctggacgacgtccaggaaagtgtcggctcgatagctgctggtgtgaacgaattggccagctccaccagtgacggcttggtcattaccgtcactcttctgcaagttgaagtcgatcgccaggcggtggagctgcgatcccttcgccgatctctgcaccctccgccagacgtcgagaccgttgagacgttgtcagtcatctcgtcggaagaaggagcagcagttgccgaaccatcttcggcggcgagtgtcgccaaagcgactgagaaaggggagaaaaagaagaaatga

SEQ ID NO: 76595 - DNA, 796 bp, Heterodera glycines
atgggcgaaaacgatgatggcgatggcaccgcgggcggtgccgtaggcggaatgacatcggccgccgcttcggccgactcggcactttcggtgcacgacgagttcgcgggtctccaggtttttttagtgcggtgggactccgattctggcattctggacttgcgaggctcggttttttggagttattagatggcaaaattccgattttttggccccctggaaccacacgaatgccaaccaatgaccattaaagaaacggcacttttgctgtgggggccgcagaaaaagtgccaaaggcgggatccattttgttttgcaatttttattgggaaaactttttgtcggggatttctgggtcgctaatcatgaatcttacatctatttcaaccaattgtcaagaatatggctttggtcaagtaaggaaaaaaagttgtggccaaaaaactgacaataaggatggccattgattggacacctaaaattgattaaagtgcaaatttaaacttttgactttttgttcgaattcgttgggtccggggttcaaaattgatcgaaatgggttgtcagtttcgtgttcagcgtgcctgaaaaccctcacaaaaacatgtttttaaaactacattttttgaacaagttgctatgtcatccgaactattaccaaacagtttcttaccgtttattcttttttttccagaaagagttggccaaggagttgaaggtgaaggacggcctggaacgctttctgtccatggcgtcggtgctgaacccgaaggcgtacacgcccgaattgttgtag

SEQ ID NO: 76596 - DNA, 1181 bp, Heterodera glycines
atgcagcaggacgaaaaaaaccgaattctaatctgcactccgtcgaacactgctgctgatttggtcgctcgtcgtattttagaaaccaacatactcagtcccatccaaatgcgtcgttactacagtttgggcaaaagcgtagacgaaagagacagaggattggacacaattatcaagatggaaaagtgggtttcaaatgttgttgtttttttgcagtctctccgtctttttcggaatgtttaatttttggcttgtttttagttgctccatttatggcctttacgacgagcgtttcaaaattgacaactacgcaatgttgacgaagcagaatgtccgacttgtctttgctacgctcgcctgttccgcatacctcgaagaggaaattcgcgtttccgattttttctcgtcagtaattacactcttttgtctctgcaaaatctccgttattacaggcacattttcatcgatgaagcgggtcagtcaattgagcccgaaactctgattccgatcacacgcttcgcaacaagaaacactcgcgtggttttgtgcggagaccaccagcaattgggtgcgttttactcattatacataccgaaatgttagaaaatgggtctcctctcccccaattttaggccccgttgtaaaggcgcattttctcaaggcttacaaatcgtgccatttgtcattgatggaacgattaatgaccacaatgagagcagaagaaaattcttttagaattaatggacaaaaaagcgtttacacggacgggtattaaattgtttaattttggagtaggtatttaaactctttcagacggactttttgccagctgacggacagttaccggtgccatccgaaaatcattcatttttcttccgtcaatttttacgacggcactcttcgcgcagttaacgaagagaacagaaagtctttttgcgattggaagcatttgccctccaaagttttttttgcccatttgctgtttttttagtctcaatattttgcagaattttccgcttttatttcacgcactgacaaaaggggccgaagtgaaacaattggagggccgatcttatcacaacgaagaggaagttgaagtggtggagaaatacatccaattggtgagggaaacggacattgaggacacggaaattggggcgatcagcccgttcaaacaacag

SEQ ID NO: 76597 - DNA, 2040 bp, Heterodera glycines
  unsure (1)..(2040): unsure at all n locations
cgtctcaatacatctttgacccgagccaaggaattggtaattgtcgttgcgtcgttggattttgtacggaatttgaattccaanncatcnccaattaatattggatcaggtaattcaatacaaatgattcctttttatccaatgccttttcagttttattgagttttgcatagacaacaaagcctgttttggtggatgggtttgtcgatgagttgggtttcaaccagcaaactctgactaaaaatgggaattttctgcggaagtgccttaaagagagttttcattctgagtttacacgcatcgagagaaagaaaaagcccgaatttgctgtattttctgcaccaattcgaaaatgtatgtttctcttttataatgcaatttaaaatctgtttaagattctgattcggattcctcaacctccgaatcctgcgatgaggacgaaggcacagtcagtgatttgtcaccactttcttcaagcgacgaagaagggaaacaattttgggccaaacaaattccatggagaaagagaccgagtgaaaggaacactttgagagggcccaaaatagaggaaatggcaaatgcgatgagcaaactgaagaccaacgaatatacagaagacatacagtacgaggatttgacgacggatccgttggaaaattggcctgaggacgggggccaagacgacggttatgccaattggaactgtccatcaaaagcgacgacccttttgagcgatgaaagcaaacaaaacgacagtggaaatggctacggaagcggtaattttttaacaattctgaatgtgacaaaataatacttacttttgtccatcagcgcctttgtacaatacgaaaacggaaaatgttactgcaaaacaaaacgacagtaattacgctaattgccagcaaaaggttagcagaattcccgaggaaagtgtccgcgatcagccgacacatcggccgacgaatgcacagaagaaagactttttttcggagatcgcaacttccattgaggaagggagcatcggtgccgccagggggaagaatcccctggggagtgtccagcagaactgcaaactcatgtgattaacacccaacccatgccatggcatttctatccgggtttactcatatgttgatcgaagatacaatattcttgtttaattctttattatatgaattttatttctacattaccgaaaagatgctaaaacccgatttgttttttttatttttctgtttttttagccagatcccagtttctatcattgtttcaaataataaaataactaattgtaaacaaccgatggaccttgattaccaatttgaagaattagaggcaagggttgacaaattgctaaatgccaatgcaggaattggtggtccgatcacagacttcgcttttaatatggccaaagaggagggttactcagtccaattcgtcaaatacgttttggattcggttgacattcattacagagacgagaaactgctcagacacatggtaaattaaagcaacaaatccaagagtggaacgtcggcaccttaattaaggtacgatttacagcttcccaagtgaagaacacaaagatacccttttcggagtgtctctccgccaaagaaatccattcgatttctaatttttgctctgaattgaaaaacgacattgccttttcgattcgccctgtttctcaggggcacagccaatcggccggcgcggagtttcctttgctcacgcgcattgccattgtggccacttattgcgcgagttacaacccccaaacgagcgacaaagtgtttttcttcaaagtcggcacttttggaaagcactaacaaagtttttgatcttttcaaggggaaagacgttttgaggcgcaaattgcgaggggcggcgcgggaggaaaattggcacgaaagtgggccacgccctttcgaccaccagcgggcgctgttcattttccttttcttctgccgccaatttgacgaggcacttcacgacagtccctcggcttcttctgctggctttcacttcgattctgtttga

SEQ ID NO: 76598 - DNA, 947 bp, Heterodera glycines
atgccttcttcttccgctgattgttctgctgatcgctctcttccgtcttcctcttccgttatcttccaacaattcacgatcgatcagcgacactttgtggacgaggattacttcagtctcgagagtattttcgccaccaatacgaatatttgctgcactttcgagtctaaaacgccccccggtgagtttggttttttttcggtcattcaaatgtttcagcgctttttcctctgctcggccggaaagcgcctgaggtcatttctgagaagggataccgtgccaatgtccccgcttggctcgtccccgccgtcgaccacatttgctcggtagtgccatactgggactcaaatcccgattttatagggcccctaatcccgagtgttattttaggaccggaattcgggatttttccaaaaaactaagaactaaatttcctaaaggatttaagggggggggggcttagcggccaaaaaagcgaaggttgtctatccatgtaaatcgacgagcttttttctttgttttaaagccatttttgcggcgcgttttttacacaaacccataaattctccccaaaacccaaattcataaggtaaagtttcgccatttttaattaaaattgttcaatcgaaacatcgggacctggatcatttataggctcttgggattggaaatcgggccgagataggattaccgaaattgaaaccccgattttgtctggatcccgattacgtccgagctctagtgccaactcagagacacgcatttaacagtcggattttgccatagtttcccatttctttcagtttgccgtgcccaccgtttacaattccgtcaatcgcgacgtaatccacgcgggtgcccaatcggtcaacttggaacagttgcaacgccactactacacattgggcacgttcatttgcaggcaatccctctcaataacattcacg

SEQ ID NO: 76599 - DNA, 101 bp, Heterodera glycines
atgggcaccgaagggaggacgaaggacggcaccgaagggccgccaaaaggaaacattgcggcggcatttcgacacttctctctgtgaaaaactgctgatca

SEQ ID NO: 76600 - DNA, 2888 bp, Heterodera glycines
tcgtctgttgcccaaagcgcaaattccggcgacgggcaacaaccaatggccacaattcgcccgaaaatagcgcaaatgagtgccgaagttgtggactcaaacccatacagccgtttaatgtgcgggcattccgaataaatttaactttaaacaaaaaacagggccttaaaacgcatgggaattgtgcagaattatgagcaaatccgagagaaaactgtcgttgtggtgggcgttggaggggtcggttctgtggttgccgaaatgttgacgcgatgtggcattggcaagctcattctggtgagcagagaacggaaggcattttaacactgaaaacatttgggaaatcggggaccacgcgaggggttgggcagacggctcaccaacaaagggaaggacaattagggaaattttatgtttatttccactagtttaattttcacagttcgattacgacaaagtcgagttggccaatatgaaccgactgttttatcagccgcaccaaagcggacagagcaaagtggccccccccccctccctcctcttccccccccccttctttttgccgaatcaactcataaattcgccatcttccagcattttccatgcgtccgcttctcttccgtcccttcaatttatttcttctcttccttttcatatttttcctcactaaaatccgtcgtattattcatattcaatcctttcttgccgaacaaagtgtgcctttgcgggaacaaaaaatggccgattttgtgaagccattcagaaaagcaatgggaaatttgtaaacagacaaaattagtcattttaggccattgagagggttggcactgatcctccggccattgtcctccttaacaaagtttgtcatcctcttccaatccctccccttccttttcgattcgttcgttcagttcgccctcaacatcactctcaacttcgtctgcaatttgcgtcttttccccggcgcttctgatcgcctcatcgtcgttgtgttcgaccacatctccgaaaagactctgctcaattcgtttccccatttgaatgtcatccattggccccttttggctttggtcggtcaatcgaccgcctcaaaattaattcaaaaaatttccgaaaaaaaattttaggcggacaaattcggccccggggatggtcgctaccaaatgtttcagtatttccgtgccaaattggctgtttttctcacggagttggtgccttctttttggatggtgaggcgagtaaaaagaaggaaaatggcaaattaatgggcaattaggaagagaatttgaggtgcaagcggacacaatttggcgggaaaatcttttcgaattgatcggttggaagcgaaaattgtgagagaggaaacggagaaattcagatgtggacaatggcacgaatgaatacggacgagcggatttgatctttgacagtgaggggagcgacgggtaaatggccaaagaatttcaaaggaaattagataattactttaatttagattgctcagctcaatggttcgtccccgtggaattttgaaatttctcaatttttccgatcgccggcggttatttctttgtccgctcatccgtcagaagtcgcagttttttcgactctgtctcccgctttttgctgaatcacttcgctactgataataatgtgatggctcgccaatgccttcttggaatgcacggcgcaaaatgtgcgcaaatcccttacaggtcgctaattggcgcagaatttcgtgtcgaatcggacaattgacaaaaaatgcctttttgttagagttctttcaaattggcgccaagcgattgaaattaatgaaaatggagaggacgacggcgcggctttgttccaattcgatggcggggaaaatacgggggacaaattcgagaaaatgagagcggaaggccatctttttgtggatttgaattcaattggggaatggaatgatgaagaaaaaggaaaatgggagaacggagagagaaaagcgaaatgtaacggcagagggggagagcagaaagacgcgagaggaacagagagtgaggggcaaagttggagggcaacagagaagagaggagaagagagtgccaatcggacggaaaagaatcgcaatcgaacaatggtcgccgccattcacgcgttgttcgaatggatccacgggcttttccccggcatcaagcagtttttgattgtccgattgtttccccattacgcagcacatattctcttataaattaaattagccattgtgccaagaaattcttattgttaataaataaataaataataaaacaaataaattttaattaattattagccataatgtcccttttgttgtaaatgaccattcgaatgatcaggcgaaagaacaacaacagatgaatgcgtgcatgaatgagtgatcaaggtcagcgagagaatgtgcgccgatggcccttctccgtcgtccgatcgtttttcgttcggtgattgatcgttgcgcatgccatccgtccatccgttctctgtctgtcgttcgtcattcttttttttcaatactaatcacgagattctcgtcaccatttattcaatcatttatttctaattaaaccattaaataataatggcaaatgccccgacaaaattaatccgtttgttaatgtgtcgtccgactcattttaatgtgaaatacgaaataaacccatggatgaggccaggcgacccggtgaatgtgcaaaaggcaacagatcaatgggaaagactgaaacgcactatcgaggttataaaactgcacaaaaagacaaaatatttatgatttataatcatatccaaagtctctgttggggagtagaaaaaggccgggattcggctgaattctgattcgggactttaaggaatccggcgcccaagtc

SEQ ID NO: 76601 - DNA, 1630 bp, Heterodera glycines
atgcgcaacgatcaatcaccgaacgaaaaacgatcggacgacggagaagggccatcggcgcacattctctcgctgaccttgatcactcattcatgcacgcattcatctgttgttgttctttcgcctgatcattcgaatggtcatttacaacaaaagggacattatggctaataattaattaaaatttatttgttttattatttatttatttattaacaataagaatttcttggcacaatggctaatttaatttataagagaatatgtgctgcgtaatggggaaacaatcggacaatcaaaaactgcttgatgccggggaaaagcccgtggatccattcgaacaacgcgtgaatggcggcgaccattgttcgattgcgattcttttccgtccgattggcactctcttctcctctcttctctgttgccctccaactttgcccctcactctctgttcctctcgcgtctttctgctctccccctctgccgttacatttcgcttttctctctccgttctcccattttcctttttcttcatcattccattccccaattgaattcaaatccacaaaaagatggccttccgctctcattttctcgaatttgtcccccgtattttccccgccatcgaattggaacaaagccgcgccgtcgtcctctccattttcattaatttcaatcgcttggcgccaatttgaaagaactctaacaaaaaggcattttttgtcaattgtccgattcgacacgaaattctgcgccaattagcgacctgtaagggatttgcgcacattttgcgccgtgcattccaagaaggcattggcgagccatcacattattatcagtagcgaagtgattcagcaaaaagcgggagacagagtcgaaaaaactgcgacttctgacggatgagcggacaaagaaataaccgccggcgatcggaaaaattgagaaatttcaaaattccacggggacgaaccattgagctgagcaatctaaattaaagtaattatctaatttcctttgaaattctttggccatttacccgtcgctcccctcactgtcaaagatcaaatccgctcgtccgtattcattcgtgccattgtccacatctgaatttctccgtttcctctctcacaattttcgcttccaaccgatcaattcgaaaagattttcccgccaaattgtgtccgcttgcacctcaaattctcttcctaattgcccattaatttgccattttccttctttttactcgcctcaccatccaaaaagaaggcaccaactccgtgagaaaaacagccaatttggcacggaaatactgaaacatttggtagcgaccatccccggggccgaatttgtccgcctaaaattttttttcggaaattttttgaattaattttgaggcggtcgattgaccgaccaaagccaaaaggggccaatggatgacattcaaatggggaaacgaattgagcagagtcttttcggagatgtggtcgaacacaacgacgatgaggcgatcagaagcgccggggaaaagacgcaaattgcagacgaagttgagagtgatgttgagggcgaactgaacgaacgaatcgaaaaggaaggggagggattggaagaggatgacaaactttgttaa

SEQ ID NO: 76602 - DNA, 824 bp, Heterodera glycines
atgaagaaaagcaaaggcaacgattggaagaaattgacagcaaaaagtgatcaaatgatggccattttgattggttggtcatttgattgattattaattggccaattgttgctaattcgtcctcctccttcacttcacaattgcaatgtgcaacatttggctgctccgccacttttcataaattcggacatatccacaaatttgacggtaaagcccaacttctgcaccatactcgccgtgtgttcagttccgcttggatggcatgccatttttgattaacatttctattgtcaccgtctaccgtacctattgatgattactgtttttccaattacgatggaattgcaggcgaatctcatggcgtcctcctcgtggacgggcacaagttcgacctcattggacatgttatgcctggccactgaaaaaatggaaaatcgaattgactgactgacggaccgaccgacccggatcaaaagcgtagggatagtaaatggcgatctgatcattcaggggacagaagcaggtgtcgatgtggtaaaaactgaagaactcgtctttttcccattcaaaaaatcccatcaatttgtaatgggaattaaggattattccaaagtttatggcactagtcggagaagcactggtttaggtttaaaaaaatctaaaaaacaaaacaaaacaaaaaacaccgggtaccatagtaaaagttaaggttgggtagataaccacaactacgctggtttacccgtagtaaatgataactaaatttccactaaattgcaaaaagatttttcaattaattttaaatttaaatatttaaaaataaa

SEQ ID NO: 76603 - DNA, 3075 bp, Heterodera glycines
atgattgatttggcgaaacttgcatatgccttgattttgttaagaggttcgtacatccataagactttgtagtagttcttgggaatgttgccctttatttgtacgcaaattttcacctattatgccgttgcatttcaagttatatattttgagcaatttgtcgtgtcgtttttcaaacaaaattttcttttcagataaaaattgaaatcaaatcgttctttgacatttgaaagctgttcgttaatgacggatcaacagcaaaagccgatgagtcggagtatgactccaaaaacaccttcaggtttatctttaaaatcttgttaataaggatgaaagaagaattaagtagatgtaatatgtgaccatcaattcacattaaatgagtccatttgttaacttttcagtgcaaccgttcaaaaagggcgacatcatttgggtggtctaccgaaaaagcatcaattggccagccaaagttcgtttttgggtgttctttccaaatgaagttcgaaaattgaactttcacaggtcaccgcgtactatcccaaggacaagaaagtgtcctacgtgttcttcccactgaagcagaaaaacgccgtcttcaaaacggacccggcaaaagtgcagcttttcacggtacgatttgctatttttgacatttcgcattaattgtgttttgtttctctcagttggatgaccaaatgccggaaaatgccccgctcgacttggagtacagttttgaacaggcccgtcgcattcttcaaggcgttccggaggaggaaattattgcagaaaatgtgcaaaaagaggaagaagcactctcccaaatgaagccgaagaaaaaaccgctgacgacggcggacgcattgaaaaaagcaaccaccggaacaccaaaagggacgccgcgaagccaacagaaacagccgaagattgtggccacggaaaccaaattcaagcagggcgacccggtcattgtggacactccgatgggcatgtggccgggaatggtttgtaatttgaatggaattccaaattgttttgaattgcgttcggaataagacaaataaagtgccgaagagaggccgtcgccttcgctttggcgttgcgcggcggtgcggagtttcggagccctccccttccccgggagcatcgctctgtccgcctcttcgtaaagaaagtgcccgctttttttggcacggtccgcatattcctgatcgcttggtactgccccgacggggtcatgaccactgggaaaaaccatgcggaacacaccgttttttattcctaaatttctttttcatgattcttttccccatttcagttcatttcctacgtgaaaggcaatccatcgttggtcaactattcactgtttcctcgcgaggaacactcccacgaagtcgtgcaaacgtcgggagaggcaatcatggcatttccacccgagcaaattgagcaagcgattgaggacgggcgcagcagcaactctgaagtgctgttagccgcgctgcaggacgtgcaaaagtacatgaaggagatgggacatgctgcttcaccacatgaagcagttggtaccacttcgtcgatgcaatcaccgaccatggacacgccgccgccactttctgccgaagatgcacaaccgatggacaccagtgaggaattgggcaaggagaagccgaagaagcggctcaaagtggagctgaccccgcccagagaggtgagtgagtcggaagagaaaagtacaacaaatctgccaaaattttgagtgtttgaaaggccggaaattacggcaaaaaaatcattttgcaaatgatttttaattgttttagacaaagcctcatcctcgaatgtcgttgaattcgcgtctcagcaaccacactggcgacgaagttgttgacaatgagagtcattcgccggcggtggcgacgccgccggtgccgaaaagcaaaaagcgaaccgccgcctcgctcaagcagaacgacagcggcaacaacaagtcacttagcacattgattgaggcggccaaaatgatggagggcggctcttcatcggaagagcatcaccaggacggagtcagcatgcccaactcgccggcggggagcagtggtgccgcgccgctggtcaattcctcgcgttgaaaactcaagcagacaccgactcggcaggagaccgtgagtaaatggtgtccagacatttgcgtttcgggcgacccaagccaaatcttacatttttcggcccattcttgcttaaaacccaacgagcaccattttttacatttcaccccattcatggggcggttacatgtcgtttcgctactcattgttagtgaaaatgcgttacttatatggtggataatgtctttatggtgtaaccttttggtttgcaaagtttttgtgataataactcgtgtaaacttgttcccagtgcttttttgttccctgatcacgaatcaggcatcaattttgaccaattcctattccttaatccaaactcagcccaacggtctaaactcggaaaatttgaattttctcgaaattttgttcgagctagggataaattgtcaaaaaaaatttgtcgctttgtaactatcgcatacctgtgcacagggagggtcagggggggtctcttagtcgatcgtaagggttcgagacagtcgatcgtacgaggtgggggggggaagttgggggaggggggagagtgaagggaggaagaggaagaaaagaaaaaggagtgagagaaaaaaagtaagtcacttatttcttaacaaatttcattaaaaaatccaaatttttgcgatagactaataccgatacatcaaattttaaaaattttcccgggatgcaaaattctatataaaaatttgtgaaacaggtcatcaaaaaactataaatttgttgaaaactcggggtgcaattaccaagcggaatgacttaccatttagcgaaaggacgcatttttactgattgcgagaagcgaaacgacttaaaattagtggctaaaaaatcccttgtcgcgtctaactcatatggtctaatgcggttctttcgggacttctcccccacttttaatgcacaaaaaatctaa

SEQ ID NO: 76604 - DNA, 338 bp, Heterodera glycines
gagtacaaacagtactaaattgcttcgcttttgtgcgattctgaaaaacaccgaacaaaagctgactgaacacaaaatgacaggaaagaggaaaaagttaaaggcacaatccaaaagggacacattttggttacacaattatttacttggatacaataaaatcgaatgccaaaaattacgaaaagaatgtgagaagaaatgaacgaatgaacaaaaaacaaatttttgttgttttgactgacacgcataacatcgaaaatgggaggaagagagggtataatttaatgtagcaaatggatggactcgaattacttctgctcctcttctcactgttaatg

SEQ ID NO: 76605 - DNA, 454 bp, Heterodera glycines
atgactgaaaatgtggacagtgagggggacggagataaaatggaagtggtgagggaaggggagggggcggggaatgaagagaaaagggcaccaccaaagcgccaacgctaacacttttaaaaaactaaaaaatttgtttttgaatttttcgtatacaggcattaaattccattttcacaaaaaaagataatctgatttctgaaagaaatacgaggctttaaaaaaattcagcaatcacaattccggccccagagaaatgccagaattcaaaaaaaattcagcaatcgaattccgaaccaaaaatctcggaattcgggtttttaattacctctctggcatgtgtgagcatgaaccctaatcaatagataactgcgctgcaaaaaattggacaccgagacgtgtggggcggaaacgcataaaaatgaaaatgaagcagcaccacccacggcatgta

SEQ ID NO: 76606 - DNA, 553 bp, Heterodera glycines
cttctgtcaaagcacaagcttgaactggagcgggccaagcgcaagtttggggacaatcagcgttcattggtcgacgcgaagcacagtttggacgtgatcagacagaaacaccaggccaccgtcgacgaactgggcaaaattgacctgagattgggcaaactccatgacgaattggccgagaagcacaaaaatgtaaaatgcattcgcagtgatagactattaaatgtttcgaattttaataacagtatttggactacaaaaatcgtttggacacacaatacaacgaattgttgtcggcggtgctggagaaagtcacgaaactctgcgaccactttcagcagatcgaggtaaaaaaagagcagaaaacagtgggtattgttcggtttctcattgaatgagagatttttttttgctttagtcttcacaaattattaattgtttaattcaggaccagaagaaatgcttcgcagaattggccaatgaaatgctcacgaagaacaaggaggatttgaagcaattggaggcgaagaaaaaggccgaagcggaagattaa

SEQ ID NO: 76607 - DNA, 1274 bp, Heterodera glycines
atggagaacgaaatgtaccaaaatttggacaaaattcgtgatgatcctcaatggagtctgctgatttcgtgcttcaaaaagtttgcgtccaaaggccatggccaaccgtacgaccgggaagacacattcaaggaggcattcgaggaatatcgtgtgcagaaaatggcggagaagagcatcgactgcaactcgtatgacgaattggtggcacggcgtgtggcccaggagcagaaaattcacaaactcgaggccgccattgccgaggtaggcgcgttggggacatgataaaattcggcacttgaaatctcatttacaggcgcagtgcgtttctgaacagcttgaaaaggaagccgcggactgcgagaatgacattgccagcatggaccgatacattgaggagatccaaatggttgcgtcggccaaggaacgcacattggtcagtttcgaggggaatacttgataaaatttgaccaaatccctctaattacataatgaatcacattggcgaacaaggaactggtgatggcacgggagaatttggccaacgaaaaccgggagagggagcgtctgatcagcacgtagcgaattagcggggaacaagcgcgtgcattggtcgcgaagcgtaaatcggtcaaatgttttttcaaaatgtacaaaattcacttttcgagttttaggttcgcgaagagttggtgttgctgcacgaaaacctcaacaaaacagaggcacgcatttacgaacgtcagcccatcattttcaagcagtccgccaaggtacttttggtggttgcacttcattcccccgcgtcgtttctccctccccgaaaaattataaaaattcataaacatagaaaattttcaaagaaaattcttacaattagtaagttttttcacaagaaaattttttgaaaaaattacaattagaacttcatcataaattttgaaaaagtcgctgaaaattttttttcttgaaacatgatgaaaaaattcaataagaatttttaaacacacatcattcagattcgttccgactacaacgcgttcatgagccgtcttcgcgtcatctgcgagccgttgttcagtgaggacgaactgcagcagcacctggccgaattggaacagtgcagcgtcgaacaggcaattgtcgagtttcagcgatgccgtgacgacaacaaattgacacgtttgctcaaccaactgaaagcgatgatggaatgccaaatccgtgctgtgcaacaagcagaggaatcaatgcgagtgaccaacagcaaattg

SEQ ID NO: 76608 - DNA, 1535 bp, Heterodera glycines; identical to SEQ ID NO: 12874

SEQ ID NO: 76609 - DNA, 1008 bp, Heterodera glycines
atggctgcgttggtgcaatcggtcgatgagttcatggcgggcattccagtggaggaaaaggaagagaaggagcagcatttgaagagcccaactccggagccgaagagtccaccgcccgagcaaaacccatccgagaatggagagtcggaagagactttgcgctcagaagagagtgccaaccagccagggccatgtcatggtgcgcctccgatgcggggcaggggtcaaggaggccctgggcgaagaggccctacgatgggaccaggccaaaagcaaaagcgcgtcaattatttggtgcggcaattgggaaaagaattccacaatgggccaaggagctgccaatgttggtcctgtcggcgtggaaagaactgggatggtcgcgggggacgaggaggtggcggcggttcgggccgcggttacgctggaggacgcggaggatacggatgcgctggtggacacgaggcacatggacatgaacgcggtgcacatggacatggacgcggagcacatggacattggcgcggagcgcgggggacataccatcacggaggacaaggccatcacggaacgtgaggccgaaaggggactggggacagttcatggaggaggggagggatgttggatctgcatttttggcttaattcattttttccattatttatttgtttctctttttttcttcgtttctttgacatttcctatgttgtaatttccctggcccttctgctcctcactcactcataaaagtgaccccttcgtccaatccatcggaaaatattcttccaaacaattttgtgtaattccatctgtttggcccctcccatttgtcattggtatttaagtctttgcttattctcttatcctcaggattttactcacccattcgttgactcaggttccctgcctaaagcgatacaactcacttaacaattggctttgttttcttactatttaaaaagcgatcattctttatttaactttgcatttccacttttgatttccatttta

SEQ ID NO: 76610 - DNA, 4834 bp, Heterodera glycines
gggaaaagcaatacaccaatgcccattcagagccgcaacctccgccctctgttcagccggagttgaacctgcaaagcttgtcccaaagccagcagacttctcgagagcagcagaaaagcgaccgcgactttccaacgcttgccggtgcccccagcaacaaatttcaggtattttttgttgcaacctttttaaaagtcatctttgttccaggacttgtcctccgaacatcccaagaatgccgaggaaagtgccgaattcgtttttccgtttgctccgcaaccccaaccggtaggatgcccatgtaatacttttcagtgcttgacaaccgtcatttcagcttcttcagcgctattacggcgcacctgttgcgcagaattccaaccaaagtttgtctttggctattatggaatttcaatactaggtcgttgcattaaaaaaaatttgccaggtggcgcctatcggcaccaccgtcatgcttctgaaaaggcaaaaatgagtaattcagcgtcgctgaaatttttgaaaaacaattcaggagaaaaagatttattgcttgaacagcaaaataaaaaatagtcattttattttgcagcggtgggggagagcatattcaaatttgttgaaaaaatccgcgcgtcttttcgaatggccatctttctccaactatccattattttgttgatttacctatttcccacccaaaatgaatgtttatttgtacgaaaaacccagaaatcctgagtaacggcaaattagttcccaatttctaatcgaagatcagccagggcaacccaaattgagcttgcccttattatttattgttttcattctcaatttgtgtttgatcatttcctccccggcccccaacgctgaaaccatgtagccaatttattgtgcaataaataattaaatttattttataaaaattattttttacacataaattttcattgatcatttttgaagaaattatggccctagcgtgagttaacgaattttaagaaattttcgaaaagttggcactggctaaccatattttgtcgatcattttgtacaccaatgcccattcagagccgcaacctccgccctctgttcagccggagttgaacctgcaaagcttgtcccaaagccagcagacttctcgagagcagcagaaaagcgaccgcgactttccaacgcttgccggtgcccccagcaacaaatttcaggtattttttgttgcaacctttttaaaagtcatctttgttccaggacttgtcctccgaacatcccaagaatgccgaggaaagtgccgaattcgtttttccgtttgctccgcaaccccaaccggtaggatgccatcatgtaatacttttcagtgcttgacaaccgtcatttcagcttcttcagcgctattacggcgcacctgttgcgcagaattccaaccaaagttcggctcagaaatacaatgttttgcaacggggcgcaagagtttccacggacagggaacagccggagaaaaagcactcggcccgtccgcccagcaccaacgccgcctcaaacggttctaccttttattttttgcctatctaatgtcatccatttgcactttcaattagttacaagcttcggaaatgccgatcattggaatcccccatcgatctgcggcgaattggaatcgcattgggacgacccattgccatttcgaaagccttcggaacgctcgttgttcaatagaagaaacaaagaccaatttggtacaaggccaacaagcacatcagatgccaaggaaaagggtgattttccattaccttttacattctttgcaatggcatttacttcgcaggttcaattcctcgcgaatttgtcaattcccgtaataaacgtggtcgatccactcatgccaaaggggagcgtgagcgcacttttgtccgcagtgggggcaaacccaattcgtcttccgcggtccaagaaaaacacgacgaggtgctcatttcattttgaaaaacctttgtagccaagatgtttctttgtctagaaaccattcgcatgcaactcaaacgaaacgggcgacagtttctcaaacattggcgaattccacgccgaagactacaactgtttgttggaccagcaaaaaaagtcgaaaagtttcactgactcaacggagaagaagaaaaacacacagcgaatgagaggtgtcaaatcaatggttggcagtagtagcagaagtgtcgacactgagcatggaaacaacacggaaagaaacggggcgaagacgaaacgtcgcacgacgacaaaacgtaggcatacacattcaattcaccctttttataaagactttgggttactaataaaaaaaatattgcaataattatgttacagcccaaaaacgcaaacaccgaaaaaaagattgttttttttttgtatttttagagccgcaatctccgccctctgctcagccggagttgaaccttcaaagcttgtcccaaagccagcagaattctcgagagcagcagaaaagcgaccgcgactcaatgcgtggctctaacagcagaagttgtggtactgaacatgagaacaattcgcaacgaaacggggcgaaggcgaaacgtcgcacgacgacaaaacgtaggcacttaaaaaattattggaactaccaacaagaatgatactcaaatgcagcgtgggtttgacatcataaagtaatagataacaataaaattttcattttgaaaataataatatcacaattatgcatcagggaaaacttaacaagaatttctgattgatttttaattacatttgattggagaattttgaaagggtgtaagtgacaaacccaaagattgctgtacaatatatggatacaatacgatgtataatcaaaaaaaaaaaaactagttaaaaatactttttaacttatgtcttttaagagccgcaatctccgccctctgctcacaatcagccggagttgaacctgtctcgtgaacaacggaaaggcgaccgcgactcaatgcgtggctctaacagcagaagtggtggtactgaacatgggaacaattcgcaacgaaacggggcgaaggcgaaacgtcgcacgacgacaaaacgtatattatttttgccaaattatttttaaaccaatgcccattcagagccgcaacctccgccctctgttcagccggagttgaacctgcaaagcttgtcccaaagccagcagacttctcgagagcagcagaaaagcgaccgcgactttccaacgcttgccggtgcccccagcaacaaatttcaggtattttttgttgcaaccttttaaaaagtcatctttgttccaggacttgtcctccgaacatcccaagaatgccgaggaaagtgccgaattcgtttttccgtttgctccgcaaccccaaccggtaggatgccatcatgtaatacttttcagtgcttgacaaccgtcatttcagcttcttcagcgctattacggcgcacctgttgcgcagaattccaaccaaagtttgatttttgacaaattttacatagcgaaaaaaatgaattttttccggcggcgcttgtcggcaccgccggaccgcccgccaccccccttccccaaaattttttttggaaaaaacgcgccgcaaaaaaaggttgttagagcagaaaaaaaggtcgacgccggagaaaaaatttggaccttcgtatgaaaatcggtcccgagacacccccccccccctccctccttgtcccaattgtttgccgtatggcccttgggctgagacaccccttgcacatgtaagattataggaacgtgtcgatatcacaatcagaacggtggagaacataataatatctttgatttaaactgaataatttcgcgttaaaactatttttgttctatttttgattaacaaagctggtaaaaatgaaaaccagtcccataagcacctttttatagtctgaaaatcacctctactcctaaaaacttcttgttaagttaagttggatctttcctccgcttaattggaaaatcttaccaaatgtttatactatattccaattaaagtttttaaaatttgcggtgacactttgtggcatcgccaaacgtgaggtggtatattattgtaataaattgtatgtttttgtaatacccttttatttatttatttaatgtcaaataaaaactaccacagaagggcataggccacttacactgcagctcgaggtacaaaaatgaatagatgaagatcaaataatactatattcgtagatgtcctcaaatgaataaatagagtatatgacaaacaagttttcatcggtttcataatgataacgttttaaaaatttatgttatttttccgttttgggcctacacctcaaattttataaaatgtcaacaaagggcgcacttaggcgacaattgtataccataacatagcataaattaaattagcgataaaggacactttcgatcttgcgcataaattttgaatgtgaaacttttttaaaattttgatgtgtaggcccaaaacggaaaagtaccaatttgggtggcatttaggaacagatattttgtcgatcattttgtacaccaacattccttcagagccgcaacctccgccctctgttcagccggagttgaacctgcaaagcttgtcccaaagccagcagacttctcgagagcagcagaaaagcgaccgcgactttccaacgcttgccggtgcccccagcaacaaatttcaggtattttttgttgcaacctttttaaaagtcatctttgttccaggacttgtcctccgaacatcccaagaatgccgaggaaagtgccgaattcgtttttccgtttgctccgcaaccccaaccg

SEQ ID NO: 76611 - DNA, 1261 bp, Heterodera glycines
atggttgaaaccggaccttacttatttgatcaaagctttgagattcagggcagaccttcgatgccttcggtcagtttgaataaatttttatttcatattaaatatgaaaccgttggaaaatatgtaaccagtattttgtaaggtgctgctgtttttcatgtgacattttattcaaaataaattaaatagcaattcaggtgaaggcctttgagaagagtcacttttccgcggaccaagatctaacgcttaccgacgagcttgtaagtgtatgagtaattagtgggtccgtaacagttggccctggactttgataaagctatacactcttttggagaacgctaactagataccattgtgcataaagaattaataatctcgaaaagaacaataattttaataaattataaaaaaaattaattcttttatttattaaaaataatttgaagcatataattatttatatttattgaaatcgaaatgaaattaatggtttgtaaattctaattaatataatacattaaaattaaataaaaaaaattaatttattttaaataaaaccttattcatcagaaaaatctgatttgaatttaaaaatttatttattattaagaaaataaaaaatatttttaattaattaaaaacatgtgaaagaattcaaaagtaatagaaaaataagctactccgtccggatccgaaccttcccccccccccctcaaattatgtgcctgggactcaaatgtcccgcatatgccaaaaagaagcccccatgctagggggtagagacagaggctggaatttttttaacttttagtcaacaccaactttgggtcctcaaagcagacattttttgattcgaaactcagttggcactctgatcaaaaacctatagttttcccagatgtcccgtcccgagttgccttatctttcacttttcactgtattttttacatttatagccttaaataattgcattcattcaaaaatattaagttggaaagaatttgtaaccacgaaatcggacacattctgtccaacgcccaaaatgaaaatggattttttttcaagaatgtaagagtaatttaaatgatatcaaaaataatgatctttagatcgtaatcaaatctgatggttttacaagccatacctcccattcactgccagccacatacaacgatgagcaatttctggcctacattgatttaaaattaggtaattttttgcggaatcaaagagaaaatattaaatttctatgaataataaa

SEQ ID NO: 76612 - DNA, 395 bp, Heterodera glycines
atggaggcggctgccaatccgcataacgtaaaaattaaacaatcttttaataatttaattaaaaaatacattttcaaaaatcatcttaacagcaaaatgaatcggtggcggcagccaaccagcagccaaacgtaaaaataacaaaaaaatattctattaatttaaatgatttttattatagaatttaattaattttaaaatttttcaatcattttaaattgtattataatggatttattaaaataatattaatttattttttaggtccttgaagaatcggtggcggcagacaatcagcataacgtaaaaatatttataacaatgttttaaataattaagaattgttaataatttacattttctggttttgtaaatgaatttttattaggaaatga

SEQ ID NO: 76613 - DNA, 318 bp, Heterodera glycines
  unsure (1)..(318): unsure at all n locations
atgcaagtgccatttgaattgcttaacgaatggacaaaggaaaagctgacattgaccaaagcaaatgaattggacaaccgatggataatgaagcgttgtaaaattattggggagaaagaggagaagcagcagaacactgtgttcatttggcttgttgctggcactaattgcattgggtgagcaattaaaaaaagcatttgatttttatccgaatttgaattttgcgcttaatttaggccattgtctccgccaccggaaaaagtggaagaacaaacgggacaaagcatcacaaaagggacgtcttctgctgancaatga

SEQ ID NO: 76614 - DNA, 939 bp, Heterodera glycines
ttggatttgcaacgacgtttggatggacattttcccatcgtttgaccatgcccaactcggcctcaaattggcacttctttcgccacgtttcaatgcgttggtggacaaacatttcaacggcaaaagcgaatcgttttctgctgacaaaatgagtgatggacaaaacaacaaaaacagtgatcaaccgcagaagaaatgtattaattaagaatgaccgaccgatcataatcatcagtgatcaagtgcattttatgaagaacaacctctcaatttcggtaaataaatcggacgcataaaaatggcaaaaaatgtacgaaaacaacaacttagatttgcacaaaataatgaacaacaaaaaaaaacaacttgtttttcgtgcgtttcattccactgggagctcaggaaaaaaatagggcaaaaacctaaaaatataagccctattttcaatacgattgtttgaaatttgccgaaattccctgagaaattcaatgattttgaaaaaatcattgaatgggatttgcggaactcaggctatatgctccggctataaattttacaaagagtttaacaacccacgcataacacaaaaatttttgctatctatcgaatgtatgaatttctccttgaaaagttatgacttgggctgggaattatatggaaatccatattttttttcctgtacagtgggatgcctgaaacggacgacacccaactcgtactgctccaactcgtactgctccaactcgtactgctccaactcgtactgctccaactcgtactgctccaactcgtactgctccaactcgtactgctccaactcgtactgctccaactcgtactgctccaactcgtactgctcaactcgtactgctccaactcgtactgctccaactcatactgctccaactcgtactgctccaactcgtactgctccaactc

SEQ ID NO: 76615 - DNA, 2045 bp, Heterodera glycines
atggcctcatcggcctcctcttcaacaaaacttcgtcagccctcgggcaatcattttgagacacaaaatcaccacgtaaacaacaccatggaagtggtggaactgagcaatgtgattaaaaaggatgataaaaagattaaaatatgaatttcaaaggttgataatggttttggcgaaggattggccattgttggcgatcaaacggtctctcttccccagcaacatttgaacaaaagcggcgatcgaaaggacaatgaaaatggggatgatgtcatggttgtcgggcaaaatgaagatgccaagaaaaatggcacaggtagaggaggaaaatgccaacaattcagcccttcggggaaattgactcatttaattagaatttacagaaaaaaacctttttttacattttttattttcgcatgttggacaaacttttgaagattttatcagtttcttaattttgattttgaagtatcggcgccagacaaatttatttggcacttttgctgtttatttcggtgctcaaacatctaagaaaagtgccaaaagtttttttattagaaatattgtaattttggtgtcaaaattttaaatttgaggccttggtctttaaaaaaatgcgaacccagggaattaactgtttgaaagctaattagtttttctaatagaaatattttttcaattttgaatcattttcattttgtgccttttttcttgcagacaaagccaacgtggactgtattctgttggacgaggaggaggagaacggcaccaacaataatgatgacgatgagattcgcctgattgaagagccagtgccgaaaaaggcacggcccactgatcatccggggccacagccaccggtcaaccgaagtccggttcccgaggaccccaaaacttcaagagaagttgatttttgggggatttttatgcctaatattagaaagaaatattggtaatactaccgatggtgtcccccttttttcaaaaaaaaaaaatttctaaatttccgaaccggccagagaatacgactcgaacatctattctaaatcccggattcgaaccaattccaacaaaattcaaaatatgcaacaaaaccggttcaaatgcacgaaaaaactatgtctttcaaattagaattgttcgaccgtggcaccattttctttcattttttatgttccattttccacccaccccctaaaatttttaaaaattttcctattttatgtccgactcatatgctttaatgtccccaattttacaacaattaatttagccagcagtgcccatctcgtcctcctccgtcaccgctgctgggcccagcaaaccctcgccactgaccgtgccaagccaagagatcaactcgtactccgatctgttggaccgattggagctgtatgtacggacagcgatcaacgaaaatgacgctgtggacagaaaggcacggcatttttttttaaatgcagcatttgtttttcagaatttaaccctttggcatttgtttgtgccatattttttttttaccatttttggtaataaataatacctgtggtacaccacctaccctttttgaaataaaaattcttagatttttctcgagacaattcgttttagggattgtaagtgtcgggcaactgattctgacattcgtttagatccattttgaaccccaaacccggactcgaaaaaagtcaaaaattcagaaaattcacatttctgtaaaaaaaccggacccaacctcacgaaacaaaaagtttacatacgccgattttgttttggcattttaaatatgtttttttaaactcctcattttcctggattctaatttttttattcaattttccagaaatataaaatgccattttctcaacaacaaaaaattgcgctgttttaggtgttggacgcactgctttccgccatcaatacgcaggtgcaaaaggcgccgtacgctgtgcgcaagctgattttggacaaacaattggtgctgccgaacacaatttcgatgccaccgtcgcatgttgttgaactgctcattgagcatgatccgg

SEQ ID NO: 76616 - DNA, 2194 bp, Heterodera glycines
atgggggagtcaattcgggtgatcgctttgatcgatatgggtaaggaagggaaagcatttttttggcttttttccaatttatgcattcaatcactgtttacgcgtcctcaatttccttttggccataatattcctacttggtcaatcaatgtctaaaaaacaaacacaaaatttggtgtttttccggtatattcattgaataattttttttgtcaattgcatttaacaaagaatttaattatatagaaaaaaaaatctatagactttaagccttcgattgacaccaagattttttttttttaaaaaaagggcggggtttccacgtttgagaaattttgcaaattttaatgaaattaaaaaatcgaccattttttttttgatttttcatttcataggcatacatacccctgccgaattgaggaaatttttttgccaaactttgtagatactttttacacccaagtggaggagcgtgaacagccccatctccgcggccgaccgttggccgtcgttccgttcagtcgcggtacaaccatcacgggacagtaagcaaatatttctagtttttgaattattatttttttttctaaatccgtccttttgcacctagcgctcacaacatcgtctctcgaattttttgattttttttaaaatttaaccctccattgtttttcagggccattgccgtcaactatccagcccgagccttcggaatcaaacggggaatggacagcaacgaggtttgagtttcaacaatcaccaaattcaatttaatggtaccgaaaaagtgccggtggtgtaaaaaaacggatgaaattttgcgcattaattttactattttactcggagcggattatatataaccccgttcatagttttacaaaccggacccattaggtaccattcgatagcactaagtgtaaattttgtaattaaatagagaaaccattgggctatggaatgacatcaaattcatctaattcggacaaatacggggggtcttttgaataaaaaatggaccccattttttaacaaatttttgtttattaaatttcatttttttcgatgcgccatctttgtccgatcatccatttgtgccgtgtgcctgcaattgaaggcgtggagaagggagacatcagcaaataccggtgagaattttttttttttttttgatgggggtagaaaatttcatttccttgtaaatttccgccatttacgaatcaatttggtattttttaagtgcaaaatactagataaagcaaccgctctcaaatccgagctaaattactcaaaaatagttgtgaaaaaatttttgcaatcaaatttgattcccaaaatggacgttttctaagaattttttcaaaaattaatgaaaatttatcaaaaattcgcgaaaaataatcaaattctgtaatttatgtaattttacagggacgcaagtggtgaaatcttcaaagtgctggtcgatttttcggatcaaattgtggtggaaaaggcgtcagttgacgaggtcggaccatttttgggcaaaaaaaattttcttttatttttttaaaggcatttttggatttgactgcgcactgtgagatggaattaaacagccaaccaatggaggaattggttcaaaaggtactcattgctaatatctttttttagctgaaatttctatgttttttgcaaaaaagtggatttgacaaaaatttataaccgaaaaactcaaaaaatgaaccaaaaaattcaaaagtagtctttttgagatttacgggtattgtgtcgagggacggtcccaatgggttccccaaaaaatgtcgtaaatcgcaattcttacaccaaaaatattggaaattttttttgtacaatttttaccaacaaaaaaaaaaaatcattttagctgaacgatgaaattgcgcagctgttcccgagcacatttttggtcaacgaaagcgacaaacaacagacagtgatcgcggaggaacggttgaacagcttgaaggagtggttgagcaacgactgtcgcgtctccaggcaacaggtagggcgggtgcataacatgaaaaaatgggtgggtgcgtttttttgcaaaaaaaaaaaaagattgggtaacaggacgggacccgtattgtcatttgtccggaaaattttaattttagggccaggctccaattgacgaaacaaatttttaaatttgttaaca

SEQ ID NO: 76617 - DNA, 1172 bp, Heterodera glycines
atggcgagtcattccgatgaatacgaaattgatgaattttggttggataacattgcctatgatgacggcgagccacgtccaaagtcgaaaaaatgcgaaattattgcagggattgaccttcaaagtcccagacaacggcgagagtgggctgaaagtcgaatcttccgtcaatactacgatattattttggatggaaatggaaatttgactaattatgtaatatgcaaatcctgcgtgccacctgcgaaacctgttacatttaattatgccgggtttcataatttgcggtatattaaagactttaatttaaatatttttggatttgaggagacatttggaaaattggcatgggataaaatttggcacaaatgacaaacatgacaaaatggaattagcattggttgaattttgtgttgctgatggacgtcccttttcaattatcaagggcgaaggattcaagcatttcatggatgcttatgccgaattaatgtaaccggttttgaatgagtataagggaaaagttttagtattgaacggcatctgcaaaagcgatcagtactctcagctgatcttttgccaaatgagagaacaattggcagaaaagtgattgaaactctgcagacaaaggaatcggaactggacaaaaaattaattgacgtcagacaaagtgcttgcacattgtcactcgatttttcacaaaaattgggtgttgattatgcagttgtagtcatacattttatttgcaaaaactggtctgttactattatgtgaaaaataattttttaaggttaaggaaccttaatcattttgtacttcactgtgttccatggcctggggacatccaaaaaaatcgtgaaaatatttcgggatttattgatgacgtgttagaactttatgccatcaaaaattgccgaatttattacgtaactgatgaaggcagcaatttatctcatttgggtgatcgagaaagtcatcatttttgccttgcgcatatcatttctacaatttgtcggcggatcactgaaccttatgtcaatgcgaatttaacaaacgaaaaaaagcagattgttaacacaatgaatgaattcataaaggagttgcatgtatttattggagaattgaggtcataatacttaattaattaaaaaataatagttaaaatagaaaataaa

SEQ ID NO: 76618 - DNA, 83 bp, Heterodera glycines
gcgtattaaaaaaaactgctccttccaaaagtgttttcttaatcgtttttaaagcatgtttctgatgaattttaagaaaaata

SEQ ID NO: 76619 - DNA, 1044 bp, Heterodera glycines
  unsure (1)..(1044): unsure at all n locations
atgcgtggccaacgnctgtgccaaaattcccagctgtacctttggccaacaatctgtgcggtcggtcgaaatgcttggcccatcacttcgtcactggccaagtcgggctattcaagtgcggtgtggctgaagccccgcgttggaaaggtggcgaagccgacttggcggttctgtcgcaagtttttggtgcgcaatttttttaatgaatttaaaagaaaaataactaaattaccccaggcgagaccaggctataaccgactgattttgccactgctaaagaagggagcgaaaaaaatggcagatttgcctgaatgggccgagtcgaacagtgaaccgagcgaagcggaagacaatgacaccgcacgagccgaggaggcgggcacaagcgcggcagagcacggcgagacatcgtcgagagtttggtcatggacaacgcgaatgccgaaggcgggagaaaatgaagacaaaggcaaaagccaaaatacggaaaatcgagcaaagtctgagaagccacggaaaaaggagaagcagaaaaataaggacatttttgatcagttgcttcaggacgaaacggacgacgaagaagacaaatgggcgtgatcagaagagaatgaggggggggggggcaaaaagcaaaagcaacaacaaaggcattcttttgaagagtaccgcccccctcattaattcattaaacgaccttttgtggcgagaatttttatcagaaagtgaacgatgtttcaactgagaaattgcagcatttttctgtgtttgtttttattataaaaatggttttttaattaatgcgcaaagatttaacctcaaatacaaatcatatttcttaacaaattgtgatttttaatgtttattttccaattctgctgcttctttaaagtaacattttttatgaataagcgccgaaatttccattcacaaaattcgcactgcgaaatgcaattttggttggcactctgttaacaaatatgagaggtgctatgtcattatttaaaaaccatcattatgtgcgttatttaaaaaaccatcaaa

SEQ ID NO: 76620 - DNA, 136 bp, Heterodera glycines
aaaaaaaacttggggacctctgttttatataaatgttttagtacccaattaaaagtgaactgcagaaatttcattcatttttttcgactgctattttataattaaaatttggtttttattttttttatttgtacaa

SEQ ID NO: 76621 - DNA, 200 bp, Heterodera glycines
tgccgacccatttacataatcattttgttagcaaaataaaatgagaaaaatagagatttgttcaatataaccctgtactaatttattataaatttggttttttatagctaaaatttgtaaatgaattaaaaagggctgttttattaaagtgtgaatcgtaccagaattgaactctactattccgatctttttatatcaga

SEQ ID NO: 76622 - DNA, 783 bp, Heterodera glycines
ttccatttcttcagcgtcttcttttagtgcacggtaagacaacaaacaccgaaattaaattaattgacaaaactcctcttaaggcacgtggaattttgaacggagcgtaaaagtcattctgtataggtgagcggtttcattttggaacaatttttcaaaaaaaaactacaaaggaatattcctaactgtaagctttcaaatcatttttaaatgcccttttatagaccatagtcgatttgctattgtaaatttcggcttttttgagtatgtcgccaaaagtgatcataaattcgatcaaagacccgaaaacgatgaaataagtcaatagaaaaatttaaaaaattttctcatgtcagtgttctcccgatttattctctccattcccccccccccccctcgacagtttctacaagaatatctgcctgtacatcatcgcgctatggttcgccttcttctccgccttctctggcgtgaccattttcgagcggtggatcatcgccatgttcaacgttttcttcaccgcttggccccccatcattctcggcctcttcgaccgtccgctttcccagcggatgattctgcgccacccgcaactgtaccaaagcttccagcaaagggcattctccaatggagtcagtgtcaaagcatccgaattttatttaagaaaaaacgggtttaaattatcccggcatttgtccattaatttgtgccttttgcccatttcagcgcttcttcttttgggtgggcgtttcgctgtggcattcgctgctgcttttctttctc

SEQ ID NO: 76623 - DNA, 599 bp, Heterodera glycines
atgattcatttggtgccgccttttgctgatcggatgcttgcgttcttccaaattccaacgcctcagttaaacaaacagatcaatgtccaaacggatttgaaaccatatgaaaatgatccgaaaaaagtagtaagaaatgagcaaaagccggcaaaggggatgcgtcagagcatcacttctaatttaagccgagacttgaaatggagacaaatttttttttaaatttttcaaaaaatatttatccgtatttaaagaaaattttttaaaaaaagtttacaaataaattaaattaattccgatcacatttatatcggtgggcattgtttcgcttcgagtctgaccaaaatttaaaatagcaaaaattttagggacaatcaaccatctgggacgaatatggggaagattgtcaagtgatcaagaaattgttgcacaaaattgaacaattaataaactgtaaaaatgaaacaaattgtattataaaattaagagccgccccttgcgatactgtaccgaactccaaccgtatgctgtgctaccgtgacttgtattgcgataaagaaatgctgaaggaagactatgaccgagcacgcacactgtaa

SEQ ID NO: 76624 - DNA, 1575 bp, Heterodera glycines
atgagcggcggtccaccaattaccacacttgcagaggctgtaagtatcttagctagagttggcaaaattgaggcttggattttgtaaatgtttttccagttttaagtggtctgattttgggcctaattgtaaacatgagagtatcatgcattcttccactaattaaattagcgattatgaccacaattcacctttcccatgacctaattgcacacaaagtgcccattaatggggttggggttgagaaatatcagtttttcttccataaattagtcttctccacaaaatggtacaaaaaaagaaaatcctacccctcgaattgctttttgaattgaccaacgcactccgtttcgatgtccggtgggcgtctgtccgagtttcggaaatttttgaccactttatgctcaaaaaacaattcgcctggattcgggttgaattgacttcctgggaaacccttcgccagatggtttatataatccaagctttaaaccatcaaaattttgatttgatatgattgaatttagagggctgactttggcagagctaagggccagtttaaacgcgctgtcatgacacttccaaaccactcactggacggtaccttcagctgtaagccatcggggccgcagttctttttttgtcgggcagaggaggggaagggggcagagtcgactgattccctatttcaattctatgctttacatgcctaatttctgcagttaaaattttagctgtgagtgcccatttcggcttggactcgagcgtcggtgttcagattgttcatgacttggggctgaccgatccagcagccatttttgaaaaacgggtggaccatctatgtgagatggtgtcagaacactgggacgtccaaatgtttgggcaagcgactcgttgtaagttttgtcgttgcggccccaattattgttatccccaagggcgtagtgggagggggctaatgccccgaaaccgaaaacaaaatttttagtgaaaatgggaaaatatctgaaaaatgatgcccctccccgaatagtgaaaatatgcgggttatttaattttggttttatggtgtttttcgaggtcgctgatcacgattctaatacccattgcgaacccatgacccgaattcgaacaaaaatcaaaattaattttgcagcaaaattcacttttatgttagaatctgaacagaattcaggtacgggttccggaataggtcgaaatgagtatcgacctcgaaaaccccataaaaacttgtttaacacgattttttgaaaatttttatttaaaaaagggggggggagtggacaaaccaaactatacccaatatttgcttcggtcactcaaatccacgaactctgctgaatacacctttttcttactctttcctttagacttacgtctacactctttgcactacaatgatctcgcaggttgtttccgtcgtcccagcacttcgtcggcacaagttggtggagcaaaggaaggtggcaaaaccaaagacagtggagggcagaaggtggtcgcaccgaagaaaaagaagaacggaggagcaaagaaatcgcgcatcacgaaaaagaa

SEQ ID NO: 76625 - DNA, 324 bp, Heterodera glycines
  unsure (1)..(324): unsure at all n locations
atggcacttccaaaccactcactggacggtaccttcagctgtaagccatcggggccgcagttctttttttgtcgggcggaggaggggaagggggcagagtcgactgattccctatttcaattctatgctttacatgcctaatttctgcagttgaaattttagctttgagtgcctatttcggcttggactcgagcgtcggtgttcagattgttcatgacttggggctgaccgatccagcagccatttttgaaaaacgggtggaccatctatgtgagatggtgtcagaacactgngacgtccnaatgttngggcaaagcgactcgt

SEQ ID NO: 76626 - DNA, 398 bp, Heterodera glycines
atgtgtagtgtaaaatttggcattttgtttcttcttcttctgacaattatgccgttcatatttggaaatgacaaaacaaatttgccggttgagaaactgacagcacgacaaattcgatcagaaaaaccaattaacgggtaaaaaagaggcaattaacggacaaattttggaactttttttgttttgttttaaataccacaattaatttattataggataaataaggacaaatctttgaaaaatttttctgggtttttaagattcaattcctttaaataaaaaattttcaggaacaaggcctaatgccacctccatttttcagctaaaaatttaaagatttaatcgaatgatttttctccggtagaaaatttaaaagttcatttaattttgatttgaaa

SEQ ID NO: 76627 - DNA, 1476 bp, Heterodera glycines
atgcatttcaatttgtttccgcttatttgtattgttattattcttcaatttaaattgggtaataaaaaatataaaataataataataaatattcattattacagaagaggtcgtttttgcgccgtccttttcgcgccagctcgagtttttggcttctaacttttttcattgacgaccaaatctaacaatcttggcatcattcgaaagcccttcacatgcactattagcctaataaaaagcaaaaagattttctgatctataaaaaagttattaagaaaaattttccaaaatttcgatttttttgaaaatttgcagttataactttcttagtaattccaagcaattgtttataaaaaaaaatcttctaaacatgtaaagctttcgaataataccaagattgttagatttggtcaacaatgaagaaagtttgaagcaaaaaactcaggctgacacgaaaatgacccctaccgcatttattaccttttacagtatgccttgcccctgacagtaacggtggtcaatttgaacttcgcatcgaaaatttttcaaaatttgccaatggaccaattagaacaataaagttgggtcaacccaagtacattagagggttgcactggcgattgaatgcatttgttaatgagcaaaacggaaagaaatctttgaactgtttaattgcaataattaatagtggtaaattttatttatttattttaaattttatgtgccattttagggattatttttgaaaaaaaaaaaattaatgaaaaaccacgattatttatcccatactcattcagcatagcttagattaaatgtgtcaaaaaacatctcgaaatatatttgccaaaactaaaaatgcaaaaatatgtacataaaattatacaaaaagtgccaaaaaatagtcaaaactctgcgtttttctaccaaaaaaagcttaaattgagcttcaaaattatattcttaatgttaattaaattcttacaacaaaaaaaaatcccccgactcagtaccgaaataccggttccgggctctagttttcatgttctaatactcaatcggatactctctgttatttttagacacaaattggcattgtgccgtccatgcgacggcagaaattattgtcggagaaaagaaaataaaaacagaaaattttcaaggctttgtgaaccgggatgaaatcattagggaatggaatttcactgaagaaattgatgtaagcggagaattttaaattacggggaaaaaaatttttttttttttaattatgggaaatttagaaattgttggaacattgtcaatcatccaaaagtgatgttgtccttttgagtgtcaatctgaagatggacccaccaactggcagaaggtgtgacagatcgccaaaatttaaatgaaaaaatttatgaaaaatttttagttttcctatttaatgacattttactggtgaagaatgatgaatatgattcggcagttgca

SEQ ID NO: 76628 - DNA, 1116 bp, Heterodera glycines
atgggcccgaaactgttgggaacattcaccggaggccgtcttgaagaatacattccggtgagaaaataattttatgtgtaaaatcgtagttatacaattaaattatgcagtcacgacctgttgggaaagatgtatttgaatttctttacatattttttaaaatttttgtctttaggctggtatttgtgacgcgcttgaaaggtgcttttcagtctttttttgttttacaaattatttaaggtggcttattcaactgaaacggtcccccagcggctccacttccttcgatttgccgcctgaaaatcacgaatgggctcctgcgaccataaattgcgaagctttacagaaagaaattgacaattttaggtgtgttttcgtgagctataatcataaatcccatttttaaggaaacttgacatgaacggttgtgtggtcactttctgtcataatgaccttttggccggcaacatcctcttgcccgaagcacattctggcaatatccgaagctgctccgcatcaaccgcttccaaccaaaaggacattgtgttcattgaatttgagtacgccagttacaattacaggtgagtgctttcgctgattcttttgcaattgttgggatcgatggcaaataatataatgaatttctcacattttttataggggttttgattttgccaaccattttattgagcgcgccatcaattatggcaaaaaaacgacacctttttacgaaattctcccaaagaattttcccacggaaggacaaatgcttgagttcatgtacaattacgagaaggaaggttgccctaatgccagtgaggaacatttgcaggaaagtgcacggacgatggtcgaagtgagttttggcccttggttaccaatgtcagcggtttttttcaggaaactgccccttttgtgcccgtttcacatttgctttggggaatttggggcctgttcaagggcgcaagcccatcaattgaagaattcgattacacggtaatattattaaaagaaagaaataacaccaaaattcagagttttgcaaaataccgattggtcgaatattacaagaccaaagatgcgctgaagaagatcgaaggaacggacgataattag

SEQ ID NO: 76629 - DNA, 255 bp, Heterodera glycines
atggcagaaaagcggaggaaagagcgaaacaatgcgaaatgtgagaaatcaaataataaatttttaaaatatatttatttgattgttttttcaagtgatactctatggtcgtccccgcaaaacgaaacaatgctcttcagttttttcaaaggaagactttgcgcaaattggaaagaaagatggcagttcagcaaacgaacgcattaaacgaattcgataaaatacttctttttgtttcgtttttattttaataaa

SEQ ID NO: 76630 - DNA, 304 bp, Heterodera glycines
gccgattcttctaaggtccctggcggtggcaaagtcgtcccacgctctgctgctggcggtggcttaagacaacggttcagtttttcaaatttagatagatttcttttttcatatattttctaacaatttaaggcgagctggtggggcggcaaacactggtcgtactcgaactgctggcggaggagggggcggaggaatgaacagcggcggactgtggcgcttttatactgaggactcgaccgggttgaaaatgtttgtgcaaatgatacttttaattggtccaaatgtgaaatcgaaattctga

SEQ ID NO: 76631 - DNA, 853 bp, Heterodera glycines
atgtacagatgggtgggtgtccaacagggaggcgaactgttgacagtttatgaacgggacggtgaagagggcgtattacgctttgcacaggtaattttgtcattaaataggacacaatttcagacacgaattgactgatttgtgagttcaaatttaaaattagaaaagccgaaatttcgattgcctaaaattgggactgggtcgttttggcgcccacgttttggcgccgacgatttggcgcccacgttttggcgccagggtcgttttggcgcccacgttttggcgcgaagccaaaaattaaaaaaggtaaaaatttgatcaaaaattttacaaaaaaaagtgaaaaacttttaccttccaatgggtttttcaaattttcaaaaaattcacaaccccctagaattttttttcaaacttcccgattttgacgtgttttatgggtgtagattagagatcaacatgtacctggatccagccctgtatttttcctggatccaggtacaggcacaggccatttttcggcaacctggatttttcctgtacatttattttcctgtacttatgtacagaaaaaataggtacaggccattttttgaaacaggtacaactacggttttttcaaaatgttgatctctagtgtagatcaacatgaaggagtgatatgatcaacttgctgtgaacattttgttggtcaacatgaaaaattgacttagcaagaattttttcaaatttttctcttcgctatgcttcaagtcaaaacattttgaatatttttaaactcttaaattttttcggttgaaatttcaaaagagttagtgattataaacataaccttaacggtatatttaataaa

SEQ ID NO: 76632 - DNA, 841 bp, Heterodera glycines
  unsure (1)..(841): unsure at all n locations
atgaatccctttagaattggtctcccaacaatagaaatggacgataattttgatgtgaacaactttggtcaggttgaatcaggaattgaccgtacatttgctgatcaagaattgagtccaagcagcaacgagagcatagagaaatgtattgacaattgcatcacataaatactttattttctttttagatgatatctgggcccaaccaaaatcaccatgtggtatttctattccctcaacaatttccggagatcctgactctgattttttatcaaaaattgaggctgaacttacttgttttaaggcaggccaaaggatggaagtgaacggagacttattttcctggtggaatgaaaatactggccgtcttcccgaattgtcaaaacttgcaagaatggtccacagcattcccgctacatcagtcagttctgaaagactgttctncaaagctggacttatttttgccaattcacttcgaaataggtcagaaatcaataatgtattaatttattttataatttaaggctttccggcaatactgtgcgccaaattttgattgtgaaggccaatttggacgcacttttactggcaccaacaaatgaatttgaatcagatgaggaaagtaaagaaaaagacgatttttgagttttgatgactttatttactagcattgaaaaagaaaaattattattttttggttacaatataaatttggtcatacccgaccggggtccccgacccccgactttttgccccccgagggctcggggcttaaccctaatttaacgtatagaaaaaaagttaaacgtagtgaagtgaatgttgttttttacataataaa

SEQ ID NO: 76633 - DNA, 827 bp, Heterodera glycines
atggccgatgaaattcaacaaaaaattgttcagggaattggtccggattttttttctgtgacctctgatggatggtcgcaaattacaaaatcacccgcactcttaaggttctctattccttttcatagtttataaaaacagactttagcgttactgtacaccatataaatcaacaatttgtacgcgccgattttgtacttgatgtgattccaatgacaaatcacacaggagcagacatagcggaagaaattggaaacgctcttcggacaaatggattaaacccagaaaaaattatttgtttggttcgcgacaacgcaaaaaacatgataagggccacaatattttgaacttgaataggttttacctaatttttgttttttataattatttttttaagctttcaatgtgtgtgccattttcttcatcttgttatgggagacgtattgggactgcctgagttggcaggactcatttccaaaattcggtcttgggttactttttttcgtacaagtaaaggcctgtccttgctccgcgactatcaagaaaagacaaattttaagcaaaaaaactcacaatggtttcataaattattgttttcacaattattcttttaaattaaggcctgcccgacccggtggaactcgacctttgaaatgatgatgacatttcgtgaacaaaaaaacgttcttttaactattgaaggagaaagacgaggatttggtgttggctcatcaaaaaagtcgcgcctagatattgtccctgaaaatttaccaaatttggaaattaccgactttgatttttgcgcgaactgtgccctttattggtaa

SEQ ID NO: 76634 - DNA, 631 bp, Heterodera glycines
ttggatttgcaacgacgtttggatggacattttcccatcctttgaccgtcctcaactcggcctcaaaatggcacttctttcgccacgtttcaatgcgttggtggacaaacatttcaatggcaaaagcgaattgacaatttggagatcaatcgaaattcgtcgcaaggacaaaggaccagaaccgaagctgtctgtacgaatcgatgacaaatttgtgccatttccaatgcctgacgaccgtccgttgcccagcaaaatccgttttaagcaccttcggatgtggtaattaaaatcagagctatgacaataaaagcattcattcctttttcaggtacatcgatcactccgtcatcgcttttcttcgttcaaatcaccaaattttcgacaaaagaggcacctatttacacttgcggattcaatcatcacacaccacggaagagcagccaatttgggacatttttgttcgtgaaatttggccaattttttcggtaaatattcgccatttggactttgtcaatgctgctgatttggaccatttgcgtcttcgcacttcgacgacaattctcactgatctcaaccaattggtttcaatcgattcctgtgatttgttgcctgattcgattggtgcaga

SEQ ID NO: 76635 - DNA, 1949 bp, Heterodera glycines
atgggcttcgaaagtgacaaccaagttcacatgtacaccttttacgaggatagtccgtccatgggattaattgcgtcgacggaaattcagccgaacaatgcgaaatcgcaagaattggccgattgggtgaaggggcaaattgaggggaaatttgctgctaaaatagtgcacgaattggaattggaaggtgagtaaattgtgggggaatttactgctacttttttattataatttgatgttttttatattctgatttttttttttgtatcccccagaaactctctcaatttttcatttttttcccctcgtattttccctatgatttgccctccctttttctgttttgtcccatttcccctcctccttttggcaacagatttggaaaatgccggcaaatccgacgctctcttccgccgtttgtcctcttcctccgccactttggtccttttctcccattcgcttggccttcgttcgcttagtcaaagtcaaattgcgctgcgaaatgtatgaaatgctgggaaatccctccgtaaatccgcttccattttaagtttgtcaagatttttcatcattgtccaccgtttttggaaaatttagagcggcggtcgatggcggagggtttttttggcgcgccgtcacttggccaaatgttaggcaaaacccgaaaaacatgcgcattgagcgctgaacaggtcaaaagaccaatcgaataagagttccatttgaattggtcttccttcccctttaagttggctttgtgttgcgaccgattttcaaaaaatggtggaaaatgtagcaaattgacccaaaaatactcaaaagttgagcagcaaaatgaggaggacaataccgaaggggacattaacaaatctggcgcagagtgctcatcactttcggagggtaacactccgaaattggcatttccccttttcctttttttcattcaattcccccccccccccttagacaattcattccgtcgtttttgctattcccgcgcaaaaggcaatgcgtccgcccattccgtcgctgaacgaccctttgccttcctctcctggcaccagcgtttgatgtgcaaattcgaccgaatgctccgtcttcgtcagtccgaaacccatcgccaactgcacacagaggaaacacttgtccaattggactttggccaactgagtccctcccggcaatggctcatcggtgccggctgtcgagtgaacaaatcgatgggctttttgacattggacaaacgttttggacgccatttcatgcgcaagtggggcatttcgaccgaaggagacgaaacggcggacaaagttgccattgtggcgcgagacgacgagcgaatatttgcgatggaaagcgcggaaggcgtgacaatgtccggtgctcgtcgctttgcttggattctaattaagcaattaaattaattaattttgttcagttcgaagttggccgattttgtggacgggttttacaacaaaacgctgaaatggacgcccaaaaatgagcaaattgtcgaaccaaccgaagaagaggacgaggaacacttcttcgatttgagcattttgcagcgaatcaatcggcaaatgtttttggaccgaattctcaacacggtgaaaatgccaaacaattggcaaaatgtgccattttcacatttcccttcccttttcagaatcgtcccttcgatgccgttctctttttctccggcggcccttcccacggcccttcccaaactttgctccattttttccaccaaacgcaaaagtttttcgaaggctttgagcaattcatccaattttttatgttcgatcttccttttttattagaatattttcattggcatttctaccttttcagaatcgattcttccaaaaattccttcgattggcattttgactttgaccatttgccaaccgtcgcctttttcccagccaacaggtaaaaaaaaatta

SEQ ID NO: 76636 - DNA, 980 bp, Heterodera glycines
atgaagcgaaccaacgcatcaaacatcactccgcctcgcgcaaaacgttcaatgacacctgcactggacctggacccaaacactgttgcactcgcagagcaagaacgacaacgcactttggtgttcattggcctcccggaaagcaatgccattcgcccatcggaacgtgttcaggaagacagggaagccgccacaaaaatcctggaccatcttgaagttgaggcccaaccaaccgccgtctttcgactcggacgttacgacccgcagcgaacaacaccacgcccgctcaaggtggtcatgccaacaaccacacaccaacacatggcactcggaggatggaagcgcgagcgtgctcgactccgttctctacaaaacctgaaccgcctgttcgtccgcccagcgctgaccaaagaacaactcaaggaagaatatgaagcgcgcttccgaaaacgtcaacaaaaccctgctcccgtggcaccagcaatgcaacctcgccagacaaatgttccgactcccgtcaaagaaaatggaccaaaccagaaggaggccagcgacgacatttccaaaccgccggaaatttttgaccaaacaatcctcgtatgttatgaagcattaaaatcattaccaccaaacgacaaaattgttcaccaaattcaatcactcgaaaaacaataccctcgtcttttcaataaatagttctgtcagacctccaaacatttcctcaaattaaaaaaaatacatttattccattacttaaaatttctcaccaaaatttttcctcacaaaaaaaattttttttttctcttctacaaccctaaaaaaacaaacaaccacttttctctttgttggaggtctgacttttctaatttctgcttctccattcaaaatttcaattcttttatcattactttccatttcacctcatttccgccaaaagtgtaagtggcacatgcccttcttttggttatttttatttttga

SEQ ID NO: 76637 - DNA, 1388 bp, Heterodera glycines
atgtggcgaattaatcaatcacttattatatatattactggtggtttttatttccattggacaacaaaacttaaatccaagaagaaaatcagtaataaaatttgaaggcttctcccattttaaaagtttattttttgtgccagtggatcaccaaatttctactctaattgaattaaaaaagaaggacccacaaaatcaggtcaccaatgaacgacaaaaaattagcgagttaatgggtatatgattaaggttaattattgcttaaacgagcacgttctttttaaaaaattgtataaagttgattaatgtgccccatttctcctgaaggcaaagataatcccaaataattgtggaggaatcaacaaaaattgtgactttgctgaccgccgacggtcggtcagtcattggagaagggcgtacccctgggcgaaatccggctttccccgtcccgcctacgcccatcgccatttccaatgattgtcctgtgaaaatcggctaacgtccgtcctccggcgcgaaagccgccaccacaattaggagcgccaccgcctcgtcggcggcattcattggagttgttccagttctggtacctggttgttgtgttgttgttcttgttgattttgttgctgtcctcctccgcggcgctatgccggttgtagtggacagagcttgtcaaaatgacggacgcccccgcgggggcgcccgcaaggcgacaacgaccatcgcgcggaggaactcgcgcgagacagatcaaggtcgcgccacgcctcccccccccccctccgcaccggcgcgaccttattcaccttgtggtacacccaattcatcccactttcgttatgggggggggggattgggcgcggatatgtcatccatttcgggaggcagtcagtggtggattttgggatgaaagaatgaaatcatccgggagatttagaaggggccgatcaattttaaaactatttttagaaatacaagtgagcaaacgttgggatcaaaatgctcttcaatgtccatttttagaggagatatttgtcactgatttgggggtcaagcctctattctggataactgtattaccttgacattttgaattgatttgattttttgggatttttttcaatgaaaattggcagacttaatatcagttagtgacaaattattttttagaacctagctctaggcatactccccggtacagggctaacctgaaaaaatgaaaatgcttattggttttaaaatttttttagaaattctgatttttcattatttatttatttatgaaaaattaatattttttcagaaagtgctctgaaatgcaccaaaatttatttacatgttgataaggctctctgatgcttataatacgaaaaagggtgaataataaa

SEQ ID NO: 76638 - DNA, 2073 bp, Heterodera glycines
atgcatctgccaatgtatatccaggtaactgtattttaataatttaggtaaaaataactacaatttttaaattattttttatgaaaattaattgagtaggtccattataatccggaacatcgctacccattggaacatttggtggatttgttggccgaaactgtgcttggccgttacaattttgaattgcgcaaaaacttgacaatcgatttgttcgattcggtatgttaaaatcaaaatttttactttataaaataaaatcattgaaatttaaaaaaaaaaagtgttatttgtagggatgtaaaatttttgtacgaaaaatcgcgaaatatacaaaattccggaatatctatgaaatatatacaaagtcctccctaaatattaaaatatgtaaatagcaatgccacaaaaagaactaaacttatatagatgattttttttgactttttaaaaagggataacaatttttaaattaaagattttagtggtgcaatgttatttatttttttaaattttcataagaattttctttaattctaaaaacctcaaatacgtattaaaaatatgtacaaaaattttcacacgcataagtaatatgaaaaatatcagttaatgtgtttatatgaaaatttatatccctattggcattttaattatccattttttgaaaggctgcgaatgcggcaatccgtgacggtgccggattcattgtgtcggatcggcatcgctttcagcagatcagcgttggcgcaaaacaggcacgagcagtgctggcaccgacaaacggtgaaaatgaattgaaattaaatgatagtattaaaacaattgcaaatataaattaatttaaattttagaaatataattgaaaaataatttacctatttttgaagataaaccattaggagaagttatcatcttatgaaatgattttttaattttgattattttttccattttcaagtcaaaatcaaaatcgatgacttaaagttcaaatttttcactaagtcattaattaattgttcaaaattgcattttatttatcgcaaaagtcgtaagtcaaaaacaacgaaaacacattatttattctttttgtaaatactcgatttgaagagacaaaggttgaattggtgatttgatcatgcgtcttttgctaaagtgaatgctgatatttttaattttatttcgttggggttttaaaaaaaaatttgtttcagaggttttgatttcgcttgtttctgatgatcattcggaactgctcaaatacgatgcatcactgagcaaccatcaacgagcggactttttgaattttttaattaaaggtaattagttatatctaataattaaaagtaatgaataataacattaatattagctcatttcattaaaatgaataaatcttttaatttacttaaattaattaaaaattggatttacaattgaaaaaaattgtcagtgaaaaaaagaagataactaatgaaaatatttaaaaaatattttaataatgaaattcttttattaaattaaccaaaattaagaatgtaaaaatgtgctggtggcccattggagtcctgcgaaattggcggctgacgctaaagaaaaaggcacgaacaaaaaaaaattattggtcttttaaaaataaaataataaatttaaaatgtattcatttattttcagacaaagaaaatgaaaaagaatcagagggaaaagctgaacaaaaaggcgaaaaggaagaagccgttaacactgtggcaggatatttggtattttgaaaaatatataaaatattatttaatagaaattcataaatttttagattggaatatttattaattttatgccttatctaaaacttttttacagattgcttcctctgagcgcgttctgtgcctttatgcggaaaacagtaaaattgccgattctttgttggctgctcacattgacaggagcaatcagaagggaacggtaaaaatttaaatataatttccaatcatttaattaatttcgcttaaaatcagaatgtattttttctgaatttgatcacaaattgcataattttgttcataaatttttcaa

SEQ ID NO: 76639 - DNA, 871 bp, Heterodera glycines
atgcgttcttttttcttcgccagcctcgctttggtgctcatctgtgcctccaccactgtttctaagccccacgcgacggtattgtggttatttccgataaaaggcatttaaatgtaaaacattcatattttttaagcctgcccatctgtcaagaccaatgggtgcaagtaagtgtgcattttgagtttctgcttcgatatatgccctttgggtgttcctttcacatggattaacatttctgtgccaatccccgactaccttaccctgccgccccttattttgacaaacattgccaaaagcaaaagcgaggtggaagaatgaatgaatgataatttaaaattatttgtatttcaaatggtaataattgattgtgtttttgaataaaatataagcaaataaatcagctaatttcataattctaataaaattatacgtgttttgaataaaaatatttgatttaattttttccctttttttacatgttctatattaaaggttaaatattaataattttatgagaattatcaggttgaaatatccaaggaaaatttctttcctaatattttcagttgattaatcctgaaaatccaggaattccaggcaatttcgataccgaatcagcgtctggtccgagccagttgaaaaaattacaaattacataacttccactattttaaattttaaaagattaagaaatgtaataattaatttcgaattacgattttaattttatgttttcaatttttttaatagcacttaaaatttcataaaaacagtttatcttggcatttatctctctttctctctttattttatgttgcatttcaaaaaattatttgaagcgttccacccatttataatttaaaataaa

SEQ ID NO: 76640 - DNA, 959 bp, Heterodera glycines
atgaccacaataccgtcgggtggggctttgaaacagtggtggaggcacaaatgagcaccaaagcgaggctggcgaagaaaaaagaacgcatttttgggagttttcaacgcttaaaaatttgaaaatttgaatgcttttagagttttcaatgattaaaattgaaaaaatttgaaaatttgaagtttcaatgcttaaaatttgaaaattttagtgtttttagagttttcaatgattaaaattgaaaaaatttgaaaatttgaagtttcaatgcttaaaatttgaaaatttgaagtttcaatgcttaaaatttgaaaattttagtgtttttagagttttcaatgattaaaattgaaaaaatttgaaaatttgaatgcttttagagttttcaatgattaaattgaaaaaaataaaaatgtaaattctttcagagatttcaatgctaaaaattgaaaaagttgaaaatttgaatgctcaatagaggtttttatttaaatatatggtacaatcgggggaacaatggcatagcttcaaggaaaaaataatgcttttggagatttcaatgattaaaaatttgaaaaatttgaatgctttccgagttatgaatgattaaaattgaaaaaatttgaaaatttgaagtttcaatgcctaaaatttgaaaatattagtgttcttaaaatttcaatgattaaaaattgaaaattttaatgcttttggctgtcttattttacatttttatagtctctcatctgcttccaaatacattctttgaatatacattcggcatttatttttcggcaaaaatcatttgaaaatgtcagaaattaattcctctaataaccattgggaaatgatgaaataacccttttaactattctcagcaattcgaaaaagaaatcggggtgaaataatattttcacttaatattgaacctgggacaaaaaggcaaaatatgagaaaaa

SEQ ID NO: 76641 - DNA, 204 bp, Heterodera glycines
atggcaaaagtgatcatggggatagatgatcagaagaagatggcaaaagtgatcattgggatagatgatcagaagaagatggcagaagtgatcatggggatagatgatcagaagaagatggcaaaagtgatcattgagatatatgatcataagaagatggcaaaagtgatcattgtgatagatgatcagaagaagatggcaaaa

SEQ ID NO: 76642 - DNA, 935 bp, Heterodera glycines
atgcaaaatcggcaggctggcactcgttcggtctgttcgccggcccatcgttggcgccagtgctaccatgtaagagtcccataccgtacctccccttgaccccacacattatagtaaccgttctttcagcactgtactcaacttctcggtgcgtctcattgaaactcttaagctcattccgcttctttccgaccacagttgctcgtcttctcctcttcctcaccagtttcaaagagttccgtctcaaattgtcggagcgccaccaactcaaaacattggtcaaccttttggagccgactttggacccacaattgctctgtttgctgctccaaagtgttgcgctggtggcgttggactcgtcgacgcatcgcaatttgatcgaaatgcaagtggacgacccgctcatccaaatgcttctccccgccgacgattggtcagtcgtttcttttctctgaattgagatcgacttttggcttaaccctcaggtactacacaaatcacagcaccaaatttggccattacgtgaaacatcatgcggctcggattttgatttacatcggacttggcgacagagtgggcaatcgcgtcaaccttttccagggttggtcaaatgttaacatcagcagatgcatttcacttcaaaaagatcccaccgattgctccgcccgtcggtcacttaccggccctttgccaccaccgacggggacaaacagcagcagcaacaacaacaacaacagctcaaccaacgaagacgagtacatcttcgagacactgaggacagtgacagtggcgcaggagttcagccgaacggcgatgtcggtggagggagtgctgctgaaaatattgcaggaactgcaccgggggcacagtggcggggtggcgatgggaaacggcacgcaggatgcgatcagagaggagaggtgatcagggcttga

SEQ ID NO: 76643 - DNA, 239 bp, Heterodera glycines
atttgatgtgccttgtgactggtgctgtcgtcggtggtgccgtaccggccggcactctcgatggcatcattgctggaggcggtgacgtcgctggtgaaggcattggcggtgccattgacaccggtggcggcggcggtggtggttcgtcaacgcctccaaaaaacggcatcgccgcactggcggacacgacatcgctcaacaatgaacagcagcagcagcagttgttgcaacagcactga

SEQ ID NO: 76644 - DNA, 163 bp, Heterodera glycines
aaattttgatcatttataaacaggttttcactgaaaattagccaatttataggtaaaatttttaaaaattttttgggaatttaatccaattcttaggggtgtaaaagtcgcttttcgcgccaaaaagcgaaatgcgaaacgccaaaaaatgcgaaaggcgaaa

SEQ ID NO: 76645 - DNA, 2638 bp, Heterodera glycines
ccagtgaagaaaaagaaaatcaagcgagagatcaaaattctggagaatttacggggcggaaccaacgtgatcggactgctggacgtggtcaaagatccggtgtccagaacgccggcactcgtgtttgagtatgtgaacaacacggacttcaaggttttggcatttaattttttggcattggcaaagagcattttcatcaacagaaataaaaaaacagaaacaatgagagagacacgctttgacagactaacaatttttgttggacctaaacccttttttgaaaaaaaaaattgaaatttgtgccgatactgcaaaatttgttgaggaaatttgtatgaaaattggaattttcactttactttacctcctcctgtgccatattcccttggaaactcgcggcaattttctcatttggtactgaattggcacgcacattgtttttttcgtatatttgggcaagaaagacataacaatagtaccgttttgcatattggatacgtccaataatgccaatggaaaattgtttcttaatttatttgttacgtcgaaattagaaattgtgctgaaatacaatgattcatcgttttttttttgttgaaaattgcattcattgagtgtccgcacccgaaattttaaatttttagggcccaaaatgttgcttattttcagtgcaaaacacgtgttaccatgctttgtacgaaaatccattccaaaaaatgggaatccgaaaaatttttcttcgaaaaatttgcttatacctcccccattttgtccagcaattgtaccaaacactgtcggactacgagattcgctactatctgtacgagttgctcaaggcgttggagtactgccattccatgggcatcatgcaccgggacgtgaagccgcacaatgtgatgattgaccatgagaagcgccagctgcggctcattgactggggcctggccgagttttaccatccccgacaggagtacaatgtgcgggtggcgtcccgctacttcaaggggcccgaactgttggtggactaccaggttggttgtgtgggggacagcttcgaattgtttggttgaactgctactacgtgtacaaaagttgacactaaaacccaaaaaaaatttttttttttttttttgtgcgtgcgttaaagtctcaatgtaatgaatgaattgagtggttttaatttttgtttggtgccttaatcgggtgcaccccaaaatctcgccgcccgaaatttcaaatatgtgttcagctaaaaaatccattcatttttcgatcgtgacaatgagtcaatggcaactcgtacaataaaaaagtttaaaaaacaaagcctaaggcttaggcctagccaagcctatgtgagttttcaggttagtttttttgtttgcggcgagattttggcccgttccccccaccttaatcattcgaccggctcttgtaattcttcgaacgtttcgtgtgtttttttccaattcgttggtcttgaatctttgggacaaataaagtgccaagcaagtcttcaagggtagatcattcgcagcgtataaaatgacacaattatggcccagttaaataatgctcacaatcaattttgtttaaaaaaaacttcactgcatttttttataattatgtaacaatgcgttcatccatcttccctccccacagtgttatgactactcgttggacatgtggtcacttggctgtatgttcgcgtcaatgatttttcgaaaggagcccttcttccatggacacgacaattatgatcaggtcaggtccataaaattttaagaaatttttgtccaaaatttaaaccaaatttgctgttctgtttaagttggttcgcattgccaaagtgctgggcactgatgaactgtttgaataccttgacaagtaccagattgagctggacccgcgcttcaatgacatattgggcaggtcatcaaagttagacaggggaatgcaaatgtggcaccatgacaattagagagatctgggttttgggattgtctggccgaggctttttgttcgacagttgaccaagctcgggtggtccgataaaaaaagcccgttttaccgtgggccagggcatggtattttcaaagaaatttttgggaatagcctcggacggccagtaaaaaacaaaagtccgtccgtcgagtgcccgagccccttccaatttctgatgaaaaaaaggatttgtcattctataactcaaataattccatacccatttctttgatggagatttgttcaaattttctgaatttttaagaggcatttttaactgtggcaaaaaatttggagatacaaatcggttaggtgaaatttataataaaaatctgttctgactcttgaaaaaatatgaatacatgttgcggcttcgttttgaaataaaaatcgtaacagattggtaattgaatttatttcttaaaaaccaaattttattcccagattttttccttacaaaaatgtttccttaccaaaatttttttcaaaactgaatcaacaattaatctctcttttattccagacataaccgcaaacggtgggaacgctttgtgcacagtgagaaccagcatttggtgacgccggaggcgatcagctttttggaccgattgttgcgctacgatcaccaggaacg

SEQ ID NO: 76646 - DNA, 1457 bp, Heterodera glycines
atgcagcgattgggaccgttggaactattccttggcacaatgacctatttggtgatcatcggcatcacaattctcgggttcgcattaatttaccatctttattatattaattattagtaaattaacggacggttttcgaggaaacttattttattatattttatcgagagaaatttcataatatccatatacagtatcacaacatgtaaccatatcttactgatgcgtttttaagtataacattgatataaactagtattttatgatagtattaatcatgttttgggtaacatcgatacagtattcatggaactacaaatttacattataccgtccaattataccgtatattttaaaattttcagcaacactttggtcatcctggccgtgttcagctacagaccgttgaaaaaggtgcaaaactactttattgtttcacttgctgcatcggacatgatggtcgcaatgctcgtaatgccattgcatgtcgtcaaattcttggccagtgcgtacagtttaacaatttttactttattttttttgaataattttaaaatttataaattcatttttattttctttatatcccctttaaattgagatttttccatcaaatttaaatcgtttgacatctaatttttttttgttaaatgtatttaaaattttaattaaaaataactattttttaaaatttctgggtgagcccttcaacttttcctccaatttttgtttataaacagccatgtgccaaaaaaaatgcgtgacgaattggtcaaataagcgccattttatgctcgtgggaaaataaggggtcagctgagcgagtgctgacaaaagcattcaaatatttgtttaattaaaaatatattttcgaaattaaatggaaatgataaaaaatttaaacaaaaataaaataaaaatcattttgtcataatttttttttgttaaaatcgtaataattctttctcaactttataatttaagagatttttttgaattattaaaatttaagagttttttaaatatgtcggtctttaaaggcaaaaaaatttaaaagaatactaaatcaatttcattttctgataaaatttcaaaaatacaaaagaattgactttgaaaaaatagtgcaatattatgaaagtgaaggagctgtataaaaatatatattcaaatcataaaaataaccaaatatatcattctcgatttactattttcatgcctgacttttttttaatttgaagttggcacaacaaaatgccaaacaattttttttagatggccaatggttgctcggtgtcactgtgtgccaactgttcactacggcggacattttgttgtgcacatcatccattttaaatctgtgtgccattgccattgatcgctactgggccatccataatccaattgcttatgcgcaaaagcgttcgttgaagctggtcggcggaatgatcattatg

SEQ ID NO: 76647 - DNA, 580 bp, Heterodera glycines
ctggaaaatacgcatttcatttcatatacaagtgtaattttaatttctggaaaatacgcatttcatttcatatacaagtgtaattaaatttatggtaaaacttttttcatttcatatgcgtattttcaatttgtattttacaaatgtattttgatttctggaaatgggtattttcagtttgtattttacaaatgtattttgatttctggaaatgcgtattttcagtttgtattttacatttgtaatttgatttccggaaaaaaacgcatttcctttatactttaaaatggtaatttaattcccggaaaaacgcattatcatttcttactttctataattgccaattttgcataggtttgggtggccagtgcggtgatctctgtcccgccactgatcggctggaatgattggacctcgcaacagctggtcgatcactgtgagctgacatcggacaaagcattcgttgtgttctccgcttgtggctcattttttctcccattgctcgtcatggtcattgtgtacatgaaaatttttttgagcgcccgaaaacggatcagaaaaaatcggggtaagcgatttg

SEQ ID NO: 76648 - DNA, 1221 bp, Heterodera glycines
atgtcttgcgagctggcggatatgcagccgaagcacaagcgttcccatcgccttccggtggcggcaacgtcagtgattgcgctggccagcgcgaccggtgcacaaattttacggaagcgaacactgacgaaagctccatttccggacaaaaggggcgtggtcagcgttccggacgttgtgggcgtgcccattccgcacacagtgggcggagtcaacgcaaaaatgcctcagggaggcggcggaatttgccgcttgaccgcgtgtagtgcctcaatgcactcttccgtgttgtcctcatgttgtagtgtgcagcagccgcagttgtacgtgccgaagctggcgctgtacattgatggcattcaagcggaggaggaattggacggggacagcggacacgggggctcaaatgtatgttgggcatgaaaattataaattaattttgttgccgatattttataaataattttaataggtaaaacattctagtttggtttaatttaccaattcccattgtagaaagacagtcccgagaatacggtaactgtcccagcgtctacggtgctaaccaccgctccagctgcaattagtcattcgcctgctgcaaaaagtcactcgctggtgccaacagtcgctgccgctccatcaatggtcgcactgacgagctccgcgagtatgatggcaatggcgagtggtggcgagaggacgccagctgagagcggcacggaagtggcggcccacaaaaaggcaacaagtgatacggtggagctgaaaacgcacctaaaagcgagttttcgagaaaatatcaaagaccgaaatttgtaaaaactctgctgggctagagggttgggaattttctgattggccatgctctggaattctgagaaaaaatctatgaaaatgcctggaccaggggcaaaaattctgacttacgcctatgaaaaaattctaatttggaaccaataaaccccaagatctaagtccagtccaaggatgagctatggaaagtatattccagtacactgaaatatacaatttaattattcaatttgaataacaattttatttatatttaaggagcgcgaaaagatcagtgtggccaaggaaaagcgtgccgccaaaacaattgcagtcatcatttttgtgttcacattttgctggttgccattcttctgcgcttatgtgatcatgcctttctgtacaagctgctatttgcacccaaag

SEQ ID NO: 76649 - DNA, 1552 bp, Heterodera glycines
atgccgtggcttcacattgcgcacatttctcgcgacatcagcgacgcaatggccttcatgcatggcaaaggatttttccaccgcgacctgaccagcatggtaagaggcgggaggagttgtgcaataagtcctccccccccctcctcgtgtggaagtttttaaaaagtcaaaaattattttaaaaaaaaattttttttttgaaaatttccaactgatttttttttaattttgcaaggtaaaatgagttgcttccggaaagatttttgctgcaattgtttgattttttattggcacctctccaacatctttccctcccaaataaaaatttttttttgaaaatttcataattggggaaatttggacaattttttaggcgtcattcccctgcagagtgacttttcaaattactattttttctacaaaattttttacttaaattttgggcgcccatataattccattcaattgcgccgaggatagataaataaaacaaaaaagttggcaactttcacagaatgtgttgctcaaatctcaaccgtccaccatgttgccgatggctgtcgttgcggactttgggctggccacccgaataccggacaattttgacacaaaactgcagcaggtgggcaccgcggattggaaggcgcccgaggtgctcagcgagcagtactatgacgaaaaagttggttaaaaaaaatgtttaaatttttacaaccccatcaaaaaggggcagttgggtgaaatttcggcctttttcaataatttattgtttttgttttttcatattaataactaattgtttaaatgagcatgtgccccaattttcagtctgatctcttctccttcggcatcattctgtgccaaatgattgccgccactgacgctgacccggacaagggcgtgtttcgcaccaaatcttttggcattgtcagtagtactttaatgcatgatctacttactatataattgtcattaatttgcttttttcacattttatttaatttaatgtccatttaaggattttgctaaatttgagcaaaagtgcccaacggatgtgccaattgagctgctgaaatgtgccaaaatgtgctgtcgcgtgagtgtttatttattttgaaagggaacagaaaatttttaaaaacaaaatttctatttaaaaatttttttttatttttttgtaaattttaatatttgaaatttttttatatataaatttttctccaatcatgaccaattttgtgttttttagaaggattttttctgaaatttttgtctataaaattgagatttataactctcgaaatttggctcgtaaaatgccatttcatatttcacttttgtttttctaaaccgcagttccggcccgacaaacgtccctcatttgatgcgctgttggaccgcttttgtgcccacatcatcccatgcctggcgttggcaatggcaacagacaaccatgacgacgagagtgcgctggtgttggacttggacgacgacaacaacgacggcattgccatgggcggcatcatcaatcaatcaatgacacataaataaa

SEQ ID NO: 76650 - DNA, 89 bp, Heterodera glycines
cacagtttttttttgccctttgtgacacacaaattaaattgaaaaaattggtgagacctgtgctgattgaaccacaaaatgaaccgacg

SEQ ID NO: 76651 - DNA, 787 bp, Heterodera glycines
atgccaagtgcaatcaccgatgttatgacatgcgttgccaacaatcttatcaatgaggcggtagattattagtgttattgaatcaatttcaattcaaaagcagttatttcaataattaaggatactcaacgtatggaaaagttattgaaagaactggtatatgtggctatactgaatttagtgcacaattattggacacttcgttggggcataaaatttttaataataatattttttaaggtcgtcgtccatcgaatatttcgcatttattgacgatgtaattcttataaatatggtttggtcacttgaatctcctcaattccacgctaatggttctttggcaatacgcctacatgactgcataccccagcagcaaaatgctatcatattacatgacttcacgttttttattcaaattttctatcgctgtaattagtcagtttttttttattttttttctattttgataatattttttttcattagtttatttgatttatctcagtagttgtattcaattcttacgtataatttttgaaatatttatcattgtctgaagatgtgcgggatttcaggcgggggccgaaggccccccacgaggccgcgaagcggccgagtgagtaccttgggcgcagaaaaattattaaggaggagggttcattatttatttattttttacaaaattaattcataagtatatttacagaaactgctctgaaacgcaccaaaatttatttacaagttgaataaggcactctgactcttatattatcaaaaagggagatga

SEQ ID NO: 76652 - DNA, 348 bp, Heterodera glycines; identical to SEQ ID NO: 62244

SEQ ID NO: 76653 - DNA, 875 bp, Heterodera glycines
atgtcattcaaaaatttgccggttggaaatttgaaagaaacaattggttattgggaaagaaaaaactgtgaaaatggaaaatttcgggtaaaaatttgtggggaaaaaaaattaaacgtacaattagcacataaacaactttagttttgcccaccaacaaaatgtgtaatttgcatgagaagagaggtacaaaaaagaaaatttctttaattaattataacaattatttttttcgagaaaaataattcttttttacccaaaaaatgaattttttgggtaaaaatttatacaataaaatttttattagttgcttaaaataaattatttttaaacatttttttgttaataaaatgggaaatttttaaaataataattattttaaagccaaacaaatgtaaaaatctcataaataaatgccaaaaaaagaattcttggtaaatcaaaaataaaattaaattaaagatcatgttcactcaaaaatatttttgaatttatatataatattaaaagattttttaacatagaataaacaaaattgaaatttaatctaaaaaaaagataaaatttttaaaataataattttttttgaaataaatgccaaaataaatttgaaaaatttagcgccttttcgcttttgacccctgcggccatttgtgcgcatgtgaacaatgcgctgaactgattgagaagagtgcggacaaaaagtgtccaatttgtcgagcacaaattgtgaagaaattgcgcatttaccgtccataaaattttgggccgatcaaaaacaatgcaaaatgttgaaatttgttggaatttattattattgttgtaaattttgtaaattgaacagttcccccgttcatttggcaagtgccaataaa

SEQ ID NO: 76654 - DNA, 1834 bp, Heterodera glycines
atgcccgtcgattcgttgtgcgaattttctggcgatcattgtctgatcagatattttgagagcactgatcagtggaaaaacagcgcaacaagcgcactgaatcactggctttatgataagttcagttggacattagccgataaggtaaaaaaaaagttagcaaatgcaaccaaaattaatcttctcgatatccttcgaaaggccttacaaagtgtattttcaattagcttaaaaaattccaaagaatttcgcacttctgaaaaagttttgacaatttttgtgccttttaccgaacatttaatttttatgagtcaatgggaattcgtacaataataaattaacaagcaaagccgaaacggagcataaagcttaggcataagcttaagcctttaggcttagtaaaacttgtacgatttgtctttctataagttgtttaagagtttttcaccaatcccaaaaatatgacattcaataacaatatatccctaattaaaaaatgaagatgtatcaaaaatttacttatgtatttcgttgaaaaacatttattatttaataaataaaaagttttataaataattttttttattaatttatccttattctggcacttttgatgcttttttaggtggttgatacaatataataaaaaaaaatttcagcttgtattctaatcttaactgaattgttaaggaacacttttttcttaccgccaattttgactatttaattgaagtggcaactaaaaatcggcaaaatgacacaaaaatcagcttgaaagatgccaacctaatcgacttgttttggcataatttggcacaatcggcaaatgaggggcaattatggaaacggttgcgattggttgaccagcaacaaattgtgccgatcatcaacgaattatgcaaaataaaatggcacaaattaatgaaatatgaaagcatagaagaaagtacaaaagtaagttgaaagttggttaaaaaggaattttaaaatttaattctcataaatttataaattcaatttttcgttatttaatcttcgtaaatttgtaaaaaaagtgaaatatataataatcattttatttaacttctttggattccaaatgtttagtatgttcgtctattttataagcaattttcccatgtaaatcagagccatattgagtaattaaaaaaaagagcgtaaaaataaaatttaaataacggattaatttttttgtttttttggttttcaaaagcattaatgctcaattttttgcaagaaacatgttttggcactttccgatgttttaaattaattaaattcatttttgacaaataattgaatattttgcattttttccgatttttggtgcatttgcccccatatatttttaaaatctaaatttataaattgtccatttccatcattatcttttttctcctccatttagcactttttaatgatagaccccttttgcactctgtggccaaatgtgcaacaaaaagccgaacattttgccgacaatgcgcgggtcattgaggcgtttcgccgttgggtgtttttgccgcgcgcccaactcggcacggaaagtgcccaaattgtgcacgcgtcggtcgaacttttcgctgctcgaacaggcgcaaatttaatggacacgtggtggaaatggaggacaaatgagatgaacatttttagttgcattggtagaacagtaatgctattattataattattattatttaaatgaattcatcgaagaattttttttaatatatcctaaaatggcaaaaaacaaaacagaatttttttttacatttttgctgttgctaatctacaaaatttttccattaataaa

SEQ ID NO: 76655 - DNA, 313 bp, Heterodera glycines
taagatggtttaaagaaggccatttggcaagtggaactgaattgggtgctagaaaaaagtttgaagggttaagaaatgaaccaatgctctctgaaccaattttgatgtttcctgacatggaaaactacgatgaggatggttaccctgtaacggaagaaattgatgctcattttaaagaccccgaaagaaatgttgtttcacaaatttttatatagaattttgcataccgggaaaatttttaacatttgagtgtacttttgtaaagattttcaccaaaaaagaccattttttgaattttaagccatctttttta

SEQ ID NO: 76656 - DNA, 823 bp, Heterodera glycines
atgcccagcccaaccccagaagtgaccttcaaagatcgttcagtgcatgagattcacttggagaatggctacacttatgttattgagcagaacttaaaggtttcttccgctcgtcaaaagtttttgagagtttctaaaattgtcaatttttcccacttttagcacttcgcctcggttatcaccgttttagccaagttcagtgagcaaattctgttgcaaccgaccgaagacggtttgatgctgtccgcctcttcctccgcgcggtcggcttacgcaaaagtgaaactgtgccgtcagttttttgaccggctgagggcacgcgaaaatttggggccggacggcgaagtgttctgtcggctggccacgaagagtttgatgcacattttcaagttagttgctttttcctattccaaaaatttatattttttaacgaatttttctaatttgcgattggatttccgtgaatttaatgccgaatgttttgcagaagcgcggcccaatcgtccgtcggccccgtcccctcgtgctcacttgaggtaattctgatttaaaaatttaaatttttgcccatttcaatatacattgtcttatatttccattttttaaaatttagttggacccccaatcggactttgcctacgtccatctccaatgtttgtccggcattcggcgctgttttgtgctgtcgttgcgtgagtatgccatggtctgtgacaatgtgttcaacgagcggcaacggctcaagaatcgggtgaccgcccacgccaaaatgctcgccactcttttgagtccgttggactgcagcgatgtaagcggtggatga

SEQ ID NO: 76657 - DNA, 1558 bp, Heterodera glycines
  unsure (1)..(1558): unsure at all n locations
atgatagcaaaattgttggatttggttgacaaagaaaaaggttatagtccaaaacatgctggtgcccaactgaggtaaacggttaatgaccatttgaaaaaacgtgaattagaatagccttatcattttaaaaaaaaatgtaattttctattttttcaccgagaattgcatcagactataaaaaaacgacgtggctttttgcttcctctaaaaattaattatttaaatgttaattcataaattgatttgttacttccctttattttgacttcatttcataaaatttctatctttataatataaattattatgactatttcaatttttgttatacatatataaaaaatggttgtatttttctttggaaattatgaattttcctttttttttttgcttttgagttttctacgttttggcctacctgaatttttttttttgaatatttttcctgcgtaaaagtggactatgatcacgaattttatattttagatcagtgatcagtgataaattttatgccaggaaaaatatttcaggaaaactcaaaagaagcttttctatcaaaatttccaagacaaaccaaaaatatttattactttatacaattttagcggaaaaatattaaattaaaattttttaaatttcttaaatatattaaggataggaaatggaaaagtttgtaaactttttttatcctcaattttttaaattaattnttgtcacagaagaataaatggaattcaaaataaagaaacgaaaaatgctttcttttaatttattatttttaataatttttatttttattatttcttcgaattttgcgttcgctggcaaaagcaaaaaaggcaaagaaaataataatgcatttttggcacatgaaaaggagcagcaggaagtggcagaaacaagcacaaaatatcaatgcccggaaaagacagaaagaattttaatagataaaaattgtgaaaataaataaaaataatttaatttaataaaataaaaaaggctttaaaaggaatttcaattaaatttttaatttttaaaaatatttgttaatcaaaatgttttttttgagatgagagtgatgacttagttcatttggtgacccttttcaaaagtttaattgtcaaatttattgcggctgaaaatgaatttatgaaaagggatttgaaaatttttcaattgaaatcactgtatttttttatgaagcaaataattggcgaaatgttcgcttttgcgattgaaatcggcacgaaaatggccacagaaagcaataccaaccaatggttttttgatgcaattgaaacaatgcgaaggcgatggcaaaaaattatggacaaaaagcaaaacagtgaatttgaaagcattggcgacggcacaatttgcaatttgtacaaatttgggaagtcatttgtccaattgttggaaaaaagcactgaaaatgaggcaaaatttgagaaaaaagtgcaaaaatatttggagaaaaagcgcataacgcaattctttgcttcggtgaattgaattttaatcgaattaaaaaaatttttggaatttattttga

SEQ ID NO: 76658 - DNA, 1052 bp, Heterodera glycines
atgctatcgcatgatatcaaattggttgctaatgagaaaagttattaccaacagtgccgaagtgggcgggttccccttcgtttgggaaaaaggcaaaaattatttcttttattctacaaaaaaaaaaaaaaattttcagatccaaatcccggattttccccccgaattccttcccgacactttttttttgaaaaagaaaaattttggacatttggccaagaatttgagtgccaaaaaacatgtaaatccgggcctggcgatgtccatttatgcgatatccccgtttggtttagatatatttacgcctacaatatgttcaattacaaaatcaacgttgtgaataatgttgtccaaatcaatatgccgaattggaatttgccatattttgtgtttttggatgatccaaacgaattaattgatcagaaatcaaatgaattattagtttatgaacatcattcgaaacaaaaatgttttgtcacacaagattataaatttgataaagcattgcccaaatgtgatccaattactttgtatgaattgatcaaaatgacaaaaatcattgtcgaaatgcaaaatgatcaaatttggattagcccaaaggacccggaaattttgaaaatcattgtaaaatttttgaattatttcgatattgaaaaaacaattacggaaagaatggcattttctgccgaaggcaattattgcattttggcacaatttgtgatggatttgttggagacagcaaacggagcaaattatttgccagacattgatattatcgaaatatttgttgtacagacgaaggaatggtgtacagatcaacggtgggaattaaaaaaaaactttaattaataattcaaacggtgctatgacgttacaaaatggatgtttgtcaaaaaccgtcaaaatgaaagattttttcatataactttgtttaaaatggaccaaattttcattttttatatcatttgatagccctaagtgttttctataaacatgcaaaatttcaaaaaattcgttaagcttcaagaaagttatgaccaaaaatgttcaaa

SEQ ID NO: 76659 - DNA, 377 bp, Heterodera glycines
aattacgaattagcaattttatattcgaaaattttgcagttgataattgttgctataaccacgatgtgtgctacataaataaatatcagaaacgttacgattgtgatattaaattttgcaattgccttaatgaatatcctaattgctttctaacaaaagtctgttctccaactcatatcttaaatattttattttttagaatatattatgctggtcagttcatattttttgagaacttttaaagaaggataaaaataattattttattttaccgtcaatagatatgcatatgtattttaaattttttattgttatgtaaacttctaatatatatatatttatatacataatcatatgagttggcggttttaagaaac

SEQ ID NO: 76660 - DNA, 1553 bp, Heterodera glycines; identical to SEQ ID NO: 12917

SEQ ID NO: 76661 - DNA, 944 bp, Heterodera glycines
atgattagaagaggtataaaagtgattatgagaggtacaacagtgattagaagaggtacaacagcgattagaagaggtacaacagcgattagaagagtgattagaagaggttcaacagtgattagaagtggtacaacagtgattagaagaggtacaacagcgattagaagaggtacaaccactgtcgaaaaggtacaataattgttggagaggtacaaaaattgttcgaatggtacaataatggttaaaaagggtacaatcatggttttaaaattaaataattaaggaaatcgtttattaaaaagtaagattaaaaattgatgtaattaataaatttttaaaaataaaataaatttccttttattaattaaaaagagagtttaaaatgtacagggattgaatatttatttaaattgaaattaagaaattaatattacaaattctaatttaaaaaatacaggagttctttaataaaagtaaataaattattattttaatttaaaacatttttcacaaaaaaataatttaatttaaattaaaaatttttattttttatggattaaacaaaactatttatatttattaaaatgaaaattaataatataatatttatttaatttgaaatgaaattaaacatgcaaaagtaatcaaaaaatgcacataaaaataatgtacaccggccggattcgaacttccccccccctcaaaatgatgcctcagaatccccaatcacacagggattctgaggtcttaacgatgtcaaaagtaaaatgtgatcacgtattcgtgatcagcgtcataaactacccctaaagacatgtttttggaatattttcggtgaaaaaattttttcactcaaaaatcctgtcacccccctttggtaccgaatcacaaaatcacttttatttttgtatcttttttttaaaatgtgataaaaatataaa

SEQ ID NO: 76662 - DNA, 3337 bp, Heterodera glycines
gtgacaggaggcaaacgaattgagcaggaacttgccgagtttgaccttcccttttacatcgtcgcattggcctttttcctaaaggcgttcttccgtctgtatgacttgctcgtcttcatcccattcaaattatttgctgaccctgagctgaaaaaggaacgctctcgtgagcgaaaggttttgcgctttcaaaagtaaaaaaagcaaataaaacggaggtttgctttaggccatgcccatcgatgggaagccgacttcgtcctggagacacgtcgataccattggcacggctctgtacaccgaactgtttgagggctgtccgacgcttggcaaaatttgggacaaagcggcacagttagtaattggctttatttatttatacatgcgtttatgtttgaattgaggttacaccgtggacacaattgcatgggcacgcgcgacattctcaatgtcgtcgaagaacagcagccggacggaaaagccttccaaaaattggcacttggcaaatacaattggatgaattacgaacatgttgatgaagtgattgtggaagttgcttctggactcagcaatttgggcattgtccaaggacaaaaagtggtcattttctctgagaccaggaaggagtggatgatctcggccatcgcctgcttcaaattgggccttccaagtgcgctttaccacaaatgatctaatacttttctaaatcgcccttttcagttgtcaccgtttatcccacgcttggtgacgaggcaattgcttttgccttggccgagtgcgacgccgttttggcgtttacttcgcgtccccttctgtcgaaagtgttcgcttccgtcaaagactgtcctcagctgaaacgcgtcgtttacttcagcgaactgcacgcacttgccgaggtcgccgagaaagcgcctgatgcgataaaggaagcgttcaaaagtatcggacgcgaactgtacagctttaacgccctcaaggcactgggccattcgcaaggtaaacaaaggctcccccggaaattttaatttaaaaaaatctagaaatcttaattaagaaaatttattttcaatagttttttgagaaaaactcttggaaaagatggggtcgaaatgggtaaactcagaattaggctcattttcttaataaaaggcaaataaatgcctttgataagccaatcaaaagaagtcaatcataactaaggaccaattttctctttttgtcccctcaattccacactgacaatccaatgaacagctttaactgtttcattgcagcaaaactcgagcggaatgtgcagccggacgacttggcgatgatcatgtacacgagtggcaccaccggaaagccgaaaggagtgcttttgtcgcatcgcaacatcatcgcgacggcttcgggacagagcgctgtcatttcagtcaggtgaataagcaaaaaaaaaattaagcctacactgccgacaattcagtaccagcgacacaatcattggctatttgccgttggcccacattctcgaagtgtgcgccgaaatcatttgcctgtccaaagggtgccgagtcggttactcttcgcccagcactttgcatgaccgtgccgtgaagattaagaggggaaccactggcgattgcgtcgaactgaagccgactttgatcgcttgaggaggcgggcataaaggtgggacacgacgcaatttcaccgccggagaaaagagactcggccttttcagtaccacttgtcgcccatttgtccctttctcccccgttcagacttatatgaccgtcatggggctgcatcctatggcattttatgcttcgcatgctctgatcggtgcttttagcattctcttcgtcgttggcgccagtgccgttctgatctcttccgcatttgcggtcggttggcgggaatggcattgtcccgtcaagagtgcgctattacgccaattaagggggggggggcatttgtcgtccatcccttcccacaactaccgctgtttctgctgactctttctgttcagttcgtctccgtttcgttgtttctgctcttggcactgctatacgccttcagttgcattcagttgaccgtccttttctgcacgttcactcaaaagggacaattggtccaattgatggttcgtccgtccctttggcattccgtccctttttaaattcgaattctccccgaaaggtcggtctgtccttccaattgctcggcctgctcagttggaagttcagcccgcccctgcacagtgtcggccgttgtctgttcgcttcgcttaatcccgtggctgcctttggtctcggcgtccaaatggcgtgcactttcgaaactcgaagtcggtatttgccaattcagtacgtggtccttatgtcccattttgcccttttgtacttacaattacctaattaacactgactaattgcccattagtgtttctgctcgattggccccatctcttctccggctcctcccatcagttctccgtcggcttggccatgcttatgctgctgttcgactccgctctcttctctctgctcactttttactttgactccgtttggcccaccgatgaaagcccccggaggcatccgctctttttcctccaggcattttttgattgtttcccaatttgaattaaaacaccctgtgaaaatcagcactttggcatcggtctgtccaattatgagaaagtgacaccgtacggagaggacgaagacggggagggatcggctacggtggccaactccgagaacaccgaagtcgagacaacggagaatcggacggcggacatcgaagtgcgcgggatgagcaaagtatgggagtccaccggactgatggcagtgaacgcgctgagtttccgcgcttaccggggaaaggtaagcaatgcgatgccacggggggcggggggagggggggggcttttatcccgcgggcttttgccactttaccattttttcattaattaattttcacaagcggctaattagtgtggccactttttgcggcaaccatcccattgccatggtcaatgtcaatatttcttatattctgcccattttaccacgattcctcgtctttggcatgtccccgctcggcttcgtctcccctccccccccccccgcacattccccgggtcggtgcaccccaaaacgtcgtcggccgaaacgtcgtcggaagactttttgaaccataactttgttcactgtcaatcaaattaagaattgttgatgttgttcgatagctctatgtgtttattattaatttgcaaaatctcaaaaattttggttaagtatcaaaaaagtaatggccagaaggaactcaaaaacccagtaattcgaacttt

SEQ ID NO: 76663 - DNA, 208 bp, Heterodera glycines
aaagttcgaattactgggtttttgagttccttctggccattacttttttgatacttaaccaaaatttttgagattttgcaaattaataataaacacatagagctatcgaacaacatcaacaattcttaatttgattgacagtgaacaaagttatggttcaaaaagtcttccgacgacgtttcggccgacgacgttttggggtgcaccg

SEQ ID NO: 76664 - DNA, 1056 bp, Heterodera glycines
atggaaaatgatcagaagaacattttggaaaaagtcagtgaattggagaagcagacacagaaaaaggtgaatgaattggaagagaaaataaaaataaataaatttaacggtaaaaatattttaaattaaataaattatacaaatatttatttaaaaatatcgaattatttactttcaggggttttttaaattccaacaaaattgttgggatgccaatttttgtcatgataatctcgaaatcattggtgacaaaagtctcattgtccatcataagggaaatggtaatggtatttttaaaatttacataaaaattcaatttcccttaaaaaggttggcgctccgtcttcgctaaatatccgattgtgctgaataagcatttgtccgactttttttactacgaaatttcagttatgaaaaacaacgaaaggcgaaattagtaagcgaattttgtataaaaagtgaaatattttaatatttattttttctttattcagtcggggcatcatcaccttcggattcgctgttaaacagcagacaaaattggatgaatcaattcgatgggaaaagggcacttatgcatttgacaattatggcaatattcggattaacggaaaaggaaatgaatcaaatgcccaatattcctacggtgttggcgataccgtaggaattggcgttcatttggccactcgacagatcattttcaccaaaaatggacttcgtttgggttagcaaataataaataatataattttacgattttaaattacaatttggttaattgtctattttatctaatttattttatgtttaaaataatcaaaaatcccttaactttttcacagatacctctgattttttggttgctccatcttttgctgatggttctctttatccattcgtttctttgtttggctctggtgaccaaattgaggcgaattttgggcccaatttcaaattcgatttggcgactctctgaaggaagaattaattattcactaatgttttcgatcaatttgctctttttattcatttttatgtttttattcttcaattaaa

SEQ ID NO: 76665 - DNA, 378 bp, Heterodera glycines
aattacgaattagcaattttatattcgaaaattttgcagttgataattgttgctataaccacgatgtgtgctacataaataaatatcagaaacgttacgattgtgatattaaattttgcaattgccttaatgaatatcctaattgctttctaacaaaagtctgttctccaactcatatcttaaatattttattttttagaatatattatgctggtcagttcatatttttggagaacgttttaaagaaggataaaaataattattttattttaccgtcaatagatatgcatatgtattttaaattttttattgttatgtaaacttctaatatatatatatttatatacataatcatatgagttggcggttttaagaaac

SEQ ID NO: 76666 - DNA, 906 bp, Heterodera glycines
atgtcatcattaaacactttttcatcagcggatgaattttctcctctccaacgtaaataattaaaacgcaataataaacattttttaattttcaaatttgttaaaagtaattttttaataatttttcatttttagcaatttttccaaatctgagcacatcggaggaaatgagtgttctgattgcccgaattgctgagctgaatcgagcgcaaacaatggagccatctgttgccagttctgaagtgtttggacaagacggatacggtagggaattttgtataattgagtggatacagtatgaaaattatacaataaaagaaatggttttgaaattttattctgtaaaatttcataaaatttgttttgtttcaaaaaaagtaatggccaaaaatatttagaaaataacttttttatttaaaatagagccaaaattattattttaaattttatttcataaattttattttgaggaatgaatgatgatcagttcagtctggaggaagaagaaggaaaagaacagcaagaagacaggaaaactccgacaaaagatggtaatatacaaatattagaaggcattttcagaataatttgctaacttaacaacattttaattttatttaaaaaattgcttcaaatttcagtttcggaagatcatttgaaagcaattttggagagaattggtgaaatggagaagcagcaacaacagcagacaaaaggcgagggcaatttaacgaaaatgaaattttcgggcttttctttcgtaactgcgcaattgaacatttttcgaatcctttaattattgagaacattttgactggcagcagcagaattaatacaatcagagagaatcttaaaactcgaccgattctgcgaaaaaatgctaaaagcataggaataattattaaa

SEQ ID NO: 76667 - DNA, 108 bp, Heterodera glycines
ttaagctgctgaggaacggttcttacaatcgcaaaatgatcagaagaaaattttggaaagaatcttcagtgaaatggagaaagaacagaaacagctgcagacaaaagg

SEQ ID NO: 76668 - DNA, 1677 bp, Heterodera glycines
atgaatgtcggagattgtttttgtggtgaagccttgtatcctcttcctggtgaacccattgacctgacaagacaggttgtccaattaccatgtgagtgcgcaccatttcatattggctgcattgctgccagcttaattcggagtatacaacttcaaccaaatggtcagcgacgcggaacttgtcctttctgtaggagaccgtcattaacagaggaatcacttttacaaatcaatggcaacaaattggtaaaatatcaaatgcaaataatgttatgctcaataaatttgactcttgcttctaaagttggacctttaccaccaccgcaaccactgcaaccgccactgccgccaccaccgccgccacttccaccgccgccacttcctccgccgccgcaagagccaccggtgcacattgatccacctgtacctcttgaagagatgcagccacagcagcgaagacgtcagattgcagcgattatttgctcacgccgaagcaatgaaggcaatgggcgagaattgcgaatacattggcacagtgctccttaccgaaatgacacttgggaaccggaacaacatataagagatgttagtgtattctagctccattcaattttaaaacccgttttttagcaagccccattaatctatgccttatggcatgaacgacatgataatggagaaacaccttcccatgattatgtgtttccgttacgtccagctccgtggatgacaacaattagggcaggaagagatcttcctgaggtagaatttgctcattcaactgctcgtcgacgtctgttccaggaggcgaatggtatgatgattgtccaatgcaatatggaagaccatatttggaatatcaacccagttgtgaatggagaacaacatgcacaaccagcacaagctgcacaagaggatgtagctgctgacattgaaattttaggtataaataaaatcattgctgaaaatatagttttattaagaagagatcgtcgtcaatccgcagggaatgcccgaaaatgagttggaaaacaatgccatcgaaattttagaccgtaataaaaatacaaaaaataagcattatttacttcatatatattaagttgttcaacaacaacaacaagctgctgaagctgaacaacctgcttatgaacacgttcgtcaaagacacaaaaggggaaaggtaataaataaagattcaaccaattttattatcattatatattatttagaacttttgtggggcagagagacgtcgcagacgtttcaatcaacgagctcaaaattaattcatttgttttgattgtttttgtctatcatttatcattatttaaacaatttatttattgttctttatttgtttatgtgcgtacacttggtcggagtccttactccccagtgtttcattcatgcattaaatttctgttttatttattttatttgttttggacataacacttggttggagtccttactccccagtgtttcattcattcattcatttctatattttgttctctcatttatttattttgttttgttcacaacacttggtcggagtctttactccccagtgttgcattcattcatttatgtttatgtttgacaaattgcatttttttgttgtatgcacatacacttggtcggagtctttactccccagtgttgtgtgtttta

SEQ ID NO: 76669 - DNA, 477 bp, Heterodera glycines
atgaataatcataataatattgatccacttatacttgatggaatttcatcggctataaattcatttgacaccgaagctagaaaccaaataatgcaagaacaactacgtatcttcttcaattcccaagtaaaaatttagatttttccgattaactaagtaatttagccacttccaacaattggatctcgtttgaacgcagtctactcccagattgttgatatacgtgctcaagcaaacataacaattgcacctggataccttcaacatagtattcaacaaattgaaaatcatcttgccgattccttgctttttcttttggaatggctccacgatgaacaaatgttagcagaagaaattgtaaacagtgatgaaattttgtcagatgagaatttgcctgagtttgatgaataatttgtttgtttgttttatgcacacacacacttggtcggagtccttactccccagtgttgtgtttta

SEQ ID NO: 76670 - DNA, 581 bp, Heterodera glycines
atgagaatagagcaacaaattagctgcacaattggcatcgcacgtgatcgaatttatgaatggaagagggaattgggcatgaattgtcagttgtttttttgaaaatttaaaatttgaaaattaattttactttgttttttgaaaatataaatttgaaaaaattaattgtctgttgtttttttgaaaatttaaatttttaaattaattgagagttgtttaaaaatttaaatttgaaaaataattttactttgttttttttaaatttaatttgaaaattaatattcagttatttgaaaatttaaatttgaaaattaattatcagttgttttgttgaaaatttaaatttaaatgaaaattcaaattaatttttattttgttttttaagtgattcaaaaatatacaaaagaggaaagggaaaaatttgttcaaatgtttttaatgataaagaagaaggcaattgaaaaatatccacatttaaaagtgacaaaaattgaggagaaaattgctgagaaaattggggtaaatgttgaaactcttagaggcatgaagcgaagacaaggattttatggttagtaattaaa

SEQ ID NO: 76671 - DNA, 496 bp, Heterodera glycines
atgttttttcttttttttctcatcttttcggctaatgcaactggtccaacaaattactataacaaaacatccgactacactgattatattgggaacaatatttatcaggcttttcatttggaacaagaattggacaaatccgatcaaaacagtcaaaatgatcaaaatggagacaaaatgttttcaaatttgacggaatctgatcaagttcaaactgatgaaaattcgactgaattcgaaccgatggaggaagaaaattcaccaaattttttacggcataatgatgccgattatggcatcaggctaaatgttgaagacaattatgatttatgccgacaatttgttttacaatttgatgcaatgaaagcggcatttttgaaaacccacaaaaatcctgagcgtaaaaaattgatgagaatagagcaacaaattagctgcacaattggcatcgcacgtgatcgaatttatgaatggaagagggaattgggcatgaatt

SEQ ID NO: 76672 - DNA, 762 bp, Heterodera glycines
atgctgatgaagctcttcattagtttattttcttctgtttttctctttatgccatcattttctacaaaattgtggacaaatactgaaactgattcgctaattgactcctctaatcgttctgttgatgatgctaatttgggcaatgttttgccatcggaaaatgatgatgcttttgtgtctattctgatcaaaactgatcaaaagcaaattgatcaatttcttgaagaaatttatgacgaatgtggagaaaaaaaggagaaaaatttggaaataattaacaaaatattaaaaattagaagaaaaaatgataaaaaatcattgaaaacagaggaagatgaacaaaaaattaaaattgttcatcaatttattgaaatgcaaaatgaatttgacgaaaatggaaaacgaaaatatgaaaatgtgaatgaaattgcgaaaattattggtgtaacacattcaagaatttaccattggattgataaatatggattatcacgtaaaacaatttttaatttaaaaaatgtaataaatgcattttgtttatttaatccaatttaagatttgaaaaaagacatacaaaatgatcgacgaattgcaattgttcaccaattttttgcaatgcaaaaggaattggacgaaaatggacaaccaaaatatcaaaatgtgaatgaaatttcaaaaaaacttggtgtctacagttcaacaataatttacagatggatgcacaaattcggattatcgcgtaaaaacttatttttaatttaa

SEQ ID NO: 76673 - DNA, 2259 bp, Heterodera glycines
atgccgccgtctgatctcaacgcgtcaattgctaaagtgcaaaatgattttgcactcaaattgttgcgcgaatttgccgcgttttacggcagcgcttccgcgtgcatttcacctccggctgttgcggtaacacttgcgctgacgctgtccggtgccaaagacaaaacgtcggaccaattaagccaagtgttggcaaaaggtgccataaaatgcgacccaatggcatttagtcacatgcatttttggaaaatttaaaatttgaaaacctcaaaattagctttttgggattttaatttttgaatgactaatcgcattaatatatttttgactaattttttccgaagctttattgtatatatctttgtatatttgaaaaagctcatttacttcttttttttattgcataaactaacaggaaaaagtctttatctgttttaaatctgcttggtgatgatgtgtgctggccaaaaaaatttttactcaaaaatataaaaattcattaaaaatttacaaaaatatcaaaaactcattaaatttagccccaaaaatatgaaaaaattattaaataaacaaaatttaggaacgccaaaataccgcattttgccccattttggcgcccttttgaatttgctgcatggagggggcaaaaaatatgccaaatttactgtcgaatcggtgtgcaaattgtgcttgaagtcggacattgcgttgtcagatgcgttcaaggcttctcttgacaaatattttggtgctcaccttgaattggttgattttggtgagaacatgaaacaagtgttggccacaacagcaaaggcaaattgaatttgtgcatttttaaaatttattttaatgaaaaaaatgtgcaattaaatttttatatcgcatttatttaaatttgaaaatgaatttatgatttttaaaatttattttaattaataatgtaaaatatttttgtatctttttaatatttcatttatttaaatttcttttaaagaatttataataaaatttaaaaaaatattaatgtatttatatctttataaaaaaattagtaccaaaaataaatttataaaataattttacataattataaaaaaaattgaaaattaaaaaaaaaactttctattaaatttaattttggtgtagaaaacgaaaattgaaaaaaatctttacgataatatataaaaatgagattttttaatatacaaaattttattttaaataatcccaaacaatgatgcaaaatatttgtcaagatcaacaaaattgtggttgatgcttctcatggagcagtcaaagaaattctgaagccggaattattcaatgctcaaacaaagtaatttaaaatattttaaatttaattaaattttttaaattttctttatttattttaagcctccttctgttgagcgcattttatttcaaaggcaaatgggcagaaaaatttgatccggatttaacacagaaaagggcattttttgttggaccaacagatcaaaaagaggtcgtcgttaatcattgtaaatataattgctaataatttttaaactttattgtaggtttatatgatgcaaaagacgcatttctttgattattatgacgacaattcggtaaatttaattaattattttttaaattaaaaattgataataaagactaattaaaaacaccaatattatttgaaaccgtgaaataaaaattcattaaaagttattggcatttatttagaatcttaaaattaatgaatttgaaaaataaatttctatttaactatatttttatttaatatcaaaaaataagttttatattaacaatatttttttccattttaattataattaaaatacaaattaaatttgtctttctttacattaattaaattgatcaaaatatgtaaataattttattaaatttaaataaattaaacaggtatacaaaaacaaatctgattataaagagaaaatttctgtttttaaggtccaactcttggcaatgcaatagtgatgaagcatcaatgtacttagctttgcccaaggagcgttttgggcttgcaaattttctggcaaatttaaccgtcgattctctgttcgaaatggcacaaaaatgtcgaaaagtcaaattgaatgtgagtttaattcttttaaatttaaaatatttgaattaaataatttattaaaaatttattttaggtggcagtcccaaaaatcaaattagaacaaactgttgaattgaatgaaccgttaaaaaagttggggcttg

SEQ ID NO: 76674 - DNA, 478 bp, Heterodera glycines
atgtttgatggatattttcctttgttgaccgtcttcaacttggcctcaaattggcacttctttcgccacgtttcgatgtgctggtggacaaaatttcaaacatttcggttggaatgtaaaatttttttatactaagaaaaatgaaaatttctttgtttttaatttgaaaaaaaacaataagaattaccaatgcagttatatatacaaagaggcagaaatttttcattgcacatttaaagattttcaaaaattttaatagttttttatgtgttttttgaaggattttatgcgtaaaatatttaatggcctccaagtaggcaagtttttttgtgtgtaaaaatgagaatgtttcaattttttaaattatttttttagggttttttccaaaaaaacgaacttcaattttcagaatattaaagtggtgatcattctccccttttgatcgtccatatcttaagagaacatttttttcttaaaa

SEQ ID NO: 76675 - DNA, 354 bp, Heterodera glycines
atgcttcacaacacggtgattgaggtcatcgaccgagtgtgcaaagagatggcaattcgccagcacaaggatctcctcttcggaggaaaaacggtcattttcagcggtgacttcaaacagtcgctgccggtcgtgcctcatgaaggcttaaccgctcaggtgacagcctgttttcaaacgtctccgttgtttggtcaattcaccacgatgaaattgaccatcaaccagagactgggccaaggtcagcaagtgtacttgcaaatgtgccgccaaatcgggctcggagaaaccggagagcacttctggattcctccgcagttcctcgttaagagcaaggaagagctgatagattat

SEQ ID NO: 76676 - DNA, 188 bp, Heterodera glycines
atgtcatcgttgggccaccatcgttctcgtgatcgggaacgaaatgttgaagcaagatctgaaagtgcggtatgttgcatggacaacattttttcaattaaatgaaattaattaatttacattactttaatatttaggcttttgctgtgaaataattgggaaaatttttattttctgaattcattaaa

SEQ ID NO: 76677 - DNA, 389 bp, Heterodera glycines
ccaaaaaattacaatatcactggccttgtcgaccggtctttgcaaattccaatttcaaaactacgcagtgttttcttggcttatgcccaggctcgccttttcgatttggaggtgaggaaaatttttttccagaaaagcctggcaaacgacccggtccaggccaattttcattattttattattttttattttaggactttgctaattgttgtttgtcttacattgacaaaaatgcggacactgtgttcaaatcggatgaattttttgcagagattgacgaaaaaaattgtttaaaaattgcaaatcagtggagaaatttcaatttaggaagcattaacttttctgttatgctgcccccataagaatggcatgatcccgaaaagaataaa

SEQ ID NO: 76678 - DNA, 1328 bp, Heterodera glycines
atgtcagacattcaaaaagaatcagaggaaaaaatggcaaaagcaatgtaaaattaaaaatgccaatttcaatttttgttttccttttctcagtttcatttccggcgacggttggctggcggtgttcgatttgctcccgccttctcaacttggccttggaattgcaatggtcagccatcgttttgacttttacgtggatgaacacttcaaaacgcgcaaatgggcattgaaatttcttcgaattcgacgtaaaattggagaaaatggcaccaaggaaatggaaattgccaattacgatggaaaaccgatgccaattccgaacattcagttgccacgcaaagtcatcggattcaaatgcatcaagatcacgtaaaattggtggaaaactttagaatcgggcccgctaaaaaccgcccaaaatgaattccaatcaatctttaatgacttctaatcaggcccatagttaaggggggaatcctcctccccccacccacgaagtgaaaaatttttcaggaaaaaatgtgatattttttgaaaactgcataattttcttgttatatttcaataaaagctttaaaaaagaaatttcacgacgtcgcttatcgacgcaaaaaaaaagtcttcccccccccctcggaaattttttttctggctacaggcctgcctccaatcattataaaaaatagtcccgaggcgcggaaaaaccaaaaaaccgccttttgaactggtttaattcacaaaaaattgaccaaaaatagattttttaaaaatgagttttttcatcaaataaagtattgatgataatagcgctgaacgagtaaattgtattaaaaaatcctacgcaccatcaaaacatttcccaattcattttcagtttcatcgactccaatgccatcgcttttctccaccgttttcgtccacttttcgcctcctctcgaatttatctgtccatttatttcaaaagtgatcgcattttggagttattgcacaacattttgcccatcatcggaaaaaacatttatggcatggaattgattacggaacctttccagcgtttgcgacaaatcgttccgtcactgtttttcaccgaatgtccatctcttcgctttgtcttccccacttttgacgatcttttcgccgaatttccatgcgatgacagtgccatggcgtcgcgtggacaggcactggcaaaatggcttttcactccccacccggacgatgtgccaaaggtgttcaaatgtgctgtccaggaattcgttgcaggaagaaatgtgccgttgaacgttgaagggcgaaatttgccgttgaaaattgaagcatttaaaacg

SEQ ID NO: 76679 - DNA, 119 bp, Heterodera glycines
aaattagtcaaaatacatttcagattcgtgattagcgacctttaaaaccccggataacaaattagcatggttttttatattaaaaaaattttgcaaaacaaaaggtcctcccccctttt

SEQ ID NO: 76680 - DNA, 1686 bp, Heterodera glycines
atgtcttccaaaatgattctgtacgttttgcgcattcctgtgatgccagaaggaacggagtgtggaagaaagtgggataaaggacctgagagaacctctaaaagaggcgcccgtagctcagttggttagagcacggcacggattgctggggtcgtgggttcgagtcccaccgggcgagttaccttttatgttctacattccttctctattttgccccttccttctcatttttttagtctgtacggtgtgccaatgttggttggatgttgcgccattctttggatgttttgggaccgattcaaaaaaccaaaaaagaaaatgtaaaaataataaaaaaatcttaaaaaattgaaaatttaattttcagtttcatttctgccgacgcttggctttccgtgttcgaattgcttaagcgttctcaactgggccttggaatcgcacttgtcagccaccaatttgacgcaatggtcgacgaaaatttcaagacgcggcgctgggcgctgaaatcctttgaaatttggtgcgacgatggcgaagatggcacgacggaaatggcaattctcaattctaccaaaaaactcgtcgggagttacagaattcaagtggttcatctctttgaaggcaaatcgttaccaattccacaagttcaattgccacgaaaagttagcggtttcaaatgcatcatcatctcgtaagattggccaatttctaattttttgccaacattacccattcatttatagttacatcgaccgcaatgccatcgcttttctcaaccgttttcgtccgcttttcgccgcctgcccaatttggccatccaaacgaacaatgatcgcattttggaattgattgtgcacaacattttgccaatccttgaaaaacatcttcgtggccttgaattgtccttcgatgttttccaccgtttgcgtcaattcgtcccgtcaattctcaatgattttccatttcttcgcattgtctctgtctatgcttccgatctcttcaccgaatttccggccaatgacaatgccatggcatcggatggacaagcgatggcaaaatggcttttcactgcccatccaaacaatatgccaaatgtgttgagatgctcgttgaacaaggaagatgggaattgggcttcgcggattgaagcattcaaagcggtgcttaccaattgatttatttgccatttttacgattttttgggtttcactgacctgacaaaaatgtttatttttcgcccaattcatttttacgatttaaatggaccaatggttacagtttagatggcctgattcttttcagaaaatgtgatttgaaaaatccgtttaaagtgcactttggctttttgtgatgaccccaacatcattttgtttttttaatcatttttttcacattttaggcatttgcctcggcttcatcttccgtcaatttcattgtcgtgctttggtttccgcaatcatttgctgactccgtcgttctctttgatttgaccaacgaattgactcatgaacaattggcattgaaaagaactgtctttaacacccgctttttgctgatccgttctccaattgtgcgagacgaaagcaaatggacaaaatgggaagaggaagcgattggctgggaattttttgatcaatggaacagaattgacattgaaattaatgacgaggagcacatcggggacgg

SEQ ID NO: 76681 - DNA, 1298 bp, Heterodera glycines
atgcaaaaacctactccttctaaccgccccaattcctctgtctccaaaacccttgcctgcgggcttgaaaaaattgtgaatttgagtggaaatgagccactctcggtgccggtgctggcggatcggagtgatccgctgggactcaagtcggtccaacccgacgcgttgccaatggagagtgctgagggcaccaaggaagtggaaataatggaagtggatgaaatgagtggagaaaaagggaaaagggatgaaatgggtaaagaaaaggtgaaaagtggtggaatggaagaggaagaagaaagtgagggcagtgaaagtgaactgctaggagaaggtggatttgacaatttgcaattgaaccccagcctgagggcgggaaataaagcagttgaaaaggaagataaggggaaaccctatctggtcgcccaagtgagaagcgacggtgtgatcgcggcacggatgaaacttttctgggatttcccggaattggtctttgtcccttttagcctcttcgacaacgcccgagccgatcgaaatcggcgatttgttccgcttacgtaagtgtgagtggacgaagagcgaaacaggatgggaagagcgcggagattggctgtatgaagtgaccggacggctgaactaccaagccacggcaacggacgtaagccaattgcgccagcgcatcctcactgaggccgtcggcattttggtcgatgtgcaaagagcccgtgaccgacacgtcaaagtggccatggtgtcagcacctgagctgagctgcgtgatgcgcacctaccgtcgccacttcccggccgatttcacggatacgacatccgctaccgctccgttgtccgtcttcaacttcggcagatcaacagtccgccatgggtgctgtattcacagcagtttgcgtatgttttgccgtctgattttggtaaaaaaagaggcgatgaactgctcgttcatcacgcaaacgtcattgctagcgttgagcctgagccaatgggctatgagttccctttcagtgccgaactgagctgggcgaaggtccagctgggtgagaaggtcatggcggcggctgtcgcagcgcagtcgttcgatgtgaaggctgatctgcggaagcacactctgttcgtcgagccggtcgtcatcaatgagatctcgacaagaagcgtgatcatccagttcgtcatgccggtgccgagcatcgaagagctgacggaattgtgcaaaatttgggaggtcgatttggcggtgggttgcaaagtcaatccggcaaccaaggcaaagccttgcgcgcatgg

SEQ ID NO: 76682 - DNA, 173 bp, Heterodera glycines
ctgaccaacaatcgccatccaatcagcagacattttttgtctcttctgccgcacagtcactcaacgcgggcaaacagccagacaaaatgccaagcaaacacaaattctacgaatattacacgttgggatgcatcagcatgcgcactgaggtggcgaaagaagcaattaattaa

SEQ ID NO: 76683 - DNA, 649 bp, Heterodera glycines
gagtgtatctgttcaacaacgtcaggaacacccataacaatgacattggcagccaacaagagcagcagggacaccaacaacaacagcaccaacatggtgaacaacgacgacgaccaccaaatggtggtggtggtggcatggcggaggagagcgacgacgaaatgatgatggtggtggtcagcaacaacaacaacaacggtaatgaccatgaccagcaacagagacgaatgacgacgatgatgatggtcaacggaagtggtgggcgtaatgatgatgaggatgatgacggtggtggtggtgatgaggatgaagatgaagacgacggcttttacgccattgatttgggccaaccaattgaccaacaacagcaacaataacaacaacatgaccagtgatgagactgacacatgaggagtagggggaggaggagcactaaaatctcaaacaattgtttttgttttttttgaatttttttgcacggggccggacataattttggattattttattggtttgaagcccaaaaatcacgctttgaacgccttcttctccacgctgtccaatgaggagatttggtttatattgtccattgggaactggcccaaattttgccaattttaccgcaaaatgccgaccgctaaaagcgcaa

SEQ ID NO: 76684 - DNA, 1358 bp, Heterodera glycines
ttaaaatttttaaaaatttatttaattattttatttaaaattggaaagtaaaataatggccggtgtcgcattgcgccgtttgttgacagagtaccgacgtgagtttattgtgcatatatttatttacacacaattaataacaataaaaacaaacaaattaattggttggtaaaatgatcagctgaatcaatcacaaatgggtgctgctgtattaatttgtcaagttatttaaaaatggcagaaaattcgggtaatttttgaggaatacaaaaaacccttacattttttgatgtgtttgcacccgttaattggaaaatgcccaaaaatattttattattcaatgaaaaatttctaccaaataactgaaggggttgttgttgcactgaaaattttcacgattttcgcccgcttttcagagctttgccacaaccccccggagggcattgtggccggcccggcggatgaggaaaactttttcgaatggcactgtctgatttctggccccgagggcacctgctttgagtacggcattttcccagccaagctcacattctccgaggtgtcatttttgccgaccgatggataataaaatttgtttatttttactacaggattaccctctcagtccgcccaaaatgcaatttctctgcgacattttccacccgaacatttacgcggacggcaaagtgtgtatcaggtgaggggaaagggcctccattttgtacatgtacacaacaatgtttgattctggttgaaatttggcatttcatttattcaacaaaatttaagaaatatacacaacacaacaaaatttattaattattttaaaatttaatcattgaacaaaaaagcaagatttttttaaaactcaaaaaattatttaaattttatattttttttaaaacggaaatccacaaaaaaatttagttgtattataaaaaaaacaatttcaatttttttgcatatgagttagttgcctgtgtaatatttctatgggaggattcaacctcataaaatttggtttcaatttttggaatttctgcgctttttttagcattttgcacaccccgggcgacgacccgaccggttacgagacgagtgccgaacgatggtcccccgtgcagtcggtggaaaagattctcatctcggtggtgtccatgctggcgggtccgtcccttgccaatttgatttggcgttgacattggcttttttcgtggcattttgcccatccatcctttgcagagccaaacgacgaaagtgcggccaatgtgaacgcggccaaaatgtggcgtgacaaccgtgcccaatttgagcgaattgcgcacaaactcgtgcgcaccacactggtaaaacagggg

SEQ ID NO: 76685 - DNA, 1320 bp, Heterodera glycines
atggcacgctatcgccaacggggccatcatcgtccgtccgaaaagcagcagcaaaaccatggccacattttggacaaagatgacgccaacacttcccatttccgtcactcaattcaacagcaattccaagaagatgaaaatggtgtggaattttttgccactacggtaaaacggctcgattttttatttaaaaaaatggtatttaagcggtttttcgttggaaaaattatctattttgactctattttggctttaatttcaaaagccaacgatttttttttgccttttaggatggcaattcgactgtttcccactacatttgtatggcaccgaaaattgtcaactttttgctcttacaactcattgccagtcgcatttttttgctcattttccaatgctgcatcaattggattatggtggacgctccgaccgacgcgttcaaaggcattccgccaacaaaaagtttttcgaaaaagattttaattagtcttggaattaagttcatttggtctgatcaaagacatttattttgcgtttcacgatttttggccaagaaaacaacaaaaaaagtgttttggcgctactttaaaaatgccgcttttgaattttgtcaaaaaccaatggagggcctttggttttcaaaattagttttgtcgtaataacttgtgaaaacttgttcgcatatgttttcggcgcggtcattgatcaggaattcgataactttagaccaattactaacccgaactcaacaaaaagtcgaaaatttagttcgagtttttttttttgaatttaggtgcggatcacgaattggttcaaattggtctcagattcattatcaccgacatagaaaaagcttatttgaacaatttttacgagtagagatatcttacgaaatgattgcagactgtgaaaatatcgagaattcattgaacacagatgccacactgctcgaccggctcgtccaaggcacattgaccggcctcagttgttgggatggccggcactttttgcacattgccgaattcggctaccaatgggagtccaatttggcatttttcccactgtttcccgccctgttacgcatgactggccaactcttccagcaactgaccggctcggcactgagtttgttctccgccatgttgattaccggcacggcgttgaacaatgtgttaaatttacgacgttttaaattttaaaaaatgaaatttttaggcactttttgtctttaatgggcttgtgctgctcagacttgccttgttgctgaacggtggaaatctgaaagaggccattgtcacggtgtacatgcactgctggtag

SEQ ID NO: 76686 - DNA, 147 bp, Heterodera glycines
aaaattccacaccattttcatcttcttggaattgctgttgaattgagtgacggaaatgggaagtgttggcgtcatctttgtccaaaatgtggccatggttttgctgctgcttttcggacggacgatgatggccccgttggcgatagc

SEQ ID NO: 76687 - DNA, 1572 bp, Heterodera glycines
gacaatacactgacaatttgaacattgcggcgcctggcgttgttactcagcatgtgtgcaaggcgtccaacctcaaccagttccagctgagtcagatcaattcgctgcacccggacactggcgttgtcggcgtttatctgtcgaccgaagggaccaaagttctcccatttgtcaaagccgctgcccagggcttacgcgaaatggcatccaaaccgatcagtgacgagcttctccaggtgagacaagcattgtttttggagtggtttaactaattacgaaacgaatttaacatcaaaaataccaattaattccatttaattaaaggttttaagcctatgtagttccgatttcacaaaaaaatgattgagtcctgtctttatccagacccttggtttttaaagattctttccttttattgcacaccattatttttatgaatttttttcatatgccaggcttgcaaattgttggccaagggaaccgcactgacacccgacgaattcattgcccttctgaagacagtgactgcggacgatgtgaaaaaggtgaatccaattttccaattggatttcatgagtacattttttgaactccgttaccaagcccgctaaaaattgagtttaattttttatttgtttttcaaatttcatcttttcaggctgcttccccaactttgcgccaaagcccatacttggccggcgaggttcaccaggccgggcccaccgacttggcccacgtggcacttgttggtcatggagcgaaattgacggacgagaaggcggttgcaatccaagcagtgctctgtgctgccattggtcaaactagttcgtctattttcttatccaaaaaatcagtttttgaagaaaaaacccactaaacattgaaattaaacgaaacatcttcaaattatcgactttccgaattttttttttaaaaatatcgcaaaattactaaacttttccattggtttaggacaatacactgacaacttgaacatggcggcgccgggtgttgtttcccaacatgtgttcaacacattgaaccaccagttcgcgttattaacaaaattaattgtcgttaaaataatcgtttaagatccgttcgccttttttccactacccatacggttgatcttatggttattttatgtgaagtacaaccatttcgaccacattccctgtttaggattttcccgtcctcgaagaacgcgttgaacgtgtccgcaacgaattgaaagtagaagcggccgagaaggtcgctgaaattgttaaagtcaatgcgggtgtggtgaaggaggccgccacatttgcgaacagtacacaacgctcggtgtataccggtgtgaccgctgtcgttggcatttcgcttaccctctttggtgttctgttgtcgctcctgtgggggttgttcggcagagtcggttccgtcgaggctaatttgagcgctctcaaagttgacgttgacgcccgttttgagaagctcactgactccgtggaccgccgttttgaccgaatggagcggggcatcaatcggcttctgacaaaaaatggatccggtggtattgatgactaa

SEQ ID NO: 76688 - DNA, 1089 bp, Heterodera glycines; identical to SEQ ID NO: 1906

SEQ ID NO: 76689 - DNA, 1051 bp, Heterodera glycines
atgtcatattattggtcattagtgtattgtgagtgaatatttccacctccaatttatcattttgcgcaatttgtgtaagcgaacggccagcaaatgtctcatcgcaattctcggagcatttaacacatttttgagtagaaatgtgctgaagaactttgccataatggcgaatgaccaaaaagcgcaaatttttcagtcgcgaaagagacaaaaaggcagccaaaatgtcaatattataagcggaatattcgaggtcttgaagatttggacaacggtcaatcagcgtcagcaaagcctgtggacggaacagaaatttaatagtaattataaaactcaatcaattaattattcagtacctcagtcgtgactttagcaagtcgtaatattatcagattagcaagaaatcggacctacccccccccccccccattctaagtttttttttggaaaaaagcgccaaaaaagtgcatatgcggtaaaatgagaaaaatggtcacttcgcgctactaatagttttagaaaaaatcttatttttggggtccgaatcttagtttttgcctcatctgtccttatttttaaaaaaaaacttgcagccctgattaaaatggaaaattcattttccaatttgtaccctccaaaatcattcaaaatctacaaaattcttttgcaatttttctctcaatttttgaattgtttttcacttgatattttcctttttcttctttttttaattgcttcaaatgttctaattattctcttttttgttcagtatttggtcccattttgtggtttgatcacttttggtaatattttgatcattttgcatttgatcaattgattcggttccattttctgtattttctttgccgaatattttattaaaatttggtcggattttgcaggattcaatttcaaaagcaaagaaaatataaaaaatattatatgtcataaattcattttggaatatcgaatttattgcattaaatgaatttgtttaattttttgttcgctttttaatactaatattaattttatttgtattttctcttca

SEQ ID NO: 76690 - DNA, 252 bp, Heterodera glycines
gttgccgttccgtgctgcaacggcttcacctcgttggtgttagcattacgctcagctaacattggaccgggtgccgatgttttgatgccgtccataacatttgttgctgtctcaaatgccgtcctcaatgttggtgccaatcccgtgtttgttgactctgctgatgaatgggactacaatccaagttggtctctgctgttacgagcggcaactcagaaaaccaggcacgaaaaaatcttggaaacgttttga

SEQ ID NO: 76691 - DNA, 383 bp, Heterodera glycines
atgtctcatgaaaatgtcggaaataaaatcttggtattcatttctgggggtagtaagcaatactctattaaatttcaaaatgaaagtgacggacaagtttggtataaaactaaaatcagaggtaaaaaactaatttatatagaaaattaaatagttatttagggataacttttaacaacaaaaataaattcaaacacgaggactttaaagaaatggttttaaattatgtcgacgaaaagagaaaatatttcaattatgataaatttggaccatctagagacagtaaaatattgtcccaaaaaatgactaaagagtacaaacccgttcaaaaaaaaggaattatcgacgaaaattttgatattattccctatggattttggtga

SEQ ID NO: 76692 - DNA, 1310 bp, Heterodera glycines
atggaagattattacccggattcaatgaaaaaagatgaattcgaaaaatttcaaaaaaggtataaagaaaataacgatacgccttttttattaggtaaaaaagttatattattttttaaataaataatttcagaggatcaattgaaaatttattgtggtcaggataccgaaatattgctaaaggcactcttagcaatgcgtaaaatttttatagaaataacaatggatgaacttagtcctaatggcttcgatgtgtttaaggttagaaaacaaatttcattttttaaaatagaatttagacttcgaccacaattgcgggggcggctattaaaatttatcgggcgaaatttctaaaggtgaaacaaatagcaatagtccctgagggggggggggggtttgaaaaaaagaacaatcaaagtttttgccataaaatatttcgagtggtttatgtttaaaaatggggttaaagcgagacatgcgggaaacgggggagaactaaacatcggaggttaattttaaaaaacaacttaatcattaaattatatttttaaagggttcaatgttgattttatatgtggaaaatataagaagattatagaatttcaggtactaaaaaataaaattaattatttttgaattacacttttagggatgcgtttttcacggttaaaaattggattattttcatttttaaattatcttttaggatgcaaaaaatgtttaaaaccttttcaaatatgtcccaatggaaaaatagcggaagaaaattttgcaaaaacgaaagccagactcttcaaactaaggaaaatttcaaagaaatatggcttaaaagtcgaagaaatatgggttaataaaattaattaattttatttaaaaaaaaatcaatttaggaatgcgatgtaaaaagaatgataaatccacgagataaagaaaatataatgctgaaatgaaaaaatattttaacatgatccccgataaaggtttgaaagttaaggtatagtttctaaattaagtgtttaggaccaatagacccacgagaagcatttgcgggtgggcgaacacaagcattttgtttatattttaaaacagaagaaaatacggagattaatttagcggacataatttcgctttacccatcggtttttaataatttcttattttgacatatagttaaatttaggttaattattttacttcatacccagtaaaaacacccataataatcatatcaaaaacccatgacgttatgtggcaataccccgaagacattccctatgacagtataaaaaagtctttgatacactaataaa

SEQ ID NO: 76693 - DNA, 738 bp, Heterodera glycines
atgctgaatttcgattctctgctactaattttgttcattttttatttccaaattcctttttcactttcggttgacaatgaatgccgtggtgtcccaactgatcaaatggcaccacttaaatacgcttccgatcagtggggaaagccaatggaaatcagatttgctgatgattccaaaccgagatttaacgtattcaaaaagataattttgatgtttttttttggaaattttatttaaaaaatatcaaaattttattttatctttttgtatttttagacaattttttttattttgaaaatgacttaagaatttttaagaataaattgatattatttaagacacacagtaattcaaaattaaatttcaatattctaagctatttagttacttttttatatttttaggacgtatttaaatgtttttaaattattttaatacctcttttcctaattttggataactaaaaattaaattcataatatgaaaaacattcactattgttggttttctttttaataatttaaaaaattataactaaaatatattttttcagattcgttttgggtttaccacggaaatgaatgaaaatttgcccaaaaataaatgtgtgcttatcaaatgttttgacgaatttacagaaaaaaattattttaatgtattaaaaattgcagaaaaattaaatgagaataattcgacgaatgaacacattatcaacttaattgacttgtaaacatttaa

SEQ ID NO: 76694 - DNA, 1220 bp, Heterodera glycines
  unsure (1)..(1220): unsure at all n locations
atggacatttggtcggcgggaatcacaatttttgaaataacactcacaaaaatgttgggacatttcgaagcatggcataaagtttcattggttggcgaattgtttcgaaatgccaaattgaatccgtctgatgccatttttatatcggctggttcaaatgtttggtggcaaaggtattggcaagtgatttgtgccattctgtccgtgtgggacgaaatgccaacgattgcatttcttttgggggtaagttggagaatatgtaacttaagtcaaaaatttattttaaaaatccatttataaaaaaggcagcaaagtttatttaaggcaaaagtctaaataaaataatttaaaaaggtaataccgtattttctctaattatccccccccctttctgagggggttgaaaaataatttccccgtctccatttataccccggggggacaaatagaatttttatttattcgaaaaataataataaaaattaattattctaaactgaaaatcgtttaaatgtcttacggcactcgaaataaattaaaaaatttttgaaagtgtatttttcaattttcttgcctttttcttacagattattttcaaaaatgccaaaatatgtgctaaaaaaaatccaaaatagcccatatctttttatgtgccaaattatttttatgtttttataagtcgctctaaatcaaaaattgttcggagaaaattccatttttttgtgtttctctcgccataactaagcggtaaaaaaaatatgtaaaaacataaaatccgatctatattaataaaaatgaaaaaagaaagtttttgaaaagagaaaaaaattaaaaataaaagcaagaaaaattgcataaagaaagaatttttgattatttaaacacaaccgaggcaatgaaagttaaatttaatattttttctcgataaaaaaatttcatatttaaaaattttccttattcgaaaaagctataaaatattttaatattcattaaataaacaaaaatgagtttttttttgattagattttacgtgttttcctccctaaaaatcctttanaaaaatttttaaatgcctttttcggaattttcgtgcgtttttttcaattttttggtgcctattatagtgcctttttcgcgattttggtgcctttttagacggtctctaatcataataccattatttttagaaatatgtaagcattgagccgcaaaagcgatga

SEQ ID NO: 76695 - DNA, 1109 bp, Heterodera glycines
atgataccacttcagaatatgcatcgacgtccgaagactggccgaactcccaaaacaacggaaagacaacggcgtcagcttgttcgactcgtcaaaagtaatccaaagttgaccgctgcagatgttcgacggcactcagctgacgctctcggagtccaaatttcacacagtacagcccaatgcattctccgaaagcaaaatctgaatgccagacgtccggcacgtaagccactattgaaagagtgccatcgaatggcccgtttgaactttgcgagggcacattcgcattggacggtggcggattggcggagggtgatatggtccaacgaaagcaaatttaatttgttcaatccggacggggcaattcacgtccggcggcctccggggaaccgtttcgaccccaaatacacacgcgggacaatgaaatttggcggtggtggcggtgtaatggtctggggtatgacggaaaaatttgaccattttcgtacgggatgtacagggtgctttaccggggtgacacactcggcccgttagtccgaattgagggtaatttgacacctgaaggataccgcaacatcctggaagaccgaatgttgccgtttgcccgtgaacgtctcgctccaggatggacttttcagcaagatggagcggccatccacacggggcaactgctgatgggtcccattcgacttctccctggcggtcggcgtctgcgtttgccgggctgatttcgcttgaatggagttcccctgcttcgtccccgccgttgagcaccgatttgtcacccattgaaaatttgtggcactttgtgaagcgaaaaatcgccgggaggcacttccagtcaaagccgcaactctggcaagcagtcctggaggcttggaattcaatcccatttgacacaattgacaatttaatcagctccatgccccgacgtatcgaatcagttattaagtcgcgaggtgcaccaacgaaatattgagttatatggaattatattttgtgttgttaaacatatgaccagtgctttttgaggataaaaaattttgagatcaaatattatttgctacagaaaacggaatgtgatcatttctatatctttggatagccca

SEQ ID NO: 76696 - DNA, 297 bp, Heterodera glycines
aattgttgtcatgatttttggacatgccattgttatgatgactgttgtcatgcctgttgtcatgacacttgtgctttttgccatgatatttgttgctaatttggcaactaattaggctgtttcaagagcatttttccgagagtgaacatatgatgatgaggaaaaaaagaaatttaaaattactattcataaatgttttttttaatctattttcctatgacattcctaattatgaactaattaaatgttggttgcgtaaaatacagtcatggtcatatgtttaacaacaccaataaa

SEQ ID NO: 76697 - DNA, 371 bp, Heterodera glycines
atgaacacaaagaacgaaaaagcaagttcaatttttctcgaagcctccaaaaaagagacagagagatcgtggagagaggttgtagtcttagctgaagaaatcgaagagtatgtcaaatccggtagaggtgctctgaatcgtacaataaaaacaagagaaaaggccccatacgcttccggtgtacgagatttgttccttaagctctctgattcaatttgggaaatttacacaattttggacaaggtaaattcagaatcggataaagcggaatctgctcggcgtgagtttgagagattgaaaagttttgatcaggcatcaaagctagaagaaagagccatgtcttcattgattgaatccacacgattgcacct

SEQ ID NO: 76698 - DNA, 244 bp, Heterodera glycines
  unsure (1)..(244): unsure at all n locations
atgaccgtgtacttgtattgctgcgccttatcggatccggtgataatccctggacgcccactgggacaagttacggcggatgttgtttttattgagtttatgcgccggcaacaatcctatcaggacgtcaaccttttagaagaaaggatttctgtngaaatgacaactntttttcgtgccacagcggtaggctaatacccccatgaattaaaattgtatttttattcagaagatgaacatttaa

SEQ ID NO: 76699 - DNA, 1444 bp, Heterodera glycines
cggaacagaacgatgaagaagttttcgatggggtgtccgacaaaggcccaatcaatccgagggacgcttatgcgggagggcgaacaatgcctttttgcctgtacgcaaaggcaacagatgaagttgagatagcaatgtttgatatcataagtctctacccattcgtaaattatggtaaaattgattatttttctgtttatttccttgattaagacaccccatatcctgttggcgtctcaaaaattgtggtgagcaggagttttgaagtgaattggacatcgcccgatgatgttccctacgacggactgttgatgatggcaaaaaatgtgaaaaagtttaaccaccccgaggaaaaaagggcattgtcggggaccttcacctcgattgaactgcggaaggcattggagttaggctatagagtaactggattcttcagggcctatcattatgaacaatttgacagccaactgttcaaaggttattcggatctttcttaaaataacagtggaagcgtcaggctggccgtcggatgtgaaaaacgaagatgaaaagagagcattcattgaaatttacaaggctaagtatgacatcagccttgactacgaccaaattgcctttaactctggtcttgggatgattgcgaaattagtaagaaaacaaataaaatcaaaaaaaaaaaacaaatagaaattaaggggttgaacagtttgtggggaaagttttcgatgaggaatacactttcttcaacgaaaattgttaatagcatggaggagtgcgctgagatggtgaaagatgatacgatcgaatttcgacaccgattatgttggatgaaggggctgtacgaatgattttcaacaaaaaaccagaatttattagggagcataaggtgtctaatatcgtattgtctctgtggactacgagtgccgcaaggataaagctatacgaatacattgagcaggtttacaaagagaagatgtgcaaaccattgtattgtgacacaggtgttttcagggaaataatttccataaaattttaaatttagattctctagcttttgctcatccgaaggggaaatgtccattgaaggaagggaaatttttggggtaacagcataatttttaaaaaattttataaacatttgttcagtgagatgactcgagaatattcggacagtgacattttggagtatgtgtcggcgggtccaaaacaatacgccttgaagcttaggaggaaaaaggatggggtgatctggtacaagacgaaaatccggggctttacattgaataaggacaatagagtggattatgaggagttcaagtcaatggtcttgggctacaaggaaggagttaaaaaagtgtttcgctatccagagaagattgggccaacaagggatagcagaatgctcgatcaatatttaaatgttttgctctttgggtattattaa

SEQ ID NO: 76700 - DNA, 577 bp, Heterodera glycines
atgacaattataagttcgtttcttttgatgggagttaattttgataaattaatttttatgtcctttctcggtgcgtcccctagttctttttatccttgttgttttttcccctttgcaattttattaataattatttttgttcatttttctaataattaattatgaatttgcttatgagttattttttaagattgaatttttttaaaatctttaaatccacttggtagctttcttgacaaaacacaaaaatgcttttttatatctagtatacttttcaattttagattttatatatcgtttaatttagtaatattgatgtcttatatattcgatttgcattataattattttatttatgtttattttagaaacttcttttttcagtttatttgaattaattagtgtttccattaaatactttaaacatttattaaaaccttttatttaacagtagtatcaggccgcaaatcttgttccaaattttcggataaatgcgccgcactgtgtgcggccggtccatgcgcgcctgggcgcagcgcttttctttccttcctttcttctttgcattcaaaataaa

SEQ ID NO: 76701 - DNA, 3707 bp, Heterodera glycines
atgattgaaacgcccggtttggccaagaaagcaaggcatttcaagatccaagacccatcaacccgcattgcattgattgatcaaatcttgaagcagatcagtgacttcgaatttgacggtgtacttctcgacttcaccggtcattcaaattaactcattaaaaaaattaattaggataattaattaaatgctttatttaattagtattattggtgtttaattattttaattatcatttttgtgttaaaaaagtgcctcaattttaggcatcaatttgtcaatggatcagattggaaagcatcttgttgattttcttggcgattttctgctgagaaatgcccaagaatacataaaccgttcaaagatgaacaaagacgctaaaaaactaattatcagtaattaattaacaattagtatatgtataataattttaaattgcttttttagctgtacgaattgaccacgacgaaattgaccacattcaaaccgaggctttttcacgcctcaatttgatggaactcatttcatttacgggcgtaagaactgaatcggaccaagcggaattagttgaaaaattgggtaatttaaataaagatatttttgtttaaaataaattaaaattttatagaagacaaactcagtgttgacagaaaagtaatcacggacaaaatttgtgaagtacaatcaccgtcaagacgattcaaaagaggcgcagggtaattagtggcttaattaatgcttctaatgatacataataattaagttattacacaatttgcaaatttagtttccctcaggccgctttgaacgttgggcaagaaaccaatttttcgtcgcgaaggcatattaaacaaaccttttagaataataaatgtattggtacattttagaaataagcgatcaccaccaccgtcgcccaaagcaaaagcaggagcacacggctcacccaaatcaccaaaacaagcaaagcatggatcacccaaatcatcactatccaaagcaaagcttggaacatccaaatcgtcaccatccatgacaaagcatggatcacccaaatcgacaccatccaatgctaagattgggtcaccaaaatcgtcattatccaatgcaaagcatggctcacccaaatcgtcaccatcaaaagcaaagcctggatcacccaaatcaccatccaaggcaaagcctggatcacccaaatcaccatccaaggcaaagcctggatcacccaaatcaccatccaaggcaaagcctggatcacccaaatcaccatcgaaagctaagcctggatctcccaaatcatcaccatcaaagaaaggccatgtatcaccaaatgtatcaccctcaaaaggcaaaagtcctcaaaaactactgtcaccaaaagcaatgctgcaaacgcacaaaagtgcaccggtatcaattaaattataccttaccattagagcaattaaataattagcatagaaaaatagtgatataaccaagcataataattctcgagcatcatcaaaatatgttcttagagcagtcagtaatcattaagtttgaacaccaacagcgccatgatccaaccacgaaattatcaccaatgaatgccaattttcgggctaaacactcaccaattatggcacagacgcactttgatcttaatcacacacgcaatcggccattgcataagcattggtcaacaaacatgcctggctcggcttacgctgatggacaaatgtcaccgcttcgtgcttcatcatcaatcgttaacattgtcgaacttcaccgacttccgacgccacctccgagacatggcttaaatgagcaacaacaatcacgaattgtgccaatgaagccctgcttttcacgatcaaagtccgagttgccggcaaaagtgctgtcatcaccggcttcggcaataaatgcaaagaactggcaaaacctggcacactcatcagtgagtagtgatggatcagatgatttcaatttccggatgaaacatcaccaatatcaacattcaccggctgtgccaataaattcgcttgcaaaaagccaaagttatgtgactttgccaacatcgccgccgccgcgtttcaatgcgtcaccaagtgccgatcagcaaaaaaagcattttgttgcgatgccatcatcgccgagctatccgcttccggttccatctcctaacactggcaaaatgccacaatttctgccaatggcagacaagtcctattttgcatatccgaaaagtagcagaacagcaaatcgttcatcgggctcaccactgctcgggcccaaaccaaagacactgatcatcgtccgcgattcatttcctctaacatcaccaagcaaaagtaaaagtgccagtgccgtggattaccaacaccgttttgagcagtttctttctccaatcaaaagcaagaatgccgccgctgtttaccatccccaaccactgcctttgccaccaaatatgccgtcaacttcatcgacccctattaaaataggccaacaacattcatcagtaattccaaccagaattggccatcattatccatcttctcctaatagaattggccatcataatttgccacaaagtattagtaaaacgcaggtaccgttaatgatgtagtattgatgctcgagaattgtagaattaatagatttgatcattaattgactggcataaaaaaattccttaaattaatcattttcaaaaaatcacattgttaaagcctgcgttggcccacatcctggcacatcattcgccccatttgccggtcggaagtgagctaagtccagctaaatcactcgacagccatcaccaacggcaaatgccactgtttgcgggcaaaaaatatggccaaaaccaccagtcgcctcatatgtcaccaacaaaactgtcaaatggtaatgtctcaccaccacaatcaccatcacatcgtctacaacaggtgaaaataatggaattataaaattacagaatttctgattggaaactccgtggattctttagggggggggcttaatattaaaggtggtagggaattttcaattcaaggagaggctccttattcagacgggcttctaactttgaggggctttatcccccccccaccgcgcactccctcataaaaagggggcttttaattaaggaggcttctaatatggtgccaagaccgagagcctgaaaatcataattctaccatgtgcctgatccattattaaaataataataattgttaaataaattatatatatttaagattatcaagcggcattcacagacaaaggatttgtccagggaaaaagtgcaacgacaacaacaaagtccgctgttacagcacccatcaattcgcgccctaattggcctgcccaattcgccggctgacgaccaaaacccgcctccgccattcacgccggaacagcacgcgctgcttatggacaccgtactccgtccaccgtccggtcttccgttcgagagtccacgatcagcgccgtcaccgcttgagctgagcgaggagcaacgcgacaaactgatcgatgccatccaaggacgaccacagccaggacttccatttgaggatgaagcggaacatgaaggactacatccggcacaccgtgtcaattcggcacatcttgaacacgttttggatgccatattccgtaagccgcctggcctaccatttgaggatgatgaagaggaggaacacagcagcaccaacatg

SEQ ID NO: 76702 - DNA, 474 bp, Heterodera glycines
atgggtaataatggtatgttgagtggacaattttttttactctttcttaattgtaaatttaggtagttttgagcgcattgttgaggaacagcaaccgccaacaacacccgtaccgcattctcgaaaacttcttcgtgctttgtggaaagaacgaattttcatcgtgttggtcctgatcttcgccacactggtcgttcagtatctctactggatgaaaacattgtaatgatgaggggacaagtttttttgacggttcaatttctttgttattttacttgtttatgttcggatataaaaaaaacaaatacttttttgtttttgttaaaaatatctcataggcacagagtaacaggtccaccaaaggtttttttgggaaaggattacccccctcatcttataaatacggtatgattaaggaccaaaatagggatagaaatctgtctactcttttttaatgggttttaaaaaattaaa

SEQ ID NO: 76703 - DNA, 407 bp, Heterodera glycines
ggggggaaacgtagtgcacccggacaaaatatcgccgcagaaatttaaaagaaaattttcaaactttgaaattttaaagaaaaaaattctttaaaaattcagcgctttttttgttgttgttgaaattttatgataaattactgttttttaacgaaaaatctttcaaaattttcaatgatttttttcttgaaattttcatattaaaaattttcagattttcttctttaaaattttttttttaaatttctgcggcgatattttgaggcgcaccccaatccatgaacaaggggtgcgccagtcagaccctcatacgtcggacgtttggcgcagggggggggggggggggtgcgccaggaccaatttttcttacgtcggcccccaatattccccggcgacgaccttttttt

SEQ ID NO: 76704 - DNA, 867 bp, Heterodera glycines
atgcgagcagtgcacacggaatgggtacaggtgagaaaagaacattggggaggggggcggggaattggccggcattttaatctagggggcaaaaaaaacacgaaaagccaatccaataattaggggtattgaactaggggttgcggcgtatctcgtactcaccggcggggcggggggtcataggccgtcgtttcgtttcttttttttgaacggggaatgtaacacctttttattcaaaaaagtcatttaacatctgctagcctcagttaattgctttgtttcggttcattaagttgctaatttagcgtttgtctgctgccgtccctttgaatttgccttccgtcgccgtttctctccctttttgtcgcgttgcgaatgcgcccattcggggcccaatgttcgaattgtcaacgaaaaagtgcccagcaaagcattggacaaaacttcgtccctttttgagtgttgtttccccacatcaaaaaggcgccctttgaaaagtgcgctgaggccaaattcggacgaaggcatttacaaattatgcttctcctccggtgaccaactaattacagaacattgataaaccattgttgatttattcattacaccaattagcaaattgttaaaacctaaggctaaatacaatctcacccaaaatggtaaaatgccctatttgctggtcagcattgagcagttttgtttacattatatttataaaaacgaatatttaaaaaaaccatagttaattactttttcatctgatttttttaatccatttgtgtatgtatgttgctctggtcctcattctttgttcaatctaaaaaattatgatcaatcacattttttcaaatttaaaacaactttaataaa

SEQ ID NO: 76705 - DNA, 644 bp, Heterodera glycines
atgggccggccacagattacacacaaaacgccgagcaaagcccagcagcggcttcgctttgctggccaatgtttggtgtcctccgtccgttccgttgacgggacactgataggactttggactctcgacttaatgggaaggaaagtgagaggggggatgttatttggccacctctttatggactatcgcggtgagaacaaagaatcatttttgatcagtattcaatcgcgattagaatagggtaacattggccaactgatcagagataatttgcgaaaagaaagccatatgatttatgcaatcatttggaagggaatatattgataaatgttaggtgaggagttaagtaagaaaattgaattttacaatgaataataaggggcaggattgccagatttgggcttttaaactcattttgtgggttttttttattagttaaaatatttttttatattttaaaaattttagctggattaaaaaacgatactcgcattgccaattttcaaagaaaaaaaatgaaacaaaatatttaatgcgttttttaagcagcccaatgtataaatttgaaacgaaatagtccaaatctagcgaaaaaatggtagaaccaccaaaaaaacccgcacatatttctcaatcaaaataaa

SEQ ID NO: 76706 - DNA, 1077 bp, Heterodera glycines
cgcctatgtctgctcaaactcggcgtatgttggctgcccagggcgagtctcaactcagttcgctggacccttcgtgtgttggggtttgattgtttcctcagcattgtatttttatatatatttttaaaattagatttgtgctaatatggcaacagatcctcatagtttcgtgggcgattacttttttcaaggttttcgacagttagtttttgttttttaaattgttatttccagaagccagacgcgaagccatagacggtcttcaggtgacacatgattcaaatgaatttatggtgaatttgagtgagccatttaaagttgactgaacgtgtgaaatggatccttcacaatttggacaatcatcgtccttcacagaatcgcccgaaatacatttttgtctttcgggacggtttatcggagggtcaatttgcgatggtccgttcatgaacgggctcttcataatttacaaccttttcaggcatgtaaagaggagttgatggcgattaaagaagggtgtcgacagttcgattcgaaatacaagcccaaagtccgaattggctgacccaacccataaaatgaaccgtttttagttcgtcatgattatcggtaccaagcgtcacttcaaaaagtttttcatcgaagaagagccgaaggaaggcggacgacctttctcaaaaaatctgtacccgggtacgatcatccaagaaaaatgccgagcggacatcaccgaattgtgcgattttttacaggaatataaaaaaatatttcgccctttaagttttttgcaaccgcacgcgccactcaaggcaattgcaaagcatcaaaatggaaattgaaatgcatttatttaggggactggcaaaccggtggaatatgccatgttggagaacgaaataggtgtcaaaatggacgaactgcagggactgataatggcactttcgtattcccatcaggtgaaaagggacagccgaataaatgcgctctaaaattgcaccatttttagattgtcaacatggcggtctcaatgcccgagcccgtgtaccaagcggacgaattggccaagcgagggaaaaataa

SEQ ID NO: 76707 - DNA, 349 bp, Heterodera glycines
atgggcagggacaaaggtattcggatggcagagccggagatcgtctcattcgacagccccgaggttggtcaaacaccaattttaattcatatttttgtcaacaataagaaaccttgtccctccctttactccgttacagaactcggatcaagaatggatggccatgttcgagcgatgcactgtcaaccgaattcaattcatactgctggtggacgaaaggcggaaagacacccatggacttttgaagctttctgaggccattcacaaagtgacgacgcaacacataacgttggagaaggcccttgtgagtgtaaacactcaattccttctctttatctgtaaatcgtga

SEQ ID NO: 76708 - DNA, 2025 bp, Heterodera glycines
atggttcgacaagcacacaaaatatcccgagacaaaggccaaccgtccttcctaagttcaactgttgttctgaacacagaatgtaagttttttttttttgaaaattacaaccccctaaacaaattgtgttatttcagtggcaaaacttgccttgagctgtctgtatttaacgttttcatatggatcattcacaaagtaagtgttacagtaaaggcctactttttttcattatttcctagtttttcttcatttttttcagattttgtgtcgaaatttccgcagccttcttcaaaaacaaacgggaaacgttgaaagtgtgtgtgcctgcgctgatttatgttgtgcaaaacaatttgtatttctttgcattgaaacgggttgaagcaacacttttcagtgtaattttacatttctttttttttgtttatcacaaattcctccatttttgatatgtttatttttttttgtcaagatcacttatcaattgcgaattttgaccactgctctcctctcaattgtgctcctccgtcgcgttttttcccgcactcaatggggcgcactttgcatttcccttttcggtgtttgcctcgttcagtttgcctcttccaccacttcaggcaaagggtgagtgaaacggggaaaaaagaagcgaatagttaggattaaaaacagaaaaaattgtaatcataagagtggcggttatttgagccacaaattatgtcatgtgaaagtggtgctattacgttgctaaaatacgattgggcgatcctcaaaaaaaaaccaccaaaaaaatattttttttttttttataaattcactttggtaaattaacgcaataaaatatttttaaagaaatgctggaggagcattgtctgctggacaaaaggttcacgatgaacaattacttggccttttgaccatcatcattatgtgttggacttcggcatttgcaggtctatttcatttcataattattaaaataattttctacaaaatttattttgaaggcgtttatttggagggcgttctcaagcaaagttcatgtgatatttggacacagaacattcgtctgtcagtgattacgcttccattcgcttttatgacagtggtcaacgattcgaaaagcattcagaaaagttttcttttttttttgttgttgtttttcgccttttttaataaattgcctcacaacctaaatcatttttgtgtttacgggtttaagatggattctttgccggatggaattggctcctttggatagttttgttcagtgccgccgcttctggcattttagttgcggttgtgatgaagtgagtttttaatttttccagttttccatgcgctcttttattgttgattcggaaaattagtcataaaccggaaaagtatcttccacttcaacatttcaacttagaaattttagaaaatcataccataagaaaaaaattttgagaaaaacagtaattcatcataaaatttataaaaatcgctgaatttctaaaaatttttatattttcttatggaaaaatttaccaagaacttttcttacaaaatttctaaatggaatttaaaaaaaaaattctcttgggaaaagtcctgctccgtataatttgtcccttcacgactttccttatgttcaacatttgtaggtacgctgataacatcaaaaagagctattgccaaagtgttgcccttggcggcaccgccctactgtccattgtcatcggtgactcccaattttctgtgctgctactggtcggtgtttcgcttgtgattgcctccgtgttcctgtacacgttgaacccgccgccaagagtgaaaccgtccacacccgaagtgccagcgcatcacccacaagacgacgacattgatggcttggaggaacaacaattttccacggatgacgacgacgacgaaactaataatggaagcaacagaattgttgaactgaagttggacgacatcaaacgaattggacgagaagctccggctgacaatacttttctaagtgagtcaggggattaa

SEQ ID NO: 76709 - DNA, 2762 bp, Heterodera glycines
ttcaggtgtgttacatattcttgatttttatttttatttaaaaccaaaatttaaagacaagaacgcattcgagaaacaaagggttggtggttaataagtgggaattttttgaattaaatttttttagtgctaattattggcgccggaggattaggctgtcccgtttcaatgtatttagttgcggcaggtggcattaaaatgccgttttatgttttttttctgatttaggcattggacgccttggaattgttgaccatgatgtacttacttagatttagaaataaatcctgacttatttatgtatgttcaggtcgtttccattgacaatttgcaccggcagacaatgcacgaccaaaaacgggtgggccagtccaaagccgattcattgaaagaatcattgtccaggtggtcaaacaaaacaccctaacattgtcattcatttccaaaattgattcttaattgttttatgaatttggaatggattttgtgggacaaaggcttgaatttccagcaaaattatactattttttccaaattggaaatcaattttatctgcgcgactaattcattcatcaaaactttaagtaaatcgaattttttttagaattaacaatgaagcgaatgttgtggcttataacgtgttgctcaccagcaaaaatgttcttcaattgtttcgtgattatgatattgttgccgactgttcagacaatgttgccactcggtaattagaaaaaagttcagaaatttaaatgaatgcatttagaaatttttagttgagagagcgggtcacgttaataattatttttaaatggaattatgaaaaccgaaaggttactcttttgatttacagaaaagtttattaaattgcattttacatttttatttagttaagtttttaaaaaaaaattgtttccccaaccataaatttccttacccccccccctataaaaatgacgagttttttttataatattggttttcaattatagatatttgatcaatgatgcttgtgtgttgagtggaaaaccgttggtatatggaagtgcgcttggttgggagggccaatttactgtctacaacaatggaacggtttgaagcgaggaagcaccaaaatgttgagggcggggtggaaggcggatttaaaatatagtttctggcactttttttaaaaagattttctttaaaatttttctaaatcaaagaaaaatatataactaaaaaaaattaactgggttttcttaaaggttttatgagccattaattaagacaaataaggcgaagccctttgtctgtttttttaaattgctttctttttaagaattgtccttgcttccgctgcatttttcctgatcccccaagtcctgaacatgtgatgagttgctcagaggcgggtgtgcttggccccgttgttggcgttattggaagtttgcaggccttagaaatcatcaaaattgctgtcagcggaaaatgttttcaaaatttgatgatttttgacgacaacttttgtttccattttagcatcatttgccggaaatttgtggatgtttgacgggtttgaaggcatatcaaaaagaatttctttggtattttttttataatattaagttgttgtttttttaattttttcacatttatagagagagaaaatgtcgaattgtgcgatttgcagtgaaaatccaaggattacagaattacaagactatcaaaagttctgcaggtcggatccatcagataaggtgaatttcaattattgtttaaatggttgcatgacattgtgcctcggacatttgggcctaggtaaaaatctggttcaatttgggtttccaatcccctatggcctaaacaacataaaataagcgatataaaataattaagtgtgtctgataatatgataatcattcattaaaattttcaaaaaataaaaataaacaaattttcaaataacggaaatagtttattgggagcattaattctgctgtttgaatagttgatgtttttctaaaattctgacgatcaaattcagacgcagtcacttattttaactgtagtaaaccgtcttaagtttgaacccgatcttagaaaggcgcaaatgttagggtactcgattcttacatggcgcaaatgtctgcacattgttttaatctatttatgcgcttaaaggttcgctcattatgtttactttcggctgaacaacgagtgtcgccaacggaatatttaaatttgaggaacaaaaaaataggcggttccttcattttgttagacgttcgacctcccactgaatttgaaatatgccatttgccggaagcagaaagtttattattccaaatgaaaaataaataaatttatttgcttacaattaacagattttccctgggaggaattgagaagagcaaaaatggaaatgataattgacaagataaacaacagcatggaacgcaaaagtccgacaattaacggtgcaggaaacaatgggaaaacaaaaggtaaaccaaaaataaaattaaaacgactagaaaaattaaaaatatagtagaaagtggaatgttggaatgttttaaaaaatctgttttaactaattttataatatttgcccctgttcagtctttgttgtgtgccatcatggcaacgactcgcaattggctgcgtgtcatctgcacaaacagttgtcagaggccggcattggcgaccggttcatcgttcgtgacattgtgggcggaatggatggatgggcgttggaggtggacgccgacttcccgcgctat

SEQ ID NO: 76710 - DNA, 699 bp, Heterodera glycines
atggcgtccttcaacccttttgcttgggaaagttttttctttggaaaattggatagaagcgaggccgaaagaatgttggcaccttgtgaaccgggcacttttctgatccgagagtccagcacagcgcaagactgttattcaatttgtgtgaaaggttgtggtgtggaattttcatttctttttaatgataggtaaattgtttttcttttttgaggtgtcggtgatcattccaatcattttttgattgaaaaattggttaccaatgaatctggtggtgctccattgtacagagtaatccaaaaaatatatgagagttacataattgatttaaaattgaattcccagatttcaaccctccaatttgccgatatgcattctctgctaaaccatttcaaagttttcgcattggagccagtcccgatcaagttgataaagccattggaaaagccatttttggagaaagtgatggccaaatacaaatttgaatcagaacggatcagcgatttgtcctttgagcgcggtgaacagcttgaaatactgggaaagccggaacagggctggtggttggcaaggtcagcagggagggaagggcatattaaaagtgaatctaaaatcattttttttgccaggaattgtttgggtgagactggcatgattccggctaaccgcgtgaagccggtaatcattcttttcttgtaa

SEQ ID NO: 76711 - DNA, 1866 bp, Heterodera glycines
atgagtgatgattattttcgaacacagtgtgatgattgtgacgatgcactgagcgtgctgaacccgagcagtacaaacagcagcagcaatggttgcggttctgcgggcaatcggtcgagcgcacattctgtgggcgaccaacaattacatggagaggtacatttaattggaaaaacaaaattatagaaaaaaattataataatttgcgtatttttgtatttgtgaaaatttccaaaattaaaaaaagaggatgattaaaaaagagaggcgtaaaggcagcatttgctctatttaaatgttttctaaaaaaattaaaaaaaaaattctcacgaaatcaaaacgaaaaatttaaatcgagaaaacgataataaaatttttctgaccaataaaaaacgaacctaaaacccaaaaagtgccgaaaaagacgaaaaccaaatttcgaaaaacaatccaacttccccattcataaactttttgatataggcataaaacaccttttgtcaccaacaaaatttgattttctattaataaaaataattttcttcaattttgaacagcaaaaaccgacagacggagacagtacaacaaaattggtgcaacgacagcaacaacaattgcgcgagaactcgtgggtggtcgtcaaatttggacgtcagccaagcatttatgacaacgattcattgaccataaaagtgggaaacttgcgttctaaaacatttaaggaattaaaatcaagaattctttaaattaaaaaaatgagtttttcgagaattcaataatatttttttactttctactaaaaaaaacttaattttcgatttttttaattatatccaagggggctcctcttttatctatgttttgctaatttacaaattaataatgaaaatttagtaaaaacgggacacaatttgtaattaaacaaaagctccccttttagcgaggccaatttttgtatctccaagaaattttgtcaaatggaatgtgccgaggcacgaatgaaagcggaaaggtcggactctttccaatcacttatgtggaggcggccaacattgagccgagcgaaagcccgtggaatatttcagcgaatgcaaatccaaattgttagaatttattttaaaagttttgtcgcaaaacttttaatttcaattttcacaacttaagaatatggaaagataattaatattttttatgttttttgtactgcgacaacacttgataattattattggggctgaaatttttggattttaaccaatttttttatttctggatattattttgcgagagaaagcacagaaaatttggatgacgacgtgaaaaaagactgtcacccgggcttgggtaaaattattggtgctttttgagcgttttttgcttaccaaattcggcacctattgatgggtttttatgcggattttagcactttagtgcgcttattttagcgatttaaacacaactattaaattccagccttggtaattattttgtacatattattacatcctcctatttttatgtctttatttttattggcattgttttccatctatttgcctttgaatatatatttgcttaaatattcattatttttaaatttgtttaaatacctaaatgtcttaaaatgttttcaccccggctctcaatgttttctcttaaatcggaatttccacctgttgccttccttcctttctttgatctctcgccatgttttcaaatttgttcgacgtcctttaacaacaatttcattgtgacacccagtaaacacattgtgttgtgtgttgttttgtattcatttccaattttcacaatttgccttttctctacgccatatcatcatcattttgtatatatgtacacacaaca

SEQ ID NO: 76712 - DNA, 727 bp, Heterodera glycines
atgcatgagccgtatcttggccttctgtatttgatgagacagaattttgattgtgccaaattcgaagaaaatttagaaagtatattggtaatagaatgtgaaaaatatcgaaattatttggacattttgtatgaatatttgttcaaagtatatgcaaaaagtagggaatgcattattatttaataatcattttccataatattccattttttatatctgaaaaatttcatataattaaattttgaggatgaaaatttgggttttataacttgtgattatcttgctaaatgaggacaaaatgcgaaattataaagcaaattttggcaatttggatgaaactcttcgcaagaaatttgacaaaaaattgcaaaaattgttcaaaaaagcaagaaaagaagaaaaaagccattggagcattgaaccttaacgaaatttttcaaaattttgcaggctaatagaggatacatagggctatcgaatgataccaacaatgttggatttggttggcaaagaaaaaagttatagtccaaaaacatgtgttcgtacgaaaacggcctggccccaaatagagcggattgattttttcaataatttgtcaaaatacacaattaatattaatggttattgaaccgaaatgaaaagcaaaggtaacatctgctacataattaaattcgtagaatttgatggttttattctccgagtagtaatgaaaatttcatttaataaa

SEQ ID NO: 76713 - DNA, 921 bp, Heterodera glycines
atgccaatggattttgaatatattgttgccaacgtggccgggccgggcacagattctgcatttcttgacgaagattttgagggctgcaattgtacggacggccaatgctgcacgtcggcagcaggcggttgcagctgtttgcccggcaaaagggacaattacaatccgatcaccggcaaatggattgatcaggggggcactgatcagcggcagggtgtgccacatttggagtgtcaccaggtgtgacggacggctgacaattctgttaatatgcataatttttcacgggtcaatcaatgacaactggtaaaaaggcaatttcaaaaaatagtggactttttataaaataaatttaaaaaaaagattttatttaaattcgtttttttaattacaaaagtgtattgtacgaagcattttgtattgccttttgtacaaattctcatgtcattacaccaatttttcagaattgtgtgtgcgcatgggagccggacaaatgcgcaaatcgtcaagttcaattcggtgtccgacaaccgatcagggtgtctgtcgataatttacaaaattgaacaattatctcttatttgccattttccgatcaatcattcaagcatccttttcgtcatcaacaggttgccccgtgtacaaatggcaaaggcttcggcgtttttgcttccgcgttgatcgaaattggcacttttgtgatcgaatatgttggcgaagtgcttggggaagaggaggcgcggcgccgaattaacattgttggacggcacgagcacaattatctgttcacaattcgcgaattcttcggaggtggagtcatttagaacagaatttttcttttttacactgatcaattgtgaaagcctcattattgataactagggctgggatttttatgtgctaaaaatcctgaaatatgta

SEQ ID NO: 76714 - DNA, 83 bp, Heterodera glycines; identical to SEQ ID NO: 55537

SEQ ID NO: 76715 - DNA, 878 bp, Heterodera glycines
atgtataaatttagctccgaagtgaaggagaatacagcattcctaaagaagcttgtctccaccagatcagaacaaaagaagaacgaattaatcgaaaacgctacagctgaccaaattttggcaatcgttgaaatttgtgcaaatatattgagttttagttttaaactaacgaacaaacaaaaaagaaggttggcacaatacgccgatttttatagagaaattgccaaatctcgttcagagaaaacggtaagaaaaaggatacaacaggggagtggtatagccctgggagctgtcttgatacctgtcctgagttttttagcccaacatttattagaaaaaataacatcatgaaatttgcaaagaaaatgttaatgattcccgaggcggaatatttggctctacggattgcgatgaattggctctataaagaaagacgtacggtaaaggggatacttgaaaatagaccacagaaggtggtgattgagaatcatgtacccggtccgaacgctgcaccatatctaggcctcaataaccaatccaaaccacaggagaccgatgaaccacggaaaataattattcctaggaaaagacttaaagagcaaactcctgatcctgaatcagataatgatacacttgaggagttaactccggaaccccaaacaccatccacactcaaaacacccgttccgaccaaaactattatacacccgacccttttaaacggtttttttaggtacgtgaaggaaaacaaagatttatttaaaattacggcggccggaaaggtacagtcgaacattgatactgaaggatccaacagtaaaagacattggttgataaatcaaaagtcatgtggggacgtggaaggaaaaaggcaataa

SEQ ID NO: 76716 - DNA, 668 bp, Heterodera glycines
gtgtttttgatagcactctccaaggatatgcgtgtccaatttatgcgaactattcgcaaaacggtgttcttttgtaatggcaatacagcagcagcagcaacagcaacagcagcactgcaaacggtagccgactcataccagtacagtaaccgaatacggtatgtcaatgtccatgctactggaagaatcaatcggttcaatggacaatgattacgcagcagaaatttgcggaattagattattttttgacacaaattcttttgataattaaagagaattaattaatttacaaatttgacgaacaaagggctaatgaggacaacccaacaaactaatgatgtcgtacacttgtctcaaatatgtataaacaaaaaaaaaacaagaaaattaaaccaaatttattttaaaaccaataaaaagctaatgagttataattcaaatatttaagcaatgtaaaaaaattaaataaaataattaattatttaatttactattttcagaagtgtttttatgcttttgaagtaacgaataacggtcaaatttaattttattaggttattagaggttaaatattcatataaaagttttttgaatagattttaaatgtatagacagataggcatttttatttgtgttttttaaatacaatttcgtagtaatatttaaaa

SEQ ID NO: 76717 - DNA, 438 bp, Heterodera glycines
atgtccaaacaatttctgctgttcgctttgctgcttttattgctcccaatggacactttgcaagaatgttcatgggatgggaatctgtgtacgggcagctgttcaacaggatgcgaacaattaagtcaagcaaactgtgcttgtgcaaaggttttttggaattttttggcaatttttaatattttttaattaaaatcattttttatttaggaatttaaagcattcctcaagggaggaagtccacggcacctaaaaaacgcttcttttattaaagtttgaggtgttcattttccaattaatcattttggcacaaatacaaaaaaaaattcagagaagaaaaagcaaggaaaagcagaaacaacagcagaagaacaaaagtgtcgaatgtgatgaagacgaaaaatggataataatattaattaaataattattaataaa

SEQ ID NO: 76718 - DNA, 84 bp, Heterodera glycines
atgaattttgtggaacgatttgtgaattttataaatgatttgtacgattggttgtatttgaacaatgtgatggcttcgtatgag

SEQ ID NO: 76719 - DNA, 3437 bp, Heterodera glycines
atggccaaaaaatgtcgcgatgaagcaaaatgcgacgaaataatccagttgaaaaatgcaattcgcaatttggtcggtcattcgctgtttttggagttggaacgccaaaatgcgttggcactgtcttttggtaattgcaattgccagcaacaaaaactaaaaatgacttattttgccatcacagacattgtggacgatgctcaactttcgtcggaatacacaaaaatgtttttggaaaatgcgacggatgccaaaacggcggagacggcactttcaatgcgcttttgttttgccaaaataatcgaactcttctccaccatttattcccattacaaattgcacctgccaaactcagaagtgtcaaatataattcgaacttttttcgtgctttctgtgcaaaaatgggtcctcaaattgcccaatgttttaatcgaaatcgctgacagaagctcctccaccatggctttgttgttagtccacgattggctggctcagctgtcatcggagtgcaacgaaatgccacaaatgggaggaaaagcgcagaaaatggcgacgacgagggcacttttgaattgggccaaaaaggatgccctaagggaaattcgggcacagttttatgagcaacacacgcagaacatggtcagactgtacgagagcggagcccacaaccgcaacgcgttcagccactttttggagcagtgccaattggacgggaggggcgacaaattccgagtgaggcaattctatgccaatggaggaggatggaaaagcggagaaaaggacgaggaatacgaccgattggtcagcaaacacccaaaagtgaagcaaatgttacgcatcggtaggaaaagcggaatttggaattaaaagggcaaaaacaaaaagaaaagcttttttagaattgaacgacgaagaaataatggaaattcaaatcagaaattacctaaaatatatggatgtccaaacggaacaacaaaaccaaatgacacgcctcaaatatttgctgaacattttggtcttttatcagtggtacttttaaaaataattttgttcttttttaataaaaattatttatgttattttttttgtttttagctttaagaaaaatgcgccccttttgcgcccttccgccgacggaaaaagcgaacaattggacaatcatttggccgaattggaacttttgatgaacggcgcaagggaagcgctttcagtggatgagctcctccaaaacgagactcagctaatccttgttttgtttgagatgaaaaattcaatttttggcgataaaataacgcttaattcaaaaaatttgtgtgagggggaaaactttttgcagtttttgtttattttgcatgaaaatgccattggagaactgatgagaaaagctgaatttacggcacaattgaaaggtaaagcattttttaaaaagtcaggggaaattaatatttattttattttttaattacaaaaatatatcaaaaagatgacagcaaatttgttatcagtcagaatttgagtttaaaatttaaaaaaatgccaatattaaaattataaaattaatttaactttttctttgaattgtttttgtcattaatattccatataaaaataactcaaacaaattcagaaattaaaattgaccaaaatcgtctggaacaaataatttgtggaaactctgaagtatttaagcaattgttgatgaattacaatttcatttatgatgaccctgaaaatatttcgacaaatgaagaaggaaattgccaaaatttcgacccaatttcatatttaagtgctttcccattatcatcatcatcttcatcttcacaatcatcatcagctgaaaatggtgcattataagaagggctgggatttacatatatttacaaaacggaaatatttaaataaatatttaagaaaaaatgtagaatattaataaattgaaagtttagagcaaaaaaataaaattgaaaattctttctaattgaataaaaagatgaaaaaaatgctttttcaacgtaaatattttctatataaaagcaataacatttttgaagtttatggatattgacgttaaaacgacatattttcggctaaaaatgaccttttttcgtgtattctcatcaaaataaagctacagaaagaataattttaaaaatatatccctttaaaaataataaaaacataattcggggggggggccacctgacaaattttatcatttttttaactctctgcgtttacattttttaaaaagaagaagcatcttttaattttattgcaaaattcaaaattttgttgttaagatggtgaagaagggtccgtctgttccgatgagattttaatgcgtttgtacaaggccattttggtggagaaagtgccatcggaaagtgccaaatggcaaattggcattgacagtttatatttccaacacaaaacgacggttttaaattcaataaaagaaattgaattattagcaatgagttcaaaagtgaaggatcacacatcggtggacaaattggcccaattaaaagcggaagtggccgggttggaactgttttccccgctgaaggatgacgatgaaaaaatgcggaaaatttgttggatgaaaatgttttttaaattatttgtgggagtgacaacaaaaggaggagaagcagctcagaaaagaggcgcactgacgacactgagcgtacgcaattaaattaaaattacaatttaaatacgacgtaattaattaacaattatcaatggccgggacagggatttgtgttccaggactcccgttcttggcgatttgtccaaaaaaaccgggttcggtaatctcggcaacccggcaggcgctggccccgtccggtctcaattaattaaagtgcactttcgtttagaaattggacccatctgccaatgatttggttgaaaaggattgtgagaatttgccttatctgagggaatatttcaaaatgtttttgtccgattctcataacatcggagtggttggcactttctcagtcttacaacttttggcacaattctcagaattggtcccattcatcaacaacaaccccatcccatttggctcgattcaaagcagtgaaaatcgtaagtaatctgatttatttggtgtaattagctaattatttttttgcttaattagacaattaatttttaattttcgcagcacaatcaaacgaagacaaagaaatgcgaaatttgtacaaagcttatttgacagaggatgacctggcaaaaataggcaaatatgaagcaattattggcgtaaaatatttgttagatgtcgctaaaaagaacgaagaaaaagaccgaccgaagctgaaagagtggcacaaaattcgaatggccaaagtgcgagcacaaacaatggcaacgctgaaaatgttggacatttacgcggatagtgccgagcaactgtttcgcat

SEQ ID NO: 76720 - DNA, 683 bp, Heterodera glycines
atgatcgcgaccaacatttgtgccatccaattgtccgccgcaatttttcgctatttgcgtacattcgtgccgtcaattctcgacgactttccatcgcttcgcattatcaatgcctattatgacggtttcttcgccgaattcccatgcgatgacagtgccgcggcatcggatggacaagcgttggccaaatggcttttcactccacgtccggacgatgtgccaaaagtgttcaaatgcttgttgcgttgggatgacgggcatttcgagtcgaggattgaagacttcaaagcggtgatttccatttattttatgttatttggcatttttacggtctttggtgttcgctgacaaaaatattttgtacggcattcaatttgaatttttcagtttttaactgtttttccctctcattttaggcttttgccaatgcttcatctcccgtcaatttcatcgctgtcattcgttttccgccgccttttgctaattccgttgtgctcttcgatctcactaatgaattgactcgggagcaattgacattcaaatggatggacgatatcggccgttttcttctgatccgttgtccaattgtgcgcgatgaaagcaaatgggcaaaatgggagaaggaagcgattggatggaactttatggatcagtggaatcgaatcgacattcgtgtttcgtga

SEQ ID NO: 76721 - DNA, 507 bp, Heterodera glycines
  unsure (1)..(507): unsure at all n locations
atgtcagaccgccgaaaagaagcggaggaaaaaatggcaaaagcaatgtaaaatntaaaattaaaatgccaatttcaattttgttttcccttttttcagtttcatctccgccgattgttggctttgtgtgttcgatttgcttccgccttcacaacttggccttggaattgcaatgatcagtcaccgatttgacttttacgtcgatgaacacttcaagactcgcaaatggtcgctgaaatccatagaacttttgccaaaatatgaagcggatggcaccaaggaaatgaaaatagtcaattacgatggaaaagaaatgtcaattccgcaaaatccgttgccaaagaaagtcgtcggattcaaagccattttaataaggtgatgatgcttttttgttgtttcctatttgtaaacgattccttaattttcacagatcctgcttcaacaacaattccatcgcttttctccatcgtttgcgtccaattttcgccgcctgtccaattaattaaa

SEQ ID NO: 76722 - DNA, 988 bp, Heterodera glycines
atgaggaacctcgcggggggagaaaaagggggcacaaaacttccgcctgaattgccgcggtcagtcgctgacggatgctccgccgccttcgccttcggcacaggcacactaatggcatttcactgccactgccgggttagttgcccttgggtgagcccccacccccggggcataaattaaattaaatgaaagcaaagggaataaaaggggaagggagggagaagcagcaattggacacttcggagtgtaatataaacgcaaaaatgagcaataattacatatttgattagatgaaaaatggtaaaataataaatactaaatgaatgtataaattaattccaaaaatgttcctcattttttaaaaatttatataaattttctttttttttaaatataaaaatattctaaattttagctaataattgaaaagtattttaaaatcgattttactatgaacaaaaatacaaattcatataacttaaattataatgagttaaatcgccctttttggaattagagtgactttttagcactttaaaaaaccctaatttggcatatggaatgtaaaaaaatttaatgggtttcagtacatatttgaatatgacaaaaaatttgttaaatatatgaaagaattttgtatcagagtaaaaaatttttcgagtttttcgtgacggaccatgtaaaataataacaattttttgaaaaaagtataataacaaaaaaaattattgatttgacagaaacttttgcaatattttttcttaaaaaaatttaaaaagcatttttttcgatggattataagcgggcgaataattttgaagaatgaatggcctgcctgtgcctgtttagtagtgtttttttatttttggcatttttcgatcagttgaaaaatattttggcaatttttgggtttttagtagtgctgttcgagaccaaaattttacgagacgacactgcagaaggggagactttcattgtttggatttga

SEQ ID NO: 76723 - DNA, 1807 bp, Heterodera glycines
atgccaccgttaaatgttaccctccgttggctcatttccaccacaaatcaaacgaccgtccaaacgacgaacgaaccgttgatgaaaccggtgggagagcaaattggaaattgactaattaattaatgggaggaaagggcaactttttagattttggagtacaccaacgaagtgaacgttctcgggctgatcgtcttctgcaccggctttggcgtcattttgagtattctcggagaacaggcgcggcttatgaccaacttttttattgtgctcgatgcagtcagtgagaattaggccattaattagcccaaattcacccccaggtgataatgcgttggatttccgccctaatgtggtgctacccaattggcattctgtcgttggtctgcaaaaatattttggacattgacaatttgacggaaacggcgcaggcattcccttctcattaagccttaaaaccaataaggcttcaggcgttggccatgtacgtggtcaccgtcatctgtgggctgatgatccactcgctgctcactttgccacttttgtattatgcgatcactcgccaaagtccgttcgaattcatgactggcatggtgcccgctttggcgctaattcaaaacgaaaagcctttccttttcagctccaagctatcgccaccgcttttggaacagcttcaaggtgaaaaaagggcttcaaaattttctgttactttttttctgtgtgtttttccctccagcggtgccacccttcccgtcacttttcgtgccctcgagcaaaatttgcgaatcgatcggcgagtcactcggttcgtgctgcctctcggcgcaacgatcaccatggcatgattaatgaccatttggcatccattccgaaaacggcatttataataccgtaggatggcacggcactatacgaagcggtggctgtcatttttattgcacagcttcacaacatcaaattgacggcgttggaacttttgacaattaggttaaccattgaattatgagcctgttcaatttgttcttttacagtgtgacaactacggtagcatccattgggtctggttctgtaccggctggtaaacacaaacttaacttatttccttttaatgacaacaatttttggccttgataccattctgatcgttctggtcactgttggtttgccgaccaaggacctgagcttactgttgactgtcgattggttactgtaaatttaaacgcattcgcctattgtacctccctttatgaatttgcagagaccgaattcggacgagtgttaatgtgctgggagatgggttcggctgtggaatcgtttcgcacatgacaaaagagcgattgatcgagtcggacaacgtcgacctgatcagacagctgaagacggacattggtggggagggcatttcaaaattggcactttccatcgaatgccaacgatttcattcccaaaattggcaatttcgaatcgaaatgcccattttattgccaactttgaagagttgctcaatgcgccgaccacttcccccggctccgcccttctgacgccaaacgcgtcgacgcggacgcgcgaaagcgccgcgcaagggacggcgaagcgcactcagaacaacgcgcagcagcagcagctgcaaattccaaatgcaaagaattcgccgtcttttttcgttttcccttcgcccgcggcgcaaacgaaaaattttcaaaaaacgcaaagggaggggaggaaaagctcatcagtgtcagcagcggagaacggacaagtaaaaggagaggccatttggggaaataagcaaaacacaactaggtaa

SEQ ID NO: 76724 - DNA, 4206 bp, Heterodera glycines
tctcggcgagatttcggcggcgagatttcggcggcgagatttcggcggcgagatttcggcggcgagatttcggcggcgagatttcggcggcgagatttcgtcccgtcccctaataaatatgctaactcattaagcccaaatatgaatgcattccaaaagtgtggctttgtgacggcgatgtgacctgtgccggcggtgaggacgaaagtgaggcgctgtgcggcgtcaccaaaaaggcgtgcaacaagggcgagttccgttgcaacaacaaccactgcattcatgccaggtgggagccgaaggatcggccgagtggggagggggtagcaattcgttcaatcggtgctgggacgttagtcaaaaaccatcaaatgaaaatttttttgtcagaaatttatttataacttggcataaaatgtaccaaattttaaaatcttgatatttttcgatagctctaagtgttttctattatcttgcaaaattttagaaaaattaattaagtttgaaaaaagttatgacttgagaagctcagaaaaccaagttttttcaacatttttggccataactttttttgagacttaatgaattttgttgaaattttgtaggctaatagaaaacacttagggctatcgaatgatatcaagattttaaaatttggttgcctctgagcaaagttatatcaaaaaatcttttcatttgaaggttttttgactaacgcccattttgatggtttttgactaacgtcatagcacccatataactattgatacttgttaagtgtgcttataaatcaaattttattatttattaaattaaatgtttaattaatttttttttaaatatttaatttaatcaaatttaatttaatgttttgtttagcaagtgattcggcgtgcgccagtgttgcaaaatgtcaatgtgaccaattcgtccatgcacgcgctgcagctgctccacccgagcaacaacattgtgctgagccgtttgaacatttcggacaaccgcggcatcggtgtcaacattttggccacaacattacaggtaaagtgaattgaattcaatggcaaaacaagttcaattaaattgaataaaatttaaattggaaaaaattaaaaatccgtaaaatttgaaaaaaaatttaaataaaatttttgcaagttgtgttattttatttttaatttacgtttttagtttgaaaacacaaaaaatttttgtaccatcaatgtttcagggacaataaactcggcgtgaaaattttgaaaaaatttaactaaatttttttgtttttattttatttttttttaatttacgctttttaatgggtccaaatcggttggaaacacaatatatttcatcccatcaatttttcggtgacaataaaattgcgaaaataaagaaattataaagaagataatggatgatggataatttaatcggtgcttaagaagaaaaaaacaaaaaacaaaaattttcgaaaaaaaacataggtaaaatttttcgtttttacaaatttacgcttttaaacaattttttctgtgacaataaaatcggggggattaaattgtgagataatgtgaaacggtgaagaagataatggacaacgagttgtattgtattgacattgtataatttaaaccgaggctaaagttttcgtagatttttctgaggccggaggcaatgaacaactaacaacttaaccaattaaattttcaggaccaattaaatctgtgatcgaactataaaaaaatgttcattaaattttaaaaatccgaaaaatttaatataattttattttatgcatttcgcagtcgacaatcgactcaatgtcaagcagtacatctgcagctgcttcatctacaggccattcgtcccgtgtaccgtatggcccaatcacaataccgtaccatgtgccgggaatgcttaacatatgttcaatgagcaaacaagtgaaggtgagaaatggcgaacaataaaatataattcaggcacaaatcaaaaaaaaatttggaaggtttcgccataaaaatttgaaataatacgcggtttcaacaggcatccgccccattgtttataaaaaaaaaaactgaaaattttaagaaatttggaaattgtaaagattttttctacacttataaaattaacctaattttatcatattaaaattttatgctgccaacgaagaattagccctgattaaatccttgaaaaattatagagaaattataaaagttctttaaaaatttttttttttaatcattaattactttttcctattttcggatttctaaaacggataaaacgaattgaatcctgtgaattttaaatgaatttttgtggcattaattcttcgaagggcattttcattccaccggataatggaaacaattaaaaaaaaattttcaacttttacaatatatttaaataaaaataataattaatcgaataaatgcacaggtctcagggcgtgtcctactgtactacaagtacgattcgtatccagtggactgtgtgaaggtgttcagcagcagttggtccaggtccaccaccaccactggtggtggtgttcaacgtccgttgggcttccgtctgttgcaagcaaatttctaccaggggccggctggcgtgccgaggccggacgccttgcatatttatgcgggcacaaaatttttgtaattttttttatattaaatttattcatttaattcggcgccagagggttcgcaaaatttgtgaatagtataccaaatgaaaatgtgacaatgaccacaaattttacacgacaaataattgttttaattaaaagtagatttttaagagaaatatttacgtgtgtggctcagtggttttttgtaagataataaaaggaaaaagtaagtgaaaagagatggaggttcgagcccgctccacaacatttatatttttatttattttctaccaaaaaggaagtgaaaagagatggagcggttcgagcccgctccaccaacatttattgtattttatacaaaaaagattaaaaatgcttatttttggaaaaatatttgagtttttcaaaccaatatgactctcatcattactgtctggcaatgtttacatttatttttattagcatttaaattttttacaatttttaattaaatatttattaaacatatttttaaaattttttaaaatgtttttacatattaaagttcatccaatctgttacgcattttcaatgcttcatctgatttgtccggtagtgttgcaacccaaaacccatttctcggcatacatttgcgtgccaccgccgcagacggcgattacggtaatgccatagtcaattaacaaccaattatccgtctccctaattatgccacctgcaccaggttttttggccgaagttgcagttttgccaacagcatcgatcagcaccaagccggtggatgaaatttcgttgcgagtttcgcgtttattgaacaatgaccggggcgcattgcgatatggaaatattggcgaagtttgtgccaaactattaaaaattaatttcaaaaatttaattaattaataaattaatataaaatttttaaaattaattttacaaattaatttagttgtgatctttagaatattcaatgtgtttaaagaaaattttttataattgaaattgtttgttgatgttatattttgaggatttttcgtataatttttgaaatattaaaaaaaaaatttttatttttacaaatttcatataatatataaattatttttaaagagtttatgggtgtttcagagtttttttaatatatgaatttattgctaatagttttttttaataatcaattaaattaatttttttagatgggcccaaatgtgatcattgaacagtgtgtgatggacaaaaatggatatcatttgtatggcaacatttcaacatcacttcaagctgctgaactccatttgcacaacacaatggcactttattttggatttggattaataattaattaaatttaatatttattcataaaaatatttatctaaatttaaataaattatttttgaaacatagaacaacttttctttttcaattacattcatcttttgggtgctttactaattataaattgttttttttcggggttttttttggtgatttattttatgaatgaaaataaatcaatcattttgaattaaaaaaaataaattttaatttttttatattaattt

SEQ ID NO: 76725 - DNA, 771 bp, Heterodera glycines
gtggtctgccgtgagttagggtttggcccgcaaaatgcttacagttggcttacaccacaatgggactataatccacaactgcgcattctgaagacatacatggaaccacgagaatgccgaggttgagggagagcgtaaattaattaaataataattataaaaatattttaattttttgaaaaaatttgattcgaatcgagcaatttaatttatactaataaattattaatttaatctaatttttaaattattattattttttaaaattgattcgaatattttaatttataatgaaaaaatttaatttaattaaaattttaaaatatttaatttttcaagaattttgttcgagcgactaaatttttattgaacaaattcaaacttaattttatttattttaaaatattattttttgaaaaaaaatatggaataaatttcaaatttaatttttattttatatcaaaatcttgtcttcttctttaacaaaaaaaatttatattttcagcaaattattatttattttataattaaataatttcagttctaacatttataatttttccaactttcaaaaaaaaaatatgaaaaaatgttttaaacaaatttaaaaattaataaatgttttcacaattgtaggctttgaatgccgtttggagagctgtgcacttcgtctgactgccacattaagcgattggcaatgcatcaactccgagcagttcaattacgtgcactgcgggcctgaaggcaggcttttccggaaaaaaatttttt

SEQ ID NO: 76726 - DNA, 1265 bp, Heterodera glycines
atggccgacttcgaagggcgtgtcaaagcttaccgtttcgtggcttacacgacggtttctttctccatcatctcacttttgtcggtgtgcttgacactgccaatgctgaagagttacgtgtccaacgtgggcatgaaaatggactctgagctcagctcatgccaggcaaggaatccggcacaaagttcgaagtgctaaaagtgccattttcagcacaatgccaaagacatttggtccgaagtcagtcagctgaagggaatgcctctgctggtcgccggaaaccgtactgcgcgtagcgcatacggtagctgccaagagtgttgctccggcggtgcccaaggccaacccggccaacccggacagcctggacgacccggaaaccccggagcgcccggctcaccaggacagcccggacaaaccccgcagacgccttgcgagcaagtgcacccggtaaatgcgggttcaatctcgagttccaggaggtctagaacttgtattaatcattgcatgttcagcctccatgcaccccgtgccctggcggtcagcccggtaacaatggcccacctggacccccgggagcgccaggagcacccggccagcccggcaccggaggaggacagccgcaacccggagagcccggcccacctggacccaatggccagcccggacaacccggacagcccggagcgcctggacagcccggacaacccgcaagcccaccgccaacggagcccgctcctgcaggcccacctggtagaccaacattcgcttatttttcaacgaaatatgccttgtttcaggagaggctggtgcacctggacagcccggtcagcctggagcccctggacagcccggcgcggccggacagcccggcccgaagggacctcccggaggcccaggacagccaggcaatggcggagccccaggccagcccggccaacccggacagcctggaaaccccggagagcgcggaatctgtcccaaatactgtgccgtggacggcggagtgttcttcgaggacggcacacgaagacgttaagaaaagcgattctgatcagtggaagaagaaaaagcagaaaaacagcagcgattgccctcccctcccccggtgcccttctccgtccccatttcccactgcctttctttcccttcctttttttattttgtttagcttttccaattctcccaaattcccccccccctctgaatttcttttctttgtaatcgccgctatgccaagttgcaaaacatcagcaacaaataaa

SEQ ID NO: 76727 - DNA, 580 bp, Heterodera glycines
atgaactcacctaatttaaccgtttttaaaccaaatgatcaattgattaactccctaatcgctttcatgttacagaaaagccatggcctaatacaagcggagaatgagttggacattgtgaagcgcaagtgcgtgatcaacgaggactaccgacgccatgttgccattttggaggtgcacacgcgcgaggaggaaattgagcgtgagacggcaaaagcggtggcggagattaaaaagaaagtggccaacctgagcgagacgcggtgcccaactgttgttaccacggccattagctcaacttcgactgttagcgcggccattaacacaactccggaaattagcacaactccgaaagttgctacggccattaacacaaccccaattgtcgccatggccattaacacaactccggaaattagcacaactcagaaagttaccacggccattagcacaatcccggcaattagcacaactcagaaagttgccacggccattagcacaactccaactgttgccacggccattaacacaactccggcaattagcacgacttcgaaaattgccacgaccattagcacga

SEQ ID NO: 76728 - DNA, 1884 bp, Heterodera glycines
atggatcagcacgataacaacaacgatttgtctgatcaacatgatgaagtgaagcaaaatgatgatcatgaagatggtggtgatgccgaatgcgatcagcaaatggtggataattcggtggcactacacaatgctccatcgtcaccggtgaaaaagcatggaaaagcaaacggaaacggagcagtggcagtagcaaatgatgaggaagaagaagagcaaaaagtggtggtggtgcagcagcagcaacagcagcagattggcgaagatggccaacaaaatcggcatgttcatggcgatgatgacaatgatggtgttggtgatgatcagtcatttttgacaaatgtgttgagacggtctacgagaaagcgtacaaaaagggacaatggaagtagcaccaccacaatcattcattatgctgaccaaatggaggaggacgaagaggaggaaaacaatgaacaagacagtttggcagaccatcgggaagaagccgcttttgccgtgccattattgcctcgaaatgggccaaaaaaacgttcgtcgcccaaaaagatggcaaaaaagaggggacggccaacaaaattggaggcaattattcgaagcatggaattggcaatgaatgcgaatggggcacggaggaaaggaggaaaaacggtggcgatgaaaaaagggggacgaaaaatgaagacgaaggcgcaggaggaggatgaggaggaatggccaaggcggaagcggtcgtacacgcgaaggaagtcaaagggtaaatgatgagtcaattcaaatttgaaaaaataatatttgaacgatacggattccttggcgaatttgaaatttagaaattttaaagaaaaatttaaaaaaacttggatcccaattcaaataatctgaaaatgtactcacaaatctgaatagtcaaagaatggggctcatcgccggcacttttttttaaatttaatcatttttaaatacaaaatttcccttacttttcaagttgatcgggatgaggaggaggaaaaagatgatgaggacaaaaaggagagccaaagctgtagcaacagcattgtgccaccagcagaagaagtgctgccggtggaagtgaaagaggaggaaaagccaaacgacgaagcaatcgcaaacgacgaaattgaagtaatcatgaagggcatggaacggcacttccatcgcaaaaggggcaggccaaagaaaaaggcgttgttggcatcgccaacagcagcgactgttaatccacaacagcagcaacagcaaaagtgccaaccgcagcaacaaccccaacaacaccagcagcagcaacacgcaagtggagggccatcatcgagatacacaacggcacaccctgttactgccggtaaaggggggggggcttttccatgcattttgattgattaaagagggacacggtgcgcagtgcgtttttaactcaaactaaaaaatgacatttaaaaattctatcttcccataaaaatatgtatgaaattttgaatttatgagtggaaaaaatctatggacgggcgaatttcgcattttttgagttttggtttcgagttgttcaatgacctggcattcgttaatgaagcattgtgttgtgttgcagcatgctcctccacctttgtctgcttcatgtgcacagctgttgagaaggatttcgactcgttcggtcgtcatctccgttctcatcctgaacaatggaaacagtgcactgtttgtccacaaaacagcaacaataaaatggaggaggaccagcaacagatggaggaagaccaaaaacaacagcagcagcaggagaataagccgaaaaaacgacgcaatttcgaccaccccgtccatttcttgaaacatttgatcgaatttcacatgaattttcaacag

SEQ ID NO: 76729 - DNA, 364 bp, Heterodera glycines
atgtcggagtttgaaagtgaatgcagtggcactgccaaactgaaccagttgggcccggtcgaaatcagtgccgacactctgtacactacgctggttgtccatgctgttgaacaccacgatggtggtgcccaagaaatgccatcaaaaaacaaaaacaatgccaacaccgacggcaccaccattgacggagggggacaacgacgacaaattgttgatgaagaggaggagttgaaggaggaaccgatggacgtgcgacggggccaaacgcaaacaatggaagcagacgaagaaggaggacaatgttgcaacgaggctgaaaagagcggcggcaccgcttcatcccttgacaaaacatcggatggtg

SEQ ID NO: 76730 - DNA, 1391 bp, Heterodera glycines
atgcaaaaaccgataatcgtaaatataattgctctcgctaatctcggtaccggaattaaactaaactctctgacgatcaccgaatgcgaatttaagtataaccctagaaaattcaatgcctcggttatcaaatgtataagccccatcaaagccacggcattattatgggaatccgggaaaatgatatgtctggggacgaaaagtctgatagactgtgaaaatgcgataaaaattttcatagaaataattaagggctcggggtgtccgggggcttcttacaccggacacacgattgaaaatattgtttcgacctttaaattcggacatgaaattgaactgaacgaattcagaaaaaatcgtcgtgccttttatgaaccagaaatattttgcggtttaaatttcaagcggggtaaaagcatgacagcgttaattttctggaccggtaaagtcgtaattacgggaactaaaaacaattctgaaattgaggaaatgtatcatcatattctcccctatttgaaaatggctcaaaagaatttaatgagacgataaaaatttttatttattgagacggtcccgaaattcttgcagatgacctacttttgaaaaaaattttttttcaatcctaatttattattcatttttcaattttatatttaaattgaatttaaataattaattttactgtaaaattcattaatttgctgcaattattaattaaattagcacttctacaatccattatcgattaattggcgcggcggcggcatcgtggcgcggggagggagggcgtggaggaaatgcaaaaaaaaaacacactttggcaaattttcaaaatgagttttaatttcaggatcagaaaatcatataaaaatctcaggatttgagaaaataccccaaaaggtttgggatcaaaaaaaaggaattaattttttggaatcaaaggaatgcgcatccatcccttaggatttggttcttggcggtaaatgtccacggcggctacttcaaagggctgcgcccacgggctcgtgcgggaaacacccgcaacctttaggggtcatatactacttggggctataaaagtcaaactaaaatgctttttacaccttatcccggtaaaatcagagagtgaatgacattcttttaatctgaagaaattcggagaaaaaataatggacataaaatgagaaattcaatatgattttttaagaaactgaaattaacaaattgatcatcacttttatagctgcgttttcgaattcaaaaagattttctggacctttggataaaagaaattttatttaaaaaattttttgttcacttttcattttttgtttagcaaattttaccttttctcaaaattatttaattattttttctcactttctgagaca

SEQ ID NO: 76731 - DNA, 2935 bp, Heterodera glycines
atgtcaatttattccggtggactgttgaccgacgtgatcgctgctgatgacgggccaaatgcaactggtggccaagcgttggccaaatggttgcacattcggagaaaagatggacatcctaagcgattagcttgcagatgtgatgatgtgtctgcagcaaaagaatgggtcagcaatttcaagcaggtcgtcgcttcgggtgttatgtggtttcgtaaaaaataaatcattaaattgcttaaagcaactaaattgaatatccttggggtatccgggcccggcgatttttgggaaaatcggagttgaccgggttttgagaggctaggcccggaaaccggcattgaccggtttttaccgggttatgattagagctcgcaacaaggcacaaaaatcgcgaaaaagatttaattttttttattaaggctttttagggagcaaaacacgtaaaacttaaccaaaaaaattattttggtaatttatattatgaaatattttatagaatgtttttagaataaggaaaatgtttaaacctaaaatttttatcaagaaaaaataaaaatttttaaaattttatattcttaggggtgtatttttttcaaacgaaagttaacaaagcattaaatatcagttttaatggaaacgcaaacatttatgataagacaaatttttaaagccgtttatatttgtaatataggcaacaaaatccttgcttggcatggttttagaacatttgcggtcacagccaaaaacgacatttgcggctcaactttttcggccccaacaaaataaaaacttcagaaaattattttccatccaatttaaccggttttatgctctctaataagccgccgattcaagtcttctcgaaagaaaattcttaaccccacccaactagaagcaacgaagaggaggaaaagaatatcagcgaaacaagtcccaaaatgatgaagaaagaagtataaacattgctaggaaatctcaaatctctacagtttcaatggtcggtgcaagagttggtagactgactagcaactttcaatctctggtggggtttggacaaccccaatttttgaaaagaattactagattagttaaagttcggcgtaaattttaagaggaaaatgaattttcgataaattaacctattttgattggggtcgaaaaatttgggaagcaaatatcgtttttggaattaaaaaagtaattatttggcgttccgttgaccgcaaatgtccgatttccagcaggccgcaaatgtctggaccgcaaatgtcttatcacgcttggcattattcgttactccttaggtttctcttcatccataaaatttcaaaaaactacccaattcgaaaaaagttatggtcatacctaaaactcagatctaatttttgcaaatagtcatgattttatatagaataattctgcatggatatgagttgggcatagatttgtttgtgtttaggcatttctctgtgccacaaattgtgctcgctacacaattacattggacacgtcggcgccaattgagccatttgaattggtgaacgaacaaaccaaggagaagctgacactaaatcaagtgtgcgagaacgtatttttttttcgatggagaataaagcgacgctcaattattgggcggacggcggcagtccaacggaaagccaaaaattcgacaaacgatttgaacactgtcatcattgctttgcacggcacttatggcactaattgcattgggtaagaagcaagcggcatttgctattttttcaagtgttagtcgaattaaaatgcataaatttagtagagcacgaacaggtattcgagctggagttcggacagaaaaatcccgcgggtcgcgcattgtgtagaccgggatttaacccgggaaatcttatccgggccgggctatcccgcaaatccggggtttcaagcatccaaactcagtaatttaggtcattgtcgccaccgacagaaacgtgtcaaaacaatgaaaatggcatttgataacaatcacgtgcgccgattggttagcggagaaagaaacatgggaaatgattaatgatgatacggtcattttggattaaacatgggaattatctgggaatgattaatgatggatgatacgattattttggattactgtggatatgaaccgaagtgcttaaccaaagtctggcataagctttgtgtgttttatgcagtgttgccagatgtgatgatttatcatgattttgatgatttcaagggatcaatgatgattttatttttgagatgatgatttgctgatttgtgaatgtgatgattttcgagaaatttgatgatttatgctgcttttctctacatttatgagttcaaagcgcaaaattttcaaaatttgctaaaaatcatcaaaaatgctattttagccaatcgtcaccgccggcacccaaaattcatctaatttttgaaaattttacctataaattgccaattttcagtgaaaatctgtttaaaaatggtcaaaatttccaattttcccccggcggcgcctaaacttcgtagaaattaacaaaatttagcggccataagccaaattaggtatgctctatcaaaatataacagcacaaaattactgtttaatcagaacaaataaaaaaaattgtttttttgtgatttatgttgaatttcgaacgaaaatctgtcaaatcataaaaaatgacaaacaaaaaaataaattaaatcaaacccatcagtggttcaaaatgatcagtcatttctcaaatagctaattcacttcttttccggagacaaatgggtccatcattcattcagacgatcttttcaatgaagggaattttggaaaattcaaaaaaaaagcatagaaatcttgaatttaatatttttattttagctcagtagtttgaaaaaagcaaaagcctgggttccatgttggacctag

SEQ ID NO: 76732 - DNA, 507 bp, Heterodera glycines
tttggcaccaattaccaccgtttttccatgtgaacgaatttcatttccttttagaaaaggagttaccaggggtaaaatgtaattttcacccatccaccattcttgtggacttgtgattttggccaaattaaggtaaaggagttggttaagcataattcgacctggactgatttcggttaattgccgggcatagatggtttgagggcgaagcatttgcgcagaaatgacggtggctgatctgaaatccccacctctgtatcgttttaagttggttacaaaaccgggttgaaatgaaccaatgaccaattttatcacctccacctctatggcaacagcttgaacgttgatcctgccttgtactaaccacgagcgcaacgaatcgaccgggtttaagtcataggacaatctttcaaatccctccttccactcaaacttactgaccacaactgtgtctcccatttgaaggcgtctctcggcacttaccaaagtatcaggaattcccatgaa

SEQ ID NO: 76733 - DNA, 1668 bp, Heterodera glycines
tctgtcagagcacaggaaaatattacggtcaaagaagtactggacttagatgaacttgaggacattgctgagtttccaatttgtttaagcctatcaattgaccagcggttagtttttgatccattcgttaatacattaattcttagaggcaaagatggtaattcgtacaatattgatttaaagaaagagcaaagggccgaccctcaaatctctcaatttattaattttttacaaactggcaaattttcgaatgaaatagaccaacagaccatggaatctcttactgatcaagccaaaaacctcgttattgactcaggaattttgtattttaggtaccaggatcagtcaccacgaatttatataccaatctcattaagatctcttatttttgactcatttcactcttctcctcttggtggagggcacatggatttaaaaaagacattgaagaaatgtcgaaaatattattggcctttcctatattctgatattttaacatggtacaaacaatgtattacttgtcagctaagacattcaccgacgcctgcattcagggcagaaatgcaaatggtccccgccaatactttatttgccagagttggtttagatctagccggtccttttcctattactgaacgtggcaataaatacattttaaacatcatttgttggttctgtaaatatgtaatatccgttcccttacccgatgccaaatcgcatacaattgccaaagcttttcttagtaattgttatcttaagtttggtggttgcaccgaattagtgagtgacgatgcgacagcatttacttctgagttctttcgtgaattttgctcgttattatatattaataagaaatatgcagttccacattggtcgcaaggaaatgcggccacagagcgaacttttagaacatttaacaatattttgtcaaaatatgtcactaaagagcaaccagattttgatgaatttttagactatgccaatttttgttataatacatctgttcattccacgactcacgaaaccccatattttttaatgtttgggcgtgatccgattttctgtattgatcaaataatagatcctaggattagagaaccaattgcatttactgatgagacagaatttaaacagaaattagtaacctctcttcggagagcatggaagataaccgcagaattacatgctgaggcacaggagaaaatgaaaattcaatacgataagactatgagaactcctaatttaaagattggagacagggttttattaagaaattatgatggtaaacgtaatacatccaaaaaatttcattttccatggaagggtgcctttagaattatagaaattgagggaatatatgccacaatcactagctgtaattcgcctcaagcaaatccacggcgtgtccatataaatcagcttaagaagtgttatgaaaatttagggcccgcctgcacttcacctaggcttagtgcagaagagagaaatgctctcgcagagttagaagcggatgaaattcacaatttgccgggtcactcacatcctactgatataccaaaacattcttcttctcttgatcgtgaatctgatgatgaaatacccgctaatgagcccaatattgataataatgaggttgaaacatcactaacaccgccaaaatatggtcta

SEQ ID NO: 76734 - DNA, 3539 bp, Heterodera glycines
caacattcgtgctaatccaagcaattctaattctaatggtcaaaaaacgttcagcccatcgtcggaacgaaaacatggccgcctcgaacgcagctgttggtggtaaggaagtggcgtcagccacaccgattattgagtctttggaagtggcgtcagccacagagcaaattgaattgattgagacggagactattccgcaaaatttggagtcatttgaagtagcgtcagctacacagaaaggattgataatggaaacggcgtttgccgtcgagaaagtaattgaaaccgataagactcgtggtatttccgcaggtcttgaagaagaatttgaacgaggcatggaattgggagaaggtcagtacgtggaaagaaacacagaaaatattgaaatggaaactattcaagacttcactgcgactcaattctccaatgtctcgtggtcagagccatgtgccatcgcttcgcctgtgccaatgtctccaaatgaagaacatggcacggaaggcggtgttctgaaatatttggtgtgtcaaaccgacgtgaaaagtgtcgttggtgggaaattgagtggacaaggtccatttttcatgggaattcctgatactttggtaagtgccgagagacgccttcaaatgggagacacagttgtggtcagtaagtttgagtggaaggagggatttgaaagattgtcctatgacttaaacccggtcgattcgttgcgctcgtggttagtacaaggcaggatcaacgttcaagctgttgccatagaggtggaggtgataaaattggtcattggttcatttcaacccggttttgtaaccaacttaaaacgatacagaggtggggatttcagatcagccaccgtcatttctgcgcaaatgcttcgccctcaaaccatctatgcccggcaattaaccgaaatcagtccaggtcgaattatgcttaaccaactcctttaccttaatttggccaaaatcacaagtccacaagaatggtggatgggtgaaaattacattttacccctggtaactccttttctaaaaggaaatgaaattcgttcacatggaaaaacggtggtaattggtgccaaagaaagtctggactctttctgttttccctttaaccagttttcagtgcgattgatgggagctgcggccgctgtccaacgttcattcgaaatggagaaattggcgaagcaaactgtcaatgtccaactcgtctggcagagaccagaagtacgaccggatgaagcgcaaacgaatttgaaaaaggcacaacgcgtctctttcgaatggttgatcaacaacaaatcggcggttgccgatttccttgaggcatgggaggaggacacgccggtcgaagcaaaagttgcgcgtgactcaaaagcccaatgctgtgcagttggccgagtaattgaactgtcagtaaatgaaaccgctccgggtaactttctgatgaacgtgaaaatgtttttgagttacagggctaaaaagggctacgacaggggatgggaagattgggaatccattctcgatgaaagggaatctaatgtgattccaattcctaattacggaggtctccctttcagagaacaggcatttgaactttcagtcccgtcggatattgcagaagggcaatatcccgtctcaaaaattttaaaaatattgatgggaatgggcaaagacggagcggaacaacgaccaaccgttaggttgtcaagtaacgaaattgcggtcggtaagttgaacgaggaccagcgaatcactcacggattgtttttggacgacgagtcccgtgtaattttcatgcaggctccggcaggaacgggaaaaagtgtgtcagtagcggcctgcatcgcaagcgtgctcaaaaaggaccgtgacgctgcaattttggcagtttctcctttgaatgtcgcagtgtgtgagttggtgaaggacaccatggaaagtttgtcagaaaaggtggcaatgttggcacttttctctgggcaaggaaaagggcgttacatggacaggatcaggcccctgggggacaatcttttagttgaagctgtgcaaagggatggaaatgttccctccgctgaaggaaccgagccgaaaaaatggagtgataataaaacatttaagcaatacgtcgatgactttaacacagcaccaagacgggcacgcgaacgaacgacgactgccgcgcttctgaaacagaccaaataccgagtgtacttcatgacattggctcttgctgaggagttggcattggatttgggcaacgtaactaaacagcagttacgggtacacttaccgagtcaaatgacagttattcgtggtaagtttgggtttgagtcaattttggaagtgctggaaacagcaaaaggcatcgatcgcaccgttctctcaaagtgttaccgatcgcacagtgccattgtacggtgtttggacgcgggagtttactctccagcaggtgatcggttggtaccaggaagaccggatgttgaaatgtcatcgtttttaaattatatgggcccacgcattgtagccgaaaattgtccgatcattttaatccatcaaaaatcatcgactcaaatggaaagtatctcattttcctctcacaatccagagcaacgggaaacagctcttggatttttgggaataatccagggaacctttccaggcttaattcaagttgtgtgtttttaccaagcagagaggaaacacatggtaagtgaaatcgaacggagaaggtggccaaatgtcaaggtgagtacagtcgattcgattcaaagtcaggaagccgagcttgtccttgtcatcacgactcgctccgcggctggacgatcatcggaagctgacactggcaaggaattctgggcggattgcgcgagaacaaccgtggctctctcccgtcccaaatttggattggtcatcatcggagatttgtcgttgatttggcacaaagggaccgtgtggagacgtttcattgacgaaacattaaaaatgacggttgcggtaaccccggagtatttaaaccttatttccaatccgtttccgtcccgggtgggaaaatttattgcaaaaagggatggcacagttccgatggcatttgaattttatgccgaaagggacagtactttaagacacgatagtttggcgtatcagccaccaataaataatttcgtaaataatttttccccttccccatttttcacaggcggtttcaggccattcgcagctcaggcaaatgtgtttccaccgatcagttcgggtcatgctcaaccgccggctttctcacacggaatgatgatcattgacacctctgtgcgccctcctccaatcaacatgatcgctggtcacacaatgccaatgccttcaaattgccctggtccaagtacgcgaatggcgccgtatccgccacaatatttgccgtcatacgccgaagccgcccaacaagccccgtcaaactcgaacagcaaccgaagaatcgatgtgaagtgctatagatgcggaaaaatcggacacttttcaaaacgatgtcgcacctga

SEQ ID NO: 76735 - DNA, 890 bp, Heterodera glycines
atggtaaatttctcaaaaaatcatccctcaaattttttttcttaacaaaattatgtcactattcgtcattattttggacttttcgccattattttggcatttttttagcatttttattatttgtttttttttttttgaaaaaaatggtttgataaataaaaattccatttatccccccccccccgggtggggggggggggtaaatgcggacggggggattattttctaacccctcagaaaggggggataattggggacggcgggattaatggagacgggggggggataaaaagagaaaatacggtatgtagaatttttgattttatgactatgcattcatttaaatcaatatattttccacaaaaaaaaattccaaaatttaaataaacaattctttatttatactcaacaaaacattaacgaacagcatttaataacccgaaataaaaaaatgattatccaaaaaataaataaataaattattcatttaatatgtaattcattcaaccaaaagatttgtctattatgtaaaaaaattttaaactattcttttgtttaggaagctgcaatggagtaataaataaatttatttaccaaaactatttttaaatttaaattcaaactaattttaagggctttcccgaacacgagactcagcaggcggttgggccttcacccgtttctcgtcttagcggtggtggtggcacaccaatagcgactggcgaattgcgccaacgacaaattggcagtgccgaactgcagcagccaacaacggcacccgctattctcggattgaacacgaatgtgtaaaagaggaaaagaaattgaagaatgccattattatcgcatgtttattaaaattaatttttcattttatttatatttttgta

SEQ ID NO: 76736 - DNA, 1396 bp, Heterodera glycines
atgctttttcacccatcccgccaaagtattgcaccgatttttgtaaaagttacacgctctgtcaccagccgagttggtacagctgctggaagaaccgccacctgacgatgacttggtcgtagttgacgaggtacttgttgaagtcgacgtcgacgttgaggttgtagttgaagtgctgctgtccgatgacgtgcatgcattgcacattttggcacaattctttttcagccatgccgaaaattggccgcatctatttttgtaagcattgcaagctctgtccccagccgcgttggtacagctggtggacgctccagaaccactatcgccagacgatggtttggtcgtggttgatgatgaactgctggttgatgtacttgctgaagaagttgtactcggagtagttgatgtactggtagatgaagttgtactggatgtagacgatgtactggttgacgaagtcgtactcgatgtagttgaagtactagtcgacgaagttgtagtgggtgtggttgatgtactggttgaagaagtagtagtgggagtggtcgatgtactggttgatgaagtagtagtgggagtggtcgatgtactggttgaagaagtagtagtgggcgtggtcgatgtactagttgaagaagttgtagtgggtgtggttgaagtactggttgaagaagttgtagtgggagtggtcgatgtactggttgaagaagttgttgtcggggtagttgatgtactagtcgacgaagttgtagttggcgtagttgatgtagatgtgctggttgaagaagttgttgtgctcggtgtagttgatgtactggttgaagatgttgtagttggtgtggtcgatgtactggttgaactagttgtgctcgtacttgtactactagtcgatgttgtggttgtttcttcctgtccaaaaaccgcaacatcattcgatgcgctcaacagcaaaagaaggcacaccgtttgataaaacataattaggaattaaatattaatgattagaaaataattttaaaaattaaaaaaattttgaatgaatttgttggcgagttttgccattaaataatgcactaattttcggatagagaccgataattatgcactttatctaattaaaatttgttcacctttttgcagtttaaatccacgttcattcaaatggtggagaagagtttccgccgaatttcaattaagtcattgttaagctgtgctaacaaatgttaaaaaagttgaccaatttttttggtgcttaatttttttcaatgaaaattgaatttcataagagcaattgattatatatgagttataaaatttgactaggcgaaaaaagttaattacattttctcgaattgatgaatcgccaaatttttttctttcaaggattcttaataaa

SEQ ID NO: 76737 - DNA, 3239 bp, Heterodera glycines
  unsure (1)..(3239): unsure at all n locations
atggcatattcgcccgtcgttgacactcatccgtttgtgccttctcctccgcaacgctttttgggcgcgtcgttgggtggcggagttcaaccgccttccaagccatcaattgggcaccaatcccaagtcaagaacagtcgcgggaagccaccgccgccgccaactccaccgacggtcattaatcagcaaaaagaagtattttaacaattngggtggatggccgatttgaattttcccataatcagcaaagtccaccggtgccaaccgcggcgagttcggtagcatctccgcagcaaagacagtcggtgctaacagcggtgagttcggtggcgtctcctcctcctccaccacctcctccgcccccaccgccactgttccaatcaaagccaactctgccggacaattcatggccttccaccagcactgaatcaaaggcgtctttcgtcgatccgactaacaataaacgttccgaccttctgcaacaaatccaacaaggcaccaagctgaagaaagtgggcccaccatcaactgaacgaacgcccgtgccaacaaacgcaccgactttacgggacaacatgatggaacagattaagcaagggactaccctcaaacatgtgagtttgaaaatgttccctcataattgtatcaatttcttagtaccaaatggaatttacagatcgaccagtctgatgtggaaaacagtcgttgttctgctggaggcagtgcccaagaaattggtgtgctcacaggcgcattagccaaagcgttggaggaacaaagcaggcacgcaatgtactcgattgaaaattcggcattggcttcaccaacttcctccacttcgatgtcttcaacaactttctcgacttcggctcgttcacctgtgaagcttcaatttaagtcgttagacaaagcattgcctacaaatccgtgggaatcgggtaaatgatagaagaaatttggaaattaaaattttaactttatttgggacttgctttgtattactaacatagtcatatttattcagaattggatgctttcctcgagctttgtggtcagtccgctgttttctcgtggaacgaattcgaagactcgacatggtaattttttgtttccaacttttgttcgaatatgcatttttttagttctttcgacaaatggtcaaaaattggcgagggggcatttggagaagtctttaaaggacttctggaaaatgcattcatcgcattgaaggtttttttgttctttttttttgcactatttcaaatattttctaaggttattccattcgctgtcaacgaggagcagtgttcgaagctcgtcaatggagactacctgaaaccagcaaaattcatcttcaacgaactgttcatcaccaacgagcttacaaagctatccgaggacaccggcagtggctttgtcacgccatcattcacacaattgcgcatgagcaaaatcgtcagaggtatttttaatggagaggcacttaaaatttgttggctaatttgggtttgtggaatgttaatgttcacaatcaaaatgctctgattgtgaatgcaaaaacttctttccgtttaggatgtttcccgtgcaaattgctgaaggcctgggatgccttcaagaaggcaaagcccgaattgtcggagaacgaacggccagacatttatgccgatgaaggtctccatttcgttgtcattggcctttcctatgggggaaaagacctggaggcgtatgcggttagctttcaaaaaaaattgaaatgaaaagtttttttcgcagataaaaaatggccgcgaatgttactccatcttccatcaaatcgccttgtccctggcgatcgcggaagacgttctcgagttcgagcaccgggatctgcacgccgggaacattctcgtggagcagtgcccggccaacgaaaaaattcggtaagcagcacaagcaatacactgggaactaatattattgttaaagatacatgtaccgaggagaacgaatcgatgtcgtctcgaatggggtgcgcgcatcaataatagacttttctatttcgcgtatgaaaaaaagtaaactcttaaatttttctcaaagcgctttaattttttcattaatttgttttcccaaaaccagagggtgttctgttcttcgttgatctcagccaagacacgggccttttcgagcaaaatggtgtcagcaatggtggcgactaccaatacgacgtctacaggatgatgaaggcggcggtcaggtggagagaaacgaattttttttacataaagaatatttttagcgaagattgggcctcattctggccccaaacaaatatgtactggatgggttacgcggcaaagaagctctttaacaaccgcttcatcagggcgaagagaaaagaagcgattgaaaaactcttttcaaactttgaaaacaattttgaaacgattcatgattttattgtccatcctaattttttgtctgtatttactgaattcacttccgagtaaaatttttattactgctattttatttttgtcgtagttaaatattcatttgattgctatatattttttcaatttatattttttgcttttatggaccgcttttagacaaatattggttcaggaatgccaaagaacaaaaaatccgggagcaaatctcagaatacgggttattgttcagttgccataggctaaaccttgtcatgttgttgctctttcagctggcgatgctgatgacatcgacgcgatccttaaagactttgagttggagacgaacgaagctaacaaaaaggcggccaagaaaaggggaaagggtcggaatttagtcatttttttaaagtattgagttttatatttaggaggtgcaagtggtcaaagcacggaaaaacatgctgaaaatgaggccgatggtgcggtggaaaaagccgaagaggcccaggattggacggcggcgattaatgcactcaaaccgattgaccagcaatttacggaccacaagtacccccaaggacaggtataattttctgaaaaggaaaaatgccaaaaccgtacgctcagatttgcgagtatcgaagtgacaaagacgacagaacggcgatcaatcggatgaccagcgaagagaaaaaggctttggacagcagttacgaagagatttacaacgattttcgacgtgctgcagaatcgcacagacaaacgcgaaagtacgtgaagtcatggattaagcccgggatgaagctgatcgacatttggtag

SEQ ID NO: 76738 - DNA, 702 bp, Heterodera glycines
  unsure (1)..(702): unsure at all n locations
atggcattggcacattttgttttgattgatgattgtgatggtggtggtgggtgtcgaattctcatgtgatcagagatgatcatgctagtggaattctagagaaaaataaattttttctacgtaaaaatatttgtttttaatgaattttttctacgaaaaatattttttttaaggtgtggaacatgaggtggaacatgagttttgaaaatttgataaaattttaaaatttaaccgtcgcttcttctaaataactaggagacaaattttttaaaatttaggccgtacaatgcccgaccacgtggactggaaaagtgttaagccaacgcacagctccgtttcatttttctacattttattcaaattgtttaatcttggctctgcgcttgttcaactgtgcctgtacatattcaatttttttttaattaataatttgaattttttttttcaaaaattcaaaatttcagcattaattacttcatggtgcccgccaattacacctattggggctttgatgtgctggccgatttggttgccggtcgagactggtcaagatccaggctgttccccagggtcagattccattcatgcgcacacgagccaattagcgtaatttaaattgataaatttttccaggtgacattttgcgacttcaaaattcgtcaaccagcccaacaccttccngcacatcgctttcaccctcca

SEQ ID NO: 76739 - DNA, 2647 bp, Heterodera glycines
atgtcactttatctgctcgcccaattgtcgtacggaatcactttggtgttccaagcgcatgtcaactatttaatcagtcagtctggctttagcatttattaaaaaaggttaaaattttcagccgaccttgaatcagccatcaaatcatttgctcggtttccggaggaaaacaagcgagaaaaaactccgcgcaagtccacgggccgtaagcgtagacttgccgaacttgacggagtggtggaagcagtgatggcagtgccacggggcatggagcaggaggatatggaagaagaggacgacgaaggggcgaaacgccgacgcatttctgcgccacggaaggcatcaaaattggacttggcagatccggtcggtggaaggcaatttgttaacaatgcacttttaattcgttctccattttttagagtgcttatgtggaccagcaacttcctgctgctcgcgatgtgaacgaccagtcgatgctgatggatgagagcagccgcttggacgacatgttcatggaccagacggttcagccggcattgcccccgcccgattgggtagctgagccgaacgattcgctgccgtttggcgagtcggcggagggagttcgtcgtagcagtcagcagaaggtgtcgatgatgagcattttgatgggcgaggacactctgatggaggaagtgggcaagacagtcaccgtggcacccaatttaagcgcgttgcaaccgcctgttgaggttggcatttaccgactgcatttgaaaggcaatttcactccccgaactttgccatcgctttgctgttggcctaaattgcaaggcttattaatttaggttaataattgaattcttcaggatctcgaattggaattgcccatggaaatgacgcgtgatccgatctacaaaaaacggtccaccgatgaacagcagtccatcgatgtcgttgccgattctgacgatgtgcgtttgctttccatgccgaatccattccaactttgccgtttcagcgcctccaattggatgctctgcctgacattgaccaccagccaaagagtgcccatccgaagaaaaggaagcgccttttggtggacgaacagctccaattaggaaatgtgagatgagagggagcggcagaaaatgaagtgaaaatgcgcaatgcgtttcagcaagaaatgatcgaccgttttaacaattacggcgatttgttgcgcacccgtgacgacttgcacagggaaatcattcagcccgacaagcccaccctttcgcaactgctcgacccgcgtccctatcacatcaaaggtgtggctgtacttttactaaaatcaaaattcacattcatttagcattgaatcccgaacttttccctctgtttgacactgtccgcgctgaacaccgcgaacgaccgctgacctttgacgaagcgcaggccatgacattcgaagttggtccttttttgagttcatctccctcttcgtctgtcttagtctttcccacttgttaaaggatatgcaaaaacgtcgtttggaattcgatcttcagtcgtggcattccaacgacgaaccgacgccgctgcggcaacgcgtggaagagagttttggggacgcaggcggagagcagagacgcgaagaaacgcaagggaaagagaaagtgtcggtgagcgatgcattggtcgaaacggcggacaaagaaaaagagggggtaagtgagcaaaagcaaagaagaatggaccatcgaattgaccgtttttgaaactgcctaattccattgaacttctacagaccgcagaattggcagcacatcgtccgtcgtctgtgctggaaggggaggcaatgcgccgtgacacgacgggggaagggaaccgacgaatcaccggtcaaacgattagacttaatgcccaatttactaattggataccattttttagattattcatttggacagcttgggaatgagtttattatggccgatttggaccgaactcagccgcctccgatggacgaaatagtggcggacacggaacttatgcaggagtcggtggtgacgaaggaacactcttcgatgggaccattggacgaacagtcggtggacgacaacaccagagatttgtacaggtgggagagaatgctgtcaacgaaattgaaaacaacccccccccctcccaaaatattccactgacaatgaatcaaccaattcaattcacaaccatattttaacccaggatttcttctttaaatccttataagttagagaaaataatttaaaatttcttattaaaaaaatcagaaaaaacgtggttgtaatcccgacgatgcttcgttaagccgtctcaaccgtggtggtgttgcgtcgtttgaagagctgctcaaaagcgaatcatttggagagactaagagacttccgattactcgtgcggttgtcgcccggaaattcttcgcacttttgagtgagtgtcttcatttgaggatatatattagttttatgatccgaattaaaaaatactaattgaaatttaattttgcatgttttcagatttgctcaaacatcgcatggtcaaagtgcgtcagcgtaaaccttacggagaaattctgatccgagcgcgcaatttggagaacgacggagaacagccgagttttaccgagcatttgcagtga

SEQ ID NO: 76740 - DNA, 642 bp, Heterodera glycines
atgccgaaaattatttctgacttttttctacaacaggctttgttcgtcgccgctttttcggttgcttcggcagaacaaacagtcactccggggcggcacgacgactcgctgggccacagatgcaattattcggggcccggccactgtccctcgggtgacccaaagggacaaaatgccaaattattttgccttttccgatcaccatcccctgaccaatcatcagtcattgctcttccattttcccagggttcgcctgtgtcaacaccaaatgcgttcgtcgctgcttcttcagtggcaattgccccgagggcttcttctgcaaaagcaatttcatttgcgtgcgaaaggaatgcgccgcgggggacaccgaatgttgcgcgaattgtgccgaggcaatgccaagcgaacagagaagaagcggtgaatgatgcccttgtgtttcagatatgcatcgatcactcggagtgtccctccgatgggtggggctgtgtgctgctcaaatgccgaagagtcggtcagtgtgccaactttctatggcttttggtcaacggttgttttgatgctccccccccccttcggcttcagaatgccgtgcccgccccgattgtccctccaattggccatgtctggtccggtttctaa

SEQ ID NO: 76741 - DNA, 495 bp, Heterodera glycines
atgtattattatgactccatcggctcattcgtttcctttcttttcagaatcgcccatttgttcacttatggcgccagtgagtcgcgctgcgtttcccacccaatttttgtgctccttcccccccccttttcagaatattattcctatttggtcgctcgggcgggcgcttctctgatttatgagcgacttttcgccgacgatcccctttcgggacgcaatggtctcaaatgggcaaaggttggtgccgacagaggaaaatgccaaaaataatagtgaatgacattggcaaaattttaattgaagtttcacggtgtaaaatatgtcgttaatgcgttttctttccccaatgattttcaggtgcaatcccacggcggtgagcacccgtccgatgtgctgatggccatggcattggactcgccggaagggaaggcgccgaccgccgccgaattggtcgccgcattggacaggcactcgtcggcggagaatgccatgtga

SEQ ID NO: 76742 - DNA, 736 bp, Heterodera glycines
atgcgtttctccgctcctcgtcaagtgctcaaatatttctataaacggacaaacgcattttgggacaaatcgatgctccacaaggagcgagtcgcatatggaaagctccggctgaagctgtacggcgcgttggtgctttccatgtggtatatgtagtaagtgccggtgaatgttttttgggcggattcgctatgaagccgattcgccacttaattgtgacagaattatgcaattccaattttgctgcctttttgtggtacccctggggccagttttggtgccccaatttccacttttctccgctatttttctgtcagtgaattcgccactcctccgcccgacgtgcgctttgacatacggtggttcttcagcagctcatttgccaattatgtgcagacaaagggtgccggtggcttggacattgcggatgagtgagtgaaaatgacaagttaccgtaggaaatggcatggccaacaaaggcacgggcttactgtaccgaacaaaacactaaaatttaatcccctttcaggaccatgtacaaacagttctcattttcgaagggcagattgttggagaatgcgctcgaaacgccggagggacaagcgatgggattgtccgaaaggtttcactcatgagagggacaagcaacgaagaagaagaggaggaggaggaaaagcgacgatcacagaagaatggcactttaaaagcaaaccgagaacagtcacacattctatag

SEQ ID NO: 76743 - DNA, 1096 bp, Heterodera glycines
atgagctccaacaatgcgttgactgaaatgatgcggcgtgagaagaaaaagttgctgggaaacgtcgacgtgcaggacccactggcctttgtcattccagcaacgttacgcgaaaaacgtggcgaagacatcgtcttgtatgacagtcgaaatgttaggcatggcgaaattctttgtgactttgaaaaagccgaaatggcggccgtccgcgcggttttccccacggcactgattaagtgctgcatgttccactacgggcaaagcctgtacaggaacttcaaacgacttggtctcgtgcatttgtacggcgagaagacagaatatggtgaggcagttcgcaacacattcaggtaaaaaattaaatttagatttaaatcataattttttccagaagggttctctctttgccgcttttgcctcccgacattatcagaagagctttctcaattaggcgtcttctcctcctggaatgccagtgttcttcctttacttctctcgaacaaacatcggcttgacacagcgccagttgttggatggtgttaacgcatttggagataatccactcaatttttcacccattggcaatcattgtttgtttaaatttatgcattttatttccaaaaatttaatttttagctgcactcgggacaacaatttcgaccatcaattcggaacacagctatgcggctacaccaatacagttcggcatcggctcaccggcaccatcaactcttacgtggccaaccactgtgagtccacgggagcagcttgttcaatattcgttgagcccgctaccgactttgacagctccttcaggcagaatctttaatcaatcatccgtttaaatttaataaaaaattcagttccagcgtgggaggacgaaatcgttcgtgcgccacattttccaattccgctttggaacatgcactcacaggcaacatctgccatcgctcgtacaaacaacggactggaggcaactcatcttcattttatggtctttaagctgaccttcccctcttctccgtatatgataagaaatttatgttcatttttaattcaacttataaattcgaatccttattttcaaatgttatga

SEQ ID NO: 76744 - DNA, 244 bp, Heterodera glycines
atggaaaatcgcaacttccagtgcccctctaaattttccattgattatattctgtccattcctgctaaaaagccacgtcatggtgttcaagctggagcaggaccatcatcggctaaacccgcgaaggattacgtcaaaaaattggaaaacagtttggaacatgtgccacgcttccaatacgtcaaggccaaatcgaagttcagcatcgaggacgtcccagcgaatcccgaaggattgcttgccg

SEQ ID NO: 76745 - DNA, 829 bp, Heterodera glycines
atgcccaaaatgaacaagcggttgccacatgagcttatttgggaaattgtcgctgcaattccgataatgtaccttttcggaggagtttcaaagaagccaggtaatttttcaaaagtattattaaacaatgtaaaattaaaggagctacgcgtccgccatccggcatcaccgttgtcaaccgggcgttcgagatttttcgtgccaagcggcatttttacttcttaaaaatagttggtaatatttaaaataacaataaatctgaatttttagatcgatcttgctcaaaatttcgagaggctctgtgcactgaggaagttaccgtgcggagaattgttcatccaatttggattcatacaatttggtttcgaaaatgaactggaggacgccaagtgtttcgccgactttttggtgtatctatattatggacgatctggccctaccgttacgacgagagtcgtgacttactcgacggtaagaaaaaatataataataatattaatattatttagccgattaaaattggagagctattcggcgcaattctgacgcatgtattgggaagcgcgaatccgctgaccatgaagaagcggactgcaggcggttacctgttgcgccaacattttccgcggcttctccatctctcggcaacagaaatggcatcagatggcattggtcaactggtccgctccgatgggatggaaatgtaccggctgatgaatctgcaccacaaaggagatgttggttatttgattattattgcaacatctcaacaccccggctcgtactattttaatttttcaatcgaataagtgttttttttttgtaatga

SEQ ID NO: 76746 - DNA, 1688 bp, Heterodera glycines
atggcgttggaaattgagcggagacggaacagagaaatgaccactggcgcaacacaaactgatcacctcgtcggctcaacggtgttgtgagatttgcttatgacatgcacctgttgtggtgattgaatttggcccactgcttctgctcattcaatttcaaccaatgccgaaccccggaattttttatttttcccttgaaaaatgtttttaaaaattctcaaaatttgaaattttcagaaaaaaatgccatttcgacagggaatgatgctcgaatgccgaggggttcattcaattcccctgcccgtttgtctaaaaaaaattcaagaaaatatatttgaaaactgctagattctccccgtattgtttcccccgaattttttaaataaaatttcaagaaaacaattttcaggtgattttttaaggaaaatttttgaaaaaaaatggttggaaattccaagaaaaaaaatttttcttggaattttctttgaaaacctatggagtactgataagcggggggggggggatgggagaaaccagtgcacttgtttgtcacttcctgttggatttaccaaataatttaggaataattgtccgccccccctccccctcccatttttctaagaaattttaagaaaacattttagaaatcttccaaaattttttataaattttattaaaattattgccccgcaattttgcacatttaaccagcagcgcaatgagtcggatgaagccgaattggacgcgcaactgaagcgggcggcgcttgcacacgccgaacatttggagcgagtgatcaggacacagaagcaaatccacgacatggagactcagcagattgtgcaggtggtggtggtgaaggagtagtgcgaaaaagtgttgcaaattttggtctcaaaaattttcggaaaaagtgccaaaatttttgtgcaacatttttctaatatgcgctatggaaataaattttaaaatattttttcaattcctcaaaaatttatttaaaaaaaaaaaattagtgaacatgtgcgcgtggttttggcgagtatgaaaaaattttcaagaaaaaatgtgcatgttttttgaaaatttcgcacaattttcctaacaattttctttaaatttttcaaaaaatttccgccgcttcgcttatcaacaccgtcagaacccttcaaaatctggcacccaaatagcaaaaattttataatttgtggcgaaaaacgaccaaaaattctgttgtttttttctcctcgacactgaaaatttctgaaaaataatacgggagaaaaaatttttgtccgatgattaaaaaaaaatattttcgggttcttcccaccaatattttttttttggttacgggcctgccatggtaatagaaaatcaatcgatgaaaaatgaaaatttaattttcttcgttcgtttgattatgggcttttttttaccaatttattttttctagtgactaattacaattggaaatgaatgcaaatcgtataaaataattattttagatttttttatatggattttgtcaaacatttttataccaatttgaatttcacatttctttttttccgttcaatttacaggagacaattgccattgagcgggacaaatttggcaaacaaattgataatggactcgtaaagttggcggccattgaagaaatgctgaaaagtcgcgcaacaaaa

SEQ ID NO: 76747 - DNA, 530 bp, Heterodera glycines
atgagtgctcactcacatgttaaggagcgcctctttcccgcggctacccagccggcacccgccattgtacagccggctgccgccgccgttgtccctccggcatccgttgttgttctaccggctgccgccgaagccccaccggcagacgtggagattgagctggacattgacggcgaacaattgacaaacttcccggcacaacaacacccgcaacaattgttcccggcacaacaacaacaaccgcagcaattgttcccggcacaacatcaacaacaactgctgctgccacctcggccgatgatttcgcagattgtcgacaatgccgttagtgtgctccaaatgcattttcacaacatgtctcctctgcggcccgcttttccaccatttttcatcaactcgccgtttcctcggcttcagggcgccttggaactcccttctcttcaattcggtcagcagcacgcatttgcgccccctccggcaccggcactccaaattgtcccgttcgatgatgccccgacgcctcaaccgtt

SEQ ID NO: 76748 - DNA, 1128 bp, Heterodera glycines
atggtcgaagttcgtcgtcaccgcaaacgctcgcccaacggcaaaacgaagcgaatgccgaaacaggaaagtgccaacaacaccaggacggcaccgcggcatcatcgtcctcaacttcctcctccaattttgccacctcctccgccaaccagcagcagagacaatcaccggcggacgcggcgctaagtgaggaaaattcgaatttggggagggaaaattggcaaaaagtgccaaaaaggaaggaatactgtaacaaagaaaattgctgatcggataatttttcagctgagaaaaggcgaaaagtgagcgaccaagggcctcattcggcatccgttggccgtgccccgtcgataaatgtgccgaaaaacaatgccatcgcctgcggcgatggcacttccgttgcgtcacccctcggcccgtttggcgatttgctaaaaaatgcgttgcgtttcaacatcaaagtgaacaacggcgaaggtggacgaaacgaaatggctgttttccaaaaaatgattttggaaattaaaaattttaaattcccaaattaattaccgaattttgttaattttgaaaaattcgccgagggcatttccttcaaattgttttcgaacccaatcataaatttctcaaatttaattcggtttcgggtttattatccccgcggtcttttagaatcaaaaaatgccactgatggcaattcgtccgctggcaatttgcctccggcgacaacagccactttttcgggcaacgatccctcgtccatggtggtgtcgatggaaattaatggggtacagtaccagggcgtactgttcgccatgcctacggcggaaagtgaaacggcggaagtgctgacggaacgccaaaacagaggcaacaaaaattgaacccattcactattatttattgtttcctcttcagtctgatactgtatttcatttcatcagaccgtaatccgattgttgcctcattagcgtaaaacacaatatgaaacattcaattcattttttgttgaaatttattaggcacagattacggtaacgatttttgaaaattaaattgtgaatcatgaagatagctttatccgttttttattattatatgatgcattaattcatttatgccaataaa

SEQ ID NO: 76749 - DNA, 790 bp, Heterodera glycines
atggccaagcaggtgttggacctgtacgagctgtacaggctggtggtgcaccacggcggactggtggaggtgatcaacaagaaattgtggcgcgaaattgccaaagggctcaatttgccaacttcgatcacttcggccgcgttcactctcagaacacagtgagaaatgaatgaatgaaaatggcaatttgttttgctaatgtatttttgatcggatgctccttgaggctgattagaaaagcggacataatccgaacacatttgctgatcaaagaaccggcgcgctagctttttaatgggccttattctcagggccactaattacccttttaggttttaccacttttgcgccgattttcgaattgggcgcatttatttttgacttttttttaaccctttctggttcagttaattttgacttgcaaaattgctgtctgaacctttctttttttggctttgtgatcaccactaatcagaccaaaaggaaacggtcccatatttctgatcactttgcctagcaaaataaacaaaatcatgtttttgttgcttttttcagatatgacaaatatttgtacgactacgaatgcaaaatacacaaattcagcgaccgtgcagcattggaagcagcgattgatgcaaacaaacgcgagggcaggcgcaacccgccgccgccgggcgccgccggcgtaacttcgaactccgcgggcgcaacgcccgcgggggcacagcaccacaacggcagcaacaaccacaacaacaacagccatcaccagcacaattattcggggtaa

SEQ ID NO: 76750 - DNA, 968 bp, Heterodera glycines
atggcaatcgaagcgtacgaaacggcgatgagacgagcgccaaaggaccaccaactggcggagaagatcggaaatgcatatgtgaagtgccatttgtacaacaaggtgggatggggaggaggctgatctgatcagtacagagcagagttgtcgcgggacgagaaaaagagtcaggattcgggtcggtacagctaaaacctttcgggtcgggattcgggacgagaaacgggactcgggtcgggacggcattcgggacgagattcaggtcgggatagccaaaatcagtgccgttaagccgactcgctccccaattaattgcttttcctttaaaagcattccttcccgcccccccccaaaaaaaaatcggcgccatttcttcaggcaatcactttctatgaagcggcggtgaaaagcggtcgccacaatttgcgcattcgttttgcggagcaactgttccagctgggcaaccttgagaagtgcaaaaaagtgctgaaggaaatgttggaggaacagggcgaaccgatgggtagcaaaaaaagcaattcaaattttggcgttagttttggcaaaatgaaaaactcaaaaaacaaagaaattgcaccgatgcgcgaacacgttgcctatctgatgctgatgtcacgactgcacattgaacagaacgatttggagcagtcctgcaaggatttgcaacgggcgcgacaattgcaactgaaagtaatcgcccgaggcactgtcgctagcaccagagatggcattgttaacatggcggaggagaagcagctggcagcaaagttggcacacagccgggggcacattacggctgaccgttatcccccaaaaatgccattgcagcatttgtcaacagattgccgaaatgcatgccaacaagcgggactggaacaagtcaattgaactgttcaaagaggcgattggacataatgaaaaggacgtgaaagtgcgtggcgaaa

SEQ ID NO: 76751 - DNA, 1118 bp, Heterodera glycines
  unsure (1)..(1118): unsure at all n locations
atgatcgagatctgcttgaatcccgacaacgagataatgggagcggatttgggggagcagcagcaacagctgagccctgaggagtgagtgggcattaggaaaatagagttggtcgagaattggcaattctcgatttaagcgagttgagaatatggtaattttcggcacaactcagtctaggagcggtattttcccgttcaagatcgagaatttgcacttttcgagtcagaaatgtaaagagaagagacagttagtttccgagtcaagacgatcgagatttggctgttttcgagtcaatacagtcgagaattggcattttttcgagttaattcgtcgagaattggcagttcttgagtcaagataatcgagaattggcatttttcgacttagcattaatgattaaaataagacgtataatcagcgattttaagcgcacatgaagcaaacgagtcgtacaaagctgccgaccgtttcttcnaagtttgcgcattttgataattaccaaaataaaaatgatggacccactaaaaattggaaggaattgcgtcacaaatcgatgatggaccgacgctacaaactcacgcagaatttcattcttttggccaaccccaacaaagcgaacacgcaaaaagcattggccaatttcacggagctttgccggacggaagggatgacggtgggtggaaaaatggggaaaatggacatttggccaacatttgttgtcggaatgtcgaatttcgattggcggtttccgacattttatgctcggaattcctatttccgaaatattttcagctgttggaatgccgattgttgaaattttttgagggcatcggcgtcgtacatccctagtgcaaatctcattttttggtaaatgctctgaggattatccattttttgaggaggatgatgccaatctcagcgcgggcgcaattcttggcacggcgcgggcacttttaatggctcaaacagacgccaaaggcaaaggcgcagctcaagagaatggttggggcatgcgtggaatttggaggaggcggaatatttgcagcaatgtaaaaatttgggaaaatgaaaaagggatggtgaagcgacgagactcgagaccaagactttggtga

SEQ ID NO: 76752 - DNA, 593 bp, Heterodera glycines
aatgacagcacgacggcgtcagcgaaagcaacacagactgatgcgcatgcgttgttggttggacatggcgcgacgagtgccggcagcagtgggctgagtctgatcagccaagaggaggtgcccgatcaaaactattaaccgaaaaaataaacagattaagcacaggaaaaaggcagaaattagggattactaaatttattagtttaaattggattgaatattttcatttttgaatcatttggtcattggattttttgaagagtgatcaaggctttatcttcaaaatactgatcaattgttgatcggctatccaataattcattgagtattttcaaaatacctgatcaacgccgatcatcatttattattttcaaaatgcctgatcaatgctgatctgccctccaataattcattaatcttttttaaaataatatttcgattttcagaccctttctctgctggcgatcattgaggacgctcttgacgagaccattgaccgccagtcgcgcatcaagaccaacgagttcattgcctcaacagcaagaaaacaggcaaacaatcaatcaatcaccaatcaaattagggcattttaa

SEQ ID NO: 76753 - DNA, 2560 bp, Heterodera glycines
attgttgccaaagaagcggagcagaatgacgacgaccaaccttcgcccatcacggtcggttgttctcattgaaattgggtaatccgtccgaccccatatgaatgcgttattaacaatcgtttatgagaaaaaaaattgtccacattttgctctccattggattgattttttccgttgttcgatttgccctcttccaacccgcgaaaggggaggagagacccacccattcaccatctctgctgctatagccaccatttacccaaaccaaagctaaaattattcccattttcgtatatttgttaccctgaagccatggactgtcccaaaaaagttaaacttccccctgaactcctttcggagttggccaattgccttcattacaattttcgctggtatggcatccgaatttctttgtcctttgaccattttctcgccaaaaatcaaaataaaattcgtcacaataaaattaaggtaatgagttggtcctctgcattaaataattggaaatgagaacaaggaaagcccattacagagctaattagacattgggtactattttttaacttaagcattttctcttgggtcctttttcaaatccgtttatgttttttccaatgcctttattaattaattacaattatactcccaattaattgctcttgcagaaagctgatgaagaaattcgagttcttgaaaaagttattgccgatgcgcaaaaagttattgccgatgcgactgctcgtctcgaatattggaaggagcaccgttctaccatggtctcctttttttacatttttcatttctatccaagtgactaatttattccaaacacagcatacgatgactatgccggtcttgccgcagcaaagcgaaagtacgagtcaacagcccgtcagttcggtactgtaacttcaaaaattgtaaaatttaatgttttttttttgaaaaattttcaaagttgcaaaaatttttttttttgcttggcggggaaaccatgcggggaactgagcccgggggggggggaatagctgctcccgattttacattggcccttggtcagttcagagccgcctactttggctttcttttcttatttttttgtcaaaattttaggtaattttgtagtttgtccccccccccccttttttgaaaatttttttttgccttaaaaacatgtttcatcaattaaattcatataacaaatttttatttagccgcccattgatcctccgattttggagaaagaagaaaacggaggggagccagccgcaaaaagaacgaaagaataagaagaatgaaggaacaaaagggaaagaaaagggcacggcaaaatttgacagaaaatccattgccataatgtttttttggattgtttaaataaagcgtaaattaaatgattttaaaataaaatttgttgatgtaattttctcgcattttcttgagtctgaagtataacaccaggcaaggcattccgagctccaaaaattttcaaaattctgaatttcgtgccatccctggtatgcaccagccatttggtccagtggtagggaaagggacaaatgggcgaaagtttccttttattttgggtacaataattggagaaagaaatggattcatttgccataacttttttctgagtgcaaattgacaaggaataattattgcataattggcgactctttgtggaaaatgcgcaagtgatacggtatttccaaaatgtaagtatactgtagttggtataccgtaggtagttttgtttcctctccatccaagtcacacaaaaattcagatcaccaaaactgactgcccatccctattttgtaccgtataccattttttccattagcaccatacataattttatcattttttgcactgcctttgcaccgagcgaaccggaggaaattcaaattcagagcgtgaatttctgaatatctggcaatcatgtcgatcattggtccgaaaatttttttctgtaaattctaataacatgtttataggggtgttttgaggcgctgagcacgaacccggcctccatttcgaccattcagaaaaaaattaagaaaaaatttcgagacaaatgatcgacatgattgccaaactcttttccatatgccgtaattgtgccgttaatttcggcgggtgcgaatttaacttcggggaccttttttccaatttttctgcgttcgacaccctttcctctcacgttcaatgaattctgctgaaggattcgtttcaaattctcgactattcccgagtccgtccttatctgatcaatgatcagttggtctctgtttgggactcaattggctgtccctcttacccccaagtggcacttttgatcagatcattgatacttaattgcaatttgttcattttccagttggacttgcgcatgccgatgctgcactttctgcacaatgcggtgcccgccctgtttctgctcgtccgacttgcgctgtcgcccgaccggcgtccgctggtgccgcgactgctctgtgccattgtgcgcgcaccgctccgctcgctgctgtggcggcccgtcgcagcacaactgttg

SEQ ID NO: 76754 - DNA, 423 bp, Heterodera glycines
atggcccaaaaacctaatttaaatttatttttctccgagcaccagccgcccgctatttgtgaagccgcacaaacactgcgggatgccttcatcaagtggctgttgtgccagcggcttaaaatgtgcgcagtgaaaatgtttatgcgattagaagacgacgagattgatgccaggccgctgcaaccgcctcaaaatggtgcccaggggcagctgctattgtcttcaacagctggggatttaactcaatacaagaccttgttaaggttggtttatttatttatttatcgagcaaaccaaaggcacattagtgcttttacatggtgccaaaagtaagacaaagaaataaaattgatcaaattaaaaatacaaaatgatgtaataaatgtgaaataaaagtaaatcaaatgctaaattctcaggtga

SEQ ID NO: 76755 - DNA, 401 bp, Heterodera glycines
atgaaactgttcgatgaaaaggagatgcgctcattaagttcgactcaacactacatgaaggtcctgcgaagcttcatttcctttctggagacaacgttcggaagaaaccaaactgatctcaaccacgttgggccgctgctcagcggaatgaccataattaagtatcgaattcgtggcattaaaagccgtgcaatagcagaaagggagcaggcaaggcgtacatcgacaaaacaacagacaaaccctcagcacataccatcatacgggactgttatggcgctgatcaaccacccccagattaatgcggcacacaccaacttcagaaacaaatacattcatggggcctctgctgctgaaactgatgatgaatggccgacttacgaagaatttaaattcataag

SEQ ID NO: 76756 - DNA, 1184 bp, Heterodera glycines
atgaacgctgaagacaacaataacccaagcccaacggacccagaacacgacattagcaacaatgatgatggcacagcttcggtcgtggacaaacacgacttgatttggcggaccaaagagctgttcgaatacatcagcaagcgggccgctgctggccgcctgacgaccgccagtcgtcaaggaaaagtcacattgggacgggaattcttcgaggaggaactcgaaaatattgataaaggtcggtactatgggtacatttacagagggtacccctataaatgtactgttagtattagttgatattgagttagggtacccctataaatgtactgttagtattagttgatattgagttttactagcatacctattcagaatgccatggaatctacttgaacaagacagcggccgaggctgccaaggactggaacggtaacatgaaacatcgacacgctgccagttgggccactgccatgcgcggcactttttcaattggagcgcacgaagaaaatgcaacatcggaccaccgagttgcaatgcgcgagctgacaaaacgacgggccgctgcagcgacggagaaaatggaaattgaagcaaaatcagcggcgatcaaatcacagctttccattgaaaacgcaaaactcgggctgttgctgaagaagcaacggttggccaaagggcacggcacgtatcacaaagatgtgatcaagtatctggcatcgaccgctaccacctcaaaacggtaaacggtgatgagaaattatacatttatgagcggtcgcccataaatgtatgattgttaattgctgctaattaaataatgattatcgtgagttaatagactcaacgactgtccataactgtaggatattaagtgctcaattaaataatgattgtcatgagttaataggctcaacgactgcgacgatggcaacgaggacggcaacaacgtcacattggcacgcctttttcgagtcaatgccaaagtggtggctaaagacaaattgaagcaaaccaagctgcagaagttccttcgtccgcacaacattgcagaaaaatactcctccggcctcggcaaaaagaaggcaagtttttaaatgagtattccattcaaaacgtacaagtcaactcgtacactgttgtacaaacgcaattcgtagaaaaatcaactcaaattttacaaa

SEQ ID NO: 76757 - DNA, 309 bp, Heterodera glycines
atgagagaattggagcaatctggcaattgtggtgtactagtaaaattaaaaattactggtagatttctttggcagatgccggacgtacgggctgaggaatgtctggaagagatatccgacaacgacgacagccatgtcagggacgaggcttctcggcatctgccaaaaccgtcactaccgtcagcgtcagccgtttttaggcgtagctttgttgatggtggaaacgagaattctgaggagttcggaatttttaaacgtggatttttgggtgaaggagacgagaattctgaagtcattttcattgattga

SEQ ID NO: 76758 - DNA, 864 bp, Heterodera glycines
atgcttaatttaaatgaaaggcggtacaattgcggatcggcaattgcggactggacaattgcggacgacagttgcggaccgtacttttgcggacgacagttgcggaccgtacttttgcggactggacaattgcggaccgtacttttgcggacgacagttgcggaccgtacttttgcggacgacagttgcggaccgtacttttgcggtcgacaattgcggaccgtacttctgctgaaaaaattaactggaagggtgggcctcgtcagtacgaccccttccgtattgcaaattcaaaaacctaagtgtgtttcggcccttacatagacagaccaaataagaaagctcacagcaataaataaataactgacaatttgaaagcataaataaggagcagaaaagcaaagcataggattataaaatctataattatgtttattttattggcttgctgaaggcccaacaacagcttctacgaatacaacttattaacacaaaaataactcaagactttttccattcatcaaaccatacataagcaatatcgacattgcttttcgtgatcgtccaatttttctatccccaccatctttggctaaattacttatttaaattatattattgcaaattttctcactgtaaaagcggctccgtccggttatgtcttcaatcattgaaaaaaaatttgaataattgaagtctggattctagcaaaaattaaagccaaataagttgaaaatctgttttaagaactcttctggccataacttttttgaaccttaatgaaaaattttcaaaactttgcaggctaatagtgtatacttagggctttcgaatgataccaagattgttggatttcgttgacaa

SEQ ID NO: 76759 - DNA, 1876 bp, Heterodera glycines
atgccaccattgcagtcatttttggcgtccatcggtcgcgtcgcatccacggcattgtccaccagagtccaacgggtcactaataatcgccatttacccctcctccctcatttttactcaaatgttttagttttttcatttgtttaatgggtttaattaaatttcaattagctcttcattcattaaataaataccatttgattatgttggcttactgtaatttatacagtaaaagccgtgcgcattctttcaaaatttgtggttcctttattggtgcctctttgattagcgtttcacaaattggcccctaattgcgaaaataaattgttgcaaaactgtccaattaaacggctcattctcagtcaattatagtgccccatttttatgccgaaaatatttttctaagatatatttaaagtttttgcacaggtttctctgccatttgttttacgtaattttaccacaaaatatgtctactgatgataattttgttgtacatgaatctttcaacgacacacgtaaagctgaataaattacattgcctaattaactaattaattgcctaattaactaatttattaattaattgcataaataatttattaattaattgcctaattaagtatggcccgccagcattgggtgtgccgatttagtggacaaaaatgccattccgtggtggaaaagaatgacattttggcgcaacacagcaggcattttgctcctcctgttgattggtcttctttttgtggtagttttgattttttcaatttgacttcaattccgtaaatttttacaagaatatttcaacaatttttttttgtaaatatttgataagtacaaaagtaatcaattcaaaaaacaattttcagttaattggcaaaacggcgactgaacttccggaaattgtgacagagaaaatggacagaatttatgtcaaattggagcaacagcaggtgaaaaatgatttaaattcttttaaatttaaattccaatttttccgcaggcgatggccaaattggcaaatgcaaaagaaattcaggtgctaattatgtagtaattaagtcacaattttttggaggcattaataaaaaaaatgtctttttttcaaaaatttacaaaaatgaaatttcgaatttaaaaattatttaattgcttacaactttaaactctttaatgacaaattcaaaaattttgcatattttcagtcgcttctcagcgcaacgatcgacgaaaaaatggccaaacatgaggtggtgaataaatctttttaggggtcaaattggacggcgggggggggggggggagtctaaaagaattggaataatatttataattggaacaattgcaaatttcatccccaaattttcagtcacttctaatcgcaactgatcaaagaattgtccattttttgctgttggcatttcttctgatcgccgccgtttgccttacacttttgctgatcaaagcaattgtcgaccaatttttgaagcagaaatttgaacaaaacaacaacacaacggatggggaagaggaaaagcggactgaagagaaggaggaaacggaagaaaatggaaaaggaggagagaaaggaagacgaggggaggagtcaactttgggggaaaatgatggggaagaggaggaggaagaggaaaagaaacaaaatggaaaaggaagagaaggaggagagaaaggaggacggaaggaggagcaaattttggaggagaatgatggggaagaggaggaggaagaagaggaggaaaaagaggggaataaacgagaggaatttgttagagaagagaatgaggaaaatgaaaaagaggaggaggatggaacagaggcacttttggaggaatttgcacatttacaattgtaa

SEQ ID NO: 76760 - DNA, 182 bp, Heterodera glycines
atgatcattttcctgctcaccctgttgtttggcctagtttttgtggtaagttttggattttgttttttcaaaatttacaaaaaaataaaatcttgttaattttaggcacttaaaaattggaaccccactaattacaaagtagtaaagccctataaagtgaattaaatttatttaaaaataaa

SEQ ID NO: 76761 - DNA, 1750 bp, Heterodera glycines
tatttgtgaaaaacaaatgtcacggaagcgtaagacggcagcggaggaacagcgaaacaaacggaaaaagcggagcgaccggaaaaaggaaaacggcaaagaaatggtgggtttgaatttcgggaatgagaaggggaatgggactttttttaaaacaaaatttggggtagtttaatgcttcccattttttaaatttgtaatactggggcgccgcaaaaaaaaaaaagtttttctggcatacatttcttaaatctttacagctttattgccgtcatccaccgagggccatcctcgaaaagcaccaacggcgagagcagcagcagaatgccgtcaacgaccagcaacaacaacaaaatgagcagcagcagcaaaatggacacaatgagcaacagtttgacgagcaacaacacgaacagaatgatggcgatgagcagcagcagcaaaatcagaacgacggaggagagcagcagcacgcagaacagcaccagcccaacaacaacaacaacaactcgctcatttttgaggaggaggaggaggaagaaatgacaaatgccgacgaggaggaacagcaaagcggaattgaggccgatgagtcgacgcacgagcaacaacaaccagaagaggaggaggacggcaatgaaggcgaacaccatcaacacgggaatgatcaacagcagagggaggaagaagtgagagaggggcagtatgagctcgaccgagcatacgcgtgctacacgcacagcaacggccaacgagcgttctacgtgaagtggacccgtaagtaaaaattgattggattaaaaaaaattggaattgttaggaggggagcaaattggctagacgataaaagatatccccccgtccccactaattttaatggtcaaaattttggaaaatttacttgtgagggtgactaagggatgccgcccgaggctccaaattataaatggatttaattacacccgtatttgtcggaaacagcgagcggttgagttcagcttgctgaacttcacgcctaattgtgactggtgaatatcccccgcccattattcgcccctcccgggggtaacggtcgagtttactggtgacggcggtcgcttgcagaacttcccgtcccctgggaggggcgaattgtctcatccccttttcgtttactttaggggaaacggttgagtttaggcatgcgacggcggtctcatgctggaacttcccgtccccctttggtaaacgaaacccgaaaaatttctaaattgtaatgttcttggacggcatccctttatagtccttgcttccatgaagagggcttaggcacaaaaaaaaatgttcttgataggttggcggaatcgcgaatggatattgtcagttgattcatcagcaggcgagctcactaatcaatttatgttgacgtccgggagtgatgcgactttggatgcgttaggaggccaatcaattgcgggcacacatgcagattggctaaacaaaaatccaaaatttcagaaatgtaaaaaaaaacttttacatttgaaaaaaaaaatttttttgtttaagtggcgcacaaatggaacactggtgcggcaaaagcatcagaacacgacattctatgggcggcggacacggacaagaggacacgacagacggtatccaattttgtgttgcttttcataataataataacaaacaacaattcccagaattatagcaaacaacaattttcaggcggagaaacaattacgtgcattcatcgacaaat

SEQ ID NO: 76762 - DNA, 698 bp, Heterodera glycines
atggagaatgaatgtgataatgaacgggctcggacgcaaaaaacgaccagatctgagaatgttacctgcgattgttcattgggtaacaagggtgtcgactgggcaaatgcgctgaacactcctcctccaatcaccaaaaaaagtgagtgttgataattaattggcatgccatgtgtgctcgctaataatctttaatagggcctctctattaaaaggagggaggggggatatcattttctgacaaatgagctcttaatgcgctctatttccccagtttatgcatcaattaatggccatcctcagttcttttgcgtttatttatttttcctattcttcagtaattttataaattttggtcctttataatgatttctgactcttatttcctttctaattaggcaaattagtattaataaatgttttcaaatgaattgaattatttttgggtaatttctctttttacagtaaaccatggtctgtaatttggctatttaatgttttttacattaaaaataatagggcaaggatgcgttggtggctggctcgatgcgaaaggatatggccaaacaattaaaatttattgctttgatggatatgaaatttgctatgcagcacgctgtttcaaagttatgttctaatgactaaatattatttaattgtaaagaaaatgggattcgaaaagccagaagcaaaataaa

SEQ ID NO: 76763 - DNA, 70 bp, Heterodera glycines
ccctgtctccattaaaggctctgtctccaattatgtccccctttctgaggatgttgaaaaataatccccc

SEQ ID NO: 76764 - DNA, 439 bp, Heterodera glycines
ctgctaaccaggaattagctgcacaatttttcgctgaaaatgttaagccacggttcaaatttgctggagaagacgaagaaatcgctgtgaatttatttgacctgaccagaagtctgattgggatttggaagttttattttaactcaaaagaaggcaaaaaatataaatggaaactgagcaatttatttaagtactcatttgaaccaattttgctaaatgagaatgaatttaagaagaatgaagagggaatggacggaagaaacaaaacagcagcggaaagctcatcacagtcattagcagctaatgagcaaacgggcaacgcggacaatgatctgctgaaattaatggaagacaaatttaagaatttggtgaaaaaaatggcaaaaattgcacaaaaaatgaacaaaacatggcgcacttccatttatttttagccgta

SEQ ID NO: 76765 - DNA, 636 bp, Heterodera glycines
atgaccagcgcactaattttgggtgccgttgccttcggcgctttcacccatttgggtgcccacgaatgggttgccattgtgatggttttgggcattgtcggatttgccgtttttttcttaatcggtctctttttttgcttctcatgttgcttccggtgagggcacggcactgtaaagtcactttttggcttacaaattaggacacttattgtttattttttcaaaataataaatcgtaattttatgtcaccaagaaaaatcaaaaaacctgctactatgtataattgttgatgcgaataaaaaggaaattatgcaaaaggttgatcggaacatttccatggaaatcttgacacctcagacggcagtaaaaaaaaaagttttggatatttgaaattctcgatcttaagcataaataagacaagtttggccatgaaacaatgtacattttgtcctgcttctcctgcataacggcatggcatgacacaggaaaaaggattgaaattctattggacaggaaagcagcggaaaaagtcgctttaaaggaagttataagttcgactcctcctgcggtgattgtgattacttacaacccaatttaatagtccgtcatggcaatattgttatgagttgaataaa

SEQ ID NO: 76766 - DNA, 1255 bp, Heterodera glycines
atgggaatttgccacaaaattggagagaatggcaccaagaaaatgcaaattgacgatgccgatggaaatccattgccaatcccgcgaaatccgttgccgaacaaagtcatcggattcagacgcattcagatcaagtaaaaactgattagatagaaatttttcataatttatctgcacttttcagttacatcgatcaaaatgtcatcgaatttctccaccgttttcaccgtcttttccccatttgttcaaccactatgaacattaccactgaaaatgtgcgcattttggactactttttgctccatatttggccaatgttctgcgattccatgcatctgatgcttttgaacaccatcctttttcgccgcttccgtcaattggccccgtcatcactcagcgattgtccatcccttcgcgttgtgtggttggatgacggcactttccccgaatttccgcccgatgacagtgccatggcgtcggatggccaagcggtgaccaaatgggtgttgacgccccgtccggatggtcagcccaagttgctcaaatcacctgttaattcaccggatcaatggtcgtcaacgatggaacagttcaaagcggtcggtgattatcacggggcattttattcgttttttgcgcttttttgtcccatttttaggaattttccaatgcttcttctccggtttccttttcaattaactttctgccgtcttctccgcttgactccgctgtgccattcgatctgatcaaccaagcgactggggagcaattgacactggaacaatatgcaaatggtttttggctcagccgttgcccaattggatgggatgagatgaaatgggacaatgtgtggaaggaattgattgatgctcgaacgaacccaattgacattgtgatcaaagatggtggatacgacgacgggtgaacaaaacaattttaaaatgatcagtgcttttatgagtctaatcgacaattgagcaatgttttttcttcagttttctcgacgccgcttcgcccgggccaagtgatcactgatcagcaacagaaatgaatgaattaattgatggttaattgatgcgattatgttaccgaaatgatgtgggcactttgccatttcaatattgtattatgtccaatttgtctgtctgtatttgacctttgcttgctcgcaaatgcgtccatttccatggtattttatttatatgtgataattcatggtgattaatcgtggataaaatggcaaaatcccacccca

SEQ ID NO: 76767 - DNA, 665 bp, Heterodera glycines
atgggggtctgggtgagaaaagagtagggaatggtgaagaaggagaaattttttgagaaaaaaaaaattaaattatttattttcatttaaagcatttgttcatatgcataagtggtcaagtggctaaaccttctgattttattatttctcgcttgggttcaattccccactgggatagaatattcttcatattttctttaccattattttaattgaaattttaattaaaaaaaatattccaactttttttctttcattttaagcatcctaaaaacccaaaaattaatcaattggtctttttttacaaattctgttaacaaatcgcattaaaaaatacaaaatttttcccggcggcgcctatcggcaccgccggccctccttgttccccaaaagtcttgagaaaaacgtgccgcgaaaaaagcggtgttgaaagcaaaaaaggtcattgatttacattaatttacatggccggagaccccttcgcaaaattggaaaattggccgctgatcccttgttttgcaataatctgaattttgaggtctacatctgaattttagtgttctttatcctgaatttgaaaaaaaaacttggtcaccctcaatatacatatacttctgaacaattctaatgctaaaaaacaggcactcgcgcgaaaactgaataaa

SEQ ID NO: 76768 - DNA, 871 bp, Heterodera glycines
  unsure (1)..(871): unsure at all n locations
atgaatctgacatctattcaaccaattccaaatctctataaaaggtccgcccttttcaattttttcgggggccctaaaaagcaaagtgccaaaagcaaaatccttttgatttttcatttagttttgtgattttaataacctgaattccatagttttcagaatcctctcaaaaatttttgttgaaaatactgaaaaatcgcttatggatttttgattcatctctgttagccatcattacgccatgaaattctatgttttaagccatattcactaaaatggcattaattccactaattttcccccatttttttccaggacaggcaattactccgacaatttgtccgtcgatgagctgtggcgtgccaaacatttgtacgactcggcattccatccagacactggtgaaaaggtgcttctgttaggacgaatgagtgcacgagtgccggtcgtcacattaatgtgcgttaaatccccccaacgaaattcttggaaaattttttcagccttggcggtatgctcactttctacaagtcagtatcacgcgtttcattcatttacaagcattgtaaaaaattctgttttaaaatttcaggtcaacccctgcagtttttggctggcaattcgtcaaccaggtagataaaaaaaaattcagaaaatttcttttttacatgattttttcagactttcaacgcaattactaactactccaaccgttcgggcgatgcgttgagcaactcgcaactgttgcaggcgtatgtgatggccaccggtgggaaaaaaaattttctaggcctgttttttttaaaaaaacgtttcccatttttcaggcggtgcaacgggcgtagctctgggactanatcgtgcagtaacg

SEQ ID NO: 76769 - DNA, 834 bp, Heterodera glycines
atgggcaaatgtccacccaattttggacgcattatggtgctgttttttgttcaaaatatgaacaaaacattgaaaaagtgggtgaaaataaaataaatttctatatatagttccgggtttgtctaccactgttttacgaatttttttttctcaaaaatttacccaattttatgcataaaaatgctgcgcaagaaaataattattttaaaaaaaatgtttaaagaaaatttgacttttttttattcattaagttaaagaaaaatattttttaagcaaatttgtatgactaaaggcgaaaacattgatgtttttgggccaagtttttcatttcaatagcttaaaaaattatataatgcaaatataaaaatatttttaaaaaattcagttattaaagggtggctcaaaaactgataaaaatttattaccatgaaaaattttctttttttaagaaattatatatatataatatttccggatttgtcctccgtttggcgaatttttttttttacaaaatttacctagcttttcaataaaatgcttaaaaattataattaatgcaaattaaaaaaaaaagatatattatttaaaattatcagttattatggggtggctcaaagctcgttggagtgctatttgaggagtacaaattacacatttatgcgccttgatttgaccgaagacattcgtgccaagaaatactgtgtccaacacaaacaagtactgtacagtaaatgtttgggctgaccgagagtcgaaattttccgatagtcgagaaccgataccgaagccgggtattgacgccgagactcgagaacgaaaccgagactcaataaa

SEQ ID NO: 76770 - DNA, 588 bp, Heterodera glycines
atgaaaatgatgagaaaaatgaagccaacatttgtttatttggctatcattggatcattttcaacaattttgtgcttaattacactgttccaccaatatcgtccgttgcgaatttcgtcggttgaagaaaacaaaaattcaaacaaaaaattgttgtacactttgccaaatgccatgacaattgggccaaaaacgccatatttaaagagggaaaacatgggcaaatgtccacccaattttggacgcattatggtgctggtttttgttcaaaatatgaacaaaacattggaaaagtgggtgaaaataaaataaaattctatatatagttccgggtttgtccaccaccgttttacgaatttttttttctcaaaaatttacccaattttatgcataaaaatgctgcgcaagaaaataattatttaaaaaaaaatgtttacagaaaatttgacttttttttattcattaacttaaagaaaaatattttttacaaatttgtatgactaaagtcgaaaacattgatgtttttgggccaagtttttcatttcaatagtttaaaaaattatataatgcaaatataaaaatattaaa

SEQ ID NO: 76771 - DNA, 669 bp, Heterodera glycines
atgccaccaatttgggttagcctgatgccgttcgccaccgttgcatttgcaaattgtgtcaacatcccggtgatgcgacgaaagtgcggaaaattgcaattagtcaaaacggtatcgatggacctttttgattttcaaaaacaaattttgtgaaccaaaagtcaggcgtccaatcacttactgcgcgtccaattaatggagaccatccttagtttcttaagccatatttttttttacttacttacgtcaatgccaatattttggtagcaaacaaaagctttaaaatctactgaatttttgactaactaaattctggactaacgcaatagacttactcgaaaaaagctgtatttcgtgttttctcattgtaattttctaaatgtcactatttgctcttttctagcattttatattcctgagaccttaagagttcgccgacattcatgcctttgtccaaaatcgggcctcaaacttaagttttttcaatccctgatcgcctaaacagctttaaaacaacttataatcctattaaattactaatttgtgagtattaaattcatgaatgtaacaattaaaattgtttaattttaatcgtaaatttaaaaaatttgacacaatttcttccattagataattcagctgataaagaaaaaaacatatgaaaataaa

SEQ ID NO: 76772 - DNA, 65 bp, Heterodera glycines
atggcttattcatatgcttctgataaagatttgcgatttatcattcttaaattgaaatcccagtg

SEQ ID NO: 76773 - DNA, 1120 bp, Heterodera glycines
atgctcattttgctgctgctgcacagccgggtgagttgtcatttcccttcgttttaccaatctgctcatttttggcacattttagtggtcaatgtgactgcggttatcgccaatgccaatcccaatggacagaattataacgtatgtttttatttcttaccttattaaagaaacagcggggaataaaggcggaccgggaacccattagttcttaatcgcgttctcggctaatttagaccggatcccgattccggcgaaataacaaatttttaaaagtttctgatttgggaaatttggtttctccaatacaaagaaagtccagcaaatcctatttatttttttcttttataaccttatgtaaaccagctgaaatttagcgccttcagcgtttgcatgcggaattatcggagaccattgaccgttttacggaggaaaattcccttttgggatatatgaacgatcaattgacggaacaacttgaacctctgacaggtttgtttcaaatcggataccaaaaccaaaaataaataaatttatgagcttaagttttacagagaaaactgctaattttatcggaaattttcttctctccggttttacttgtaaaatttggcaacaccctctttaagcccgaaaaggcatttaaatttgtgtcaaaatggcattcattggtttagaagtgcctccgaatgcgaattttaatctggatgatgttgtgtttcagccgcccctcgaccagcagaacggtggtttgtcattccttttgttccattaaagtcattgtcagttctttccttgaccacacaacacgaaaaataggaatttgcatgttgtttttggcaaacaaaaaaattgaatttaaaatttagacttttccaatgtttccttaatatgaaatttctaatttattaaatttaaaaaaattcatgtggggaaacgagctgctccctgttaattcatccatcttttccaaggggcactgaacaacaatggccagcaataattctccctcaaaatcagcaacagtacgaaagaataagcggccggcacatccatccaacttccaattttgtcatttgttctttttaaatattatgttttgtctgataatgagaataaa

SEQ ID NO: 76774 - DNA, 1807 bp, Heterodera glycines
  unsure (1)..(1807): unsure at all n locations
atgggttcgttggcggtgcaaccaccgagcggtgtgacgaggaatctgacggaggtatggattacgggcgaaagttttatttttgaagcttttagtgttatttgtctgtcaaactagtaattttttgatcacttggagggtcgtattttacgaaaaaattacacaccaaaaaattaaatttaaaaaatggaagatttttttttcttcaaattccatgttcaggtgtttgtgtttctgcggaacaatgcccagcaagagcatttggtggaattgaacagccaacaacgtgtcaatttggacaccggtaaaaaggaattgccatttgcacattgtttttgttattgtatattgcgtttagatgacaaaatgtgcctgatcgccatcgatgagggtaaaagtgttggnttngggggnggaaagatanaggtttgggtcaacatgatcgacgaggtcaactacgaactgaccaggcaagtgttgtgcgcaacaaaagtgtcggttgattggagttaaaataattgccggatttttttaattgcggaagaaagctccttcgttgttttgccaaatgctcttgctattctttagaataaaagctcgtcagaccgcgcttcgagaattgcaacaagttcgtctcaacaaaatttatttgtttacgggaaatttcaatttttgcagaagcaattgaccgacttggacttttccgatgacaaaggcgcatcagcagaagcaggaaaagtggccgaactgacggaagagctcacggcaatgtttgggcacagcaaacggttgataaagtgagcacaaaaaaatacttgcctaattgactgacaatgaacccattcaattttgcttttattttctggtttttattaaaaaacaccatttgaacggatttttgcaaaaaaaaaattgtaccaattataaggctaatcgaagaggacgacacggacaaattggcatcatcatcctcatccttcagcaaattgcggcacaatgttgtcgccagtctgctgttggtgctgaactcgttgatgcatgattttcggacaaggtatatttgtttctaaagagtttcggacattaatgaaatcctgaattttcttttccattcttattcattgtcagccaatccgccttccttcgccaattggactcgcggacagcaaatttggacacttttgtgctcaaatcatcgacaaatgttgtgccaactgctgcttctgtttgtgccggtgacagtgggaccacggacggtgccatgacaagttgcacgagagacgctgacaagcaacagcaggaagaattgacaatcgaccaaattcagtacatcatgcaaaatgagcacgtgtccaaggagcgcgaacaggaggtgcgaagaacaacaagatccccatcccctgctgtttcccccgatttttttttatttctaacttattgttagaattttttcaaaaaaacctatgagcttttggtcattaataaagggtttttggaaatatattaaaaaccaaaagggggggggcccttctggtttgcaaaattttgtgttttatttgagtttgggttgtggattatttgtcttgacatacaatttttaagtctgacaaagagcggacccactctttcgaagcaatttgaaaagcgcattggttattcaggtgctcaaaatcagcaaatcaattctggaattgcatagcatgttcaaggacattgcgtcgatgattattgaccagggcacaattttggacagaatcgattacaatgttgagcagtcggcgtctcgtattacatcggcgtttaaaag

SEQ ID NO: 76775 - DNA, 150 bp, Heterodera glycines
gtgatttgcggttgcattcgtggcgcgttggaggcactgcacatggaagtgcaagcagtgttggtcagcgacgttccggagcccaccgaactgcgcatcaaagtgcaccgggtgttgcaagagtccatcccggcgggggacgaaccgtag

SEQ ID NO: 76776 - DNA, 1089 bp, Heterodera glycines
  unsure (1)..(1089): unsure at all n locations
atgaaatgcgattggcccacccagccattggatggctacttgttgcattgtgcgagagacaatggaattccactgttggacggcagaaatttggacatgaaacgaattatagccatgagagacatcaaagaattgacagaaagccatggcattttgatgtgtacacttgaaccattacgaagacaaggtttaaaaagggaatagttgagccaaggttatttgggcacacaacagcataaaatgaccagcctacctgtttagactggtttcaaaaaaacttataattaaataaaaatatattttaaataaatagtaaatttatgaatttagttggttaggaaaaaattaagataaaagggcgggaagagattctgaaattattccgtgtgattctcaagtcgggaaataagtcattgataaatatggcaaaaactttatattcacaaaaattttgctaacattcttgacattattaacataaaacaattaaatagcattaatttagaaaattatgaattatatgaaggccaaggctccaattcgtattcatcgacttcatttaataactatgagaataatcaatacttttcggatagagaatgcgccaacgagcttttatcaccagaaataaatgataacgaattgtcaagaagttatgaacgaatcaaaccaacatttttcgataaggaaatgcggggagtacatgagagaacagcttcgagaagactcaggagctcctatgaagaccaagctcaccgcgaaagttatgaagaaacggaaaaccgacgcaatcgtctggtcacctattatgataatgacgaatcaccgaataattatagcagacgggagcgacaaagatacaatgatgcaccccatcaacctgagtataatgaagaaatacaacaaaattcgccgatcacttatgacggaagggagtcagagagagatgccttagcaaattaccaaccgacaggctacgatgaaacacaacaaaattcagctcgatcgcagagtcagggtcgtattagggaaagaccaactcataatgaaaaggaagtgccgaaacaaactaaaaacagacgagnctaa

SEQ ID NO: 76777 - DNA, 64 bp, Heterodera glycines
tttcgaactttagcacatattttggcctttttccataaatttcatagcaaaagtgcaataaaaa

SEQ ID NO: 76778 - DNA, 767 bp, Heterodera glycines
atggatgcgcgagtgggtcaacagtgagcttcactgccgaaaatcttgataaatttttgattttgcaattgcaaaaataatcgataacatttatgaggagtaaaattttttaaattaatttgcacccctaattttcaagttttttgtgcatatttggtgcatattttgcgatttttgtgcatatttggtgcatatttcacgactttatttgcatatttatgcgcatattttggccatttttcgtgcattttttgacagccctgctgataaataattgcctaatttaaatttaatcaccataaaattttcggaaaaattatatacacctaaaatgcaaaaaatacggattcctcaaagtttctgataaatgtcgtaggaccccgtcccgcgccagaaaatctaatatcgactgccgaattaataaatattttaatttttattgtttttttttgaaaattaatttgaaatatatatttggtatagcttggttcgaaagcatttgaagaagattgcaatgaatcaaatgatgcaaatgcgacaaatggttctgtgccacagcaagcaacagatcatgagacagaaaaaacgggagttattccaatgacattggataaaaaggcggaaaattcggaggataatgatgctgattcaatggcaacggaacaaatgcaagaaaattcggaggataatgatgctgattcaatggcaacggaacaaatgccggaaaactcggatgaagaatattcaatggcatcggaacaaatgcc

SEQ ID NO: 76779 - DNA, 170 bp, Heterodera glycines
cttaagttaaaaatataagaaaattatattctgaaagagaacaattaaagctattgaatgataccacgaaatattaatttggttgaatttgagccaagctattaatttaattattttacccattttttgttttcaaacccattggcagtttttaacaaacgcgccagcac

SEQ ID NO: 76780 - DNA, 1118 bp, Heterodera glycines
atgattgcaacggtcggttcgaactgcgcggatgggcagggctcaggtgggtcacaaatgatgggtctgttttgaaaaaggcaaataccattattttaatattacataatcaaaaaaatatataattaaatgaactttatattctaatttccaaattgagttggttttctctgtttaaatagccaactaaaataatttaagttttgaataagcaatcaaaattgttatgggctcgtggtttgaatttttcatcacgacggaaatgggtgatatgtacttgtatacacatatttccaacctcaccagtacttattgtattcattaaaatacagtcccctccttaaattagagccgccccctcccctcaaatagagcccccggggtctgtctctattttaggaaatacgtgattttcctagggttgccttgttttttttaaaggcttgttccgtcctgtacaaaaacaaaccctcaatttgttgtcgatattccatgttgtagcggagaatttccgccagactctgatcctgccgatggcaagtcaaatttggagcagttggcgtgtaaatgcacgccttcgtctgtccaattggcaccatacagtcgggctcggcggcacaaagcaaagccatgcaaatttaaattattttattttaactttcatagggagaaaaattctatattttaaagggttaaaagggatcggactcgacctttattttttgaaaaaacttgacccaaacatgaaaatatccgaatatcgggcccagtcctatggaaaatacaagccgggaccaaacttaatttcgacactctgtcaagtcgacactttataccgcctgtcgacaacagttggccgatcgattggaatggaaccgcaaaacaaagccatgcaaatataaatatttatttgtttaatatttaattttttaatacccgcagagatttatttaagccgtttttatgggtatcaacaatcaacgtgaaggggtgaaaatgtaaacattaacaataatgtttttctggaaactccttttttgcctgttcatgttctttctttagtcctttctcgatggtcacaaatatataattcttaacatttttggagtgaaaataaa

SEQ ID NO: 76781 - DNA, 163 bp, Heterodera glycines
atggctttgctttgtgccgccgagcccgactgtatggtgccaattggacagacgaaggcgtgcatttacacgccaactgctccaaatttgacttgccatcggcaggatcagagtctggcggaaattctccgctacaacatggaatatcgacaacaaattgagg

SEQ ID NO: 76782 - DNA, 383 bp, Heterodera glycines
atggtttacactttgaaaatgaacgactcgcgaataattcgtggcaaaaagtttaattgctcattaacatggcttttggagcgctacaaactttcagacaaatacgcaattaaagagaaaattgaagtctgttttttaatttatttttattatatttttattaattttaatcatttttatgtcaaatatcctggccatcccaaatttgtgtttgtgacagccgccaatgacttttattatccctttattcggacggtaattgcaaatgttaaagaaaattttggatgcaaacagaaaataattgcttatgatttgggaacagtgacaaaaaacaaagaatgggtaaaaaatagttttatttattttaaaattaataattaaaa

SEQ ID NO: 76783 - DNA, 883 bp, Heterodera glycines
atggcattgaaggggcacaatcagtccgatcactgcacaaccgaggcaaatgccaatgctgaaacagggtacgcatcaactcagtgccgtgcctgtgcgaattcgtttttgaaatttcagtttgcgaacagcacggtccgatcgtgttgcccttcgcaaacgtcgcttcatcggtgatctgatcgacattggcaaatttacatttgatactggctgcaaactgttccacaccgccatttgcgacttgggcaaaaaacggaagcgtgaggccgtctacggcaaaaatgagccggcgccaaacccgctaacgagttcaaagtcctgcagagcacccctattgacgagcttgtggaaaaggtgaagaagcagctgagagaagtggcggagaagcctggcttcaaggatctgagcccggtggaccaggaagacacacttttggatgcaattagcgcagacgatcagtttatgaaggtaaagccaattgttggtggacaagccgatttctattgtttaggacctcgtaagagaatctatcgacgattcagtggtacagctgcggaaagtgacggacgaccaggggtggggcgcgcacagaaaaatcccgcggtcgcggatcgcggattcaatttgccgcggtcgcggatcgcggatcgcgcaaaaaaaatcccgcggtcgcggatcgcgcatcgcggattcaatttgccgcggtcgcggatcgcggatcgcgcaaaaaacgccgcggatcgcacatttgtaaaagcataattagaaaattcccatattatcaataatcaaaattgtaaaggataatattatgatgaagaaaaataagccgttcgagattttcatgcgagagactttttcggaggtcattcaaaataaa

SEQ ID NO: 76784 - DNA, 433 bp, Heterodera glycines
atgctcagtttcatttactcggacgatttgagtgaattggacggagacaacgcgatggcagtgctttatgccggtgaaaattggcacaaattaatttagggggcggttgtaaaggaggggggggggtagcttcttatggaaaacgcaattgcagtgctttacgcgggtcaaaaaatttggagcaaattaattttaattgggtgattaatttataatagttatatcttatatatataaatagtaagaggaagagaattttcctatttgaggctgtgaaatttttggaaaaaaggaatagcgccattcaaaaaagcatttttcagccaaaaagtacggcattgatcgcttggtcagtccgtgtttgcaaattccaattccgaagctgtccaatgttttcctggccttttgccaggctcgtctttttgacttggag

SEQ ID NO: 76785 - DNA, 1395 bp, Heterodera glycines
atgtcatcgtcctcaaagcaggggaatccgattgaacggatgaagcatttggttagctcgggagaagacgcggacatccaatttttggtgggggacggagacaaaaaagaggcgagttttttttaatatttcaatttgaaatataatttatgtcaacttttaaatttttcagcttctgccggcgcataaactgattttaaagcacgcttccgaagtttttgaagcaatgttccgttttgactcacagaaagaaaaaacagaaaatggtgagaaaataaaaatttgttgatttttttttgaaattaacccctgctaattgccataattagggatgggattcttagttttttaactattttttctgcggctttaactcgacgagaaatgcacgaaaaacacattctttttcgaaaatttttcatttttagtgccactattcatcactaggaatcactattttggagctttgccactaaaaaaaactatttcggaagttggccactaaaataattttttgccactattttggcgtttcgtcattatttttgccactattttggcatttttgaaaaacttcccaaaattgcaataaaaatgaaaaatataccccaagaatcgacctaaaaaattccaaaaatacacctctaagaaacgaactaaaaattttcaaaattacacccctatgaattggaaaaatttcgcaaaaattcttcccccaaattttttttttcctgttcaatatttgctacgaaaatattttgtaactgcaatcagtgaataaaatctttttccttaattttaaattattttcaaattaaaaaacagctatttaaaaaattacacccctaaatttgtaactttttcgccactatttttaccactattttggcattttttggtcactatttagttaattattttgagattttttatcactaaaaatctcatccttattgatctatcatcgtacctgttgaatgcctaatctactttaaagccttaattattatccatttaccgtacacaaatttattttcaacataattccagggtttattttaggaatttggtgtcctgttttccggtgtccaatttaccagtccacgattggtataaatgatgtaccatcggtactattaccaaataaaatttgaatgattttcgactttttcgagtcgggttagggattcgaattataagggctttcacagttcacagcgcacacaaaaatttgtggatgtcatccgattttttaaattaaaaatatataaaataacgccaaaaaacgccattcgtcacatgttttgttggtatcatctcaaacagtccgtcccctttccctttgtttgtcttttgcttctctctctctctcttttctcattaggatgcaataaa

SEQ ID NO: 76786 - DNA, 2140 bp, Heterodera glycines
caactgcttggaaatgcagtgccagcgaacaacaacctcagcaatccaatttggcgagttcaattgacgcccgaatttcgaaattttattacgacgcggagagcggaaacacatttgaacaatggttcaaacgttttggcacactaatcgaggacgatggaaaagacttacctgaagcgacaaaagtccgtcttctattgggaaaattatcggacgaggactacaacaaataccgagacagcgtaagtccgacccaacccgatcaaatttcatgggcggacactctcgacaaattgaaaagtttgtacgccgaaacgcgatcgctgtttgtccgacgctatgaatgtttcaaaatcagacaacagccaaatcaggacatcacttcattgatcgcacaaatcaatgcgtcctgtgaaaatgcgaatttgagcctcacaaaggagcaactcaaatgcattattttggtcattgctcttcgagatgagcatcacgacctgcggcaaaagtgcttgaaaatgttggaggatggccagaaaaacggcacagacatcacactgaagcaaattgaagaagagttgcggaccatccaaatggtaaaagaaagcgcactctcgctaatggcacaacccgccgcaacaaacgcaattcacacacgtcctcaacagtggaaggactcaaaaggaaagtcaaaaccttttgtcaaaactgaacaacggagtcacaaccaacagaattgttctaaaaatgtggacaaaggcaaacaccgacagccgactgacccatgtccagcatgtgggtttttaggccattggcgatcggaatgcaaattgaatgatgcaatttgccacaagtgtcagaagaaatgacacatcgccaaagtttgccaacaaaagaacagccagccattcatcagaaaaggccgatcagttctcacaattgaagtgaacacaacctgcacagaggttggaactgctgatcactggtattggcgaattttgatcacagtcaacggcgttaaaatacggattaatgtcgacactggtgctcaagccaccatcatcaccagcaaaacgtggtgcaaaattggcaaaccgaaattgtcgcctgccgacattgaagcaaggaactgcaacggagaagcagtaccgataaaaggcaaatttttcggcatcgtaagcatgggcaacgacgaaccaaaaatgctcacagcatacgtcagtgatgccatcaaacatgacttattgggaatgccatggattgtcgcgctggaagttattcccagggaaataatgttccaagaagtgaacactaagccgacaatcatccaaaaggaagcaatgccaaaggccaaagtgatccaagacgaaaaatcactgatttcggcacttcagaaagatttttctgatgttttcagcaacgaattgggccattgcacaaaagcaaaggcacatttgattttgaagtcggatgcaaaacccgtgttttgcaaagcgaggccaattccgcacggcgccaccgaagccgttaatgccgagttggaccgacttcaacaacttggagcaattaagccaatcaaattcagccattgggctgcaccaatcttggcagtgaaaaagaaaaatggcaaaacccgagtttgcattgatttttctacaggattaaataatgcacgcgaactcaatcgccatccattgcctcgacctgatgacatttatgcggcactcaacggagcagcatacttttcaaatttggatttaagcgacgcttatttacaaatggaacttgacgaacaatcaaaacagctctgcgctctgagcacgcatcgaggattgttccaatgtcaacgtcttccattcggagtcaaatcggcaccatcgatttttcaacatttgatggaccaaatatgcagtggcattccaggcgtttttgcttatcttgatgatgggctcattgcatcaaagacactggaggaacatgtgtcagcgctttaccaacttttcgcgcgattcaatgaatatggcctccacattcaactggaaaaatgcaaatttcttcaaaaggaattgcttttcttgggccacataatgtcttcggaacgaattcaccctgaccccgaacaatcagaattcattcgcaaaat

SEQ ID NO: 76787 - DNA, 569 bp, Heterodera glycines
atgtatgcggatcctgccggatcccgcacaaaaatcaaatttgcggatcctgttgcaggattggaattcaaaattttttgccggaccggatccggccggattaatcctgcaaatcctgcattttccaaaaaatgcaggattgcggactgggatcctgcaaaatcctgcgcaggatccggtcctgctccgggctctagtggttagtgcttcaacaataatacagtacttttcttatgagttcgatacctgttgacgttttcttttcctttagttgaaattaaacattaaattttttgactaaatcatcaaaatttaatatatttcaaaataattttgacaaaaaaccaagagaaaaaaaaaattatcagaaattcataaattttttggtgaaaatctgttacaaaatagactttaaatttcaaaaatttttccggcggcgcctgtcggcaccgccggacccctttctcctaaaagtctttagaaaaagaacgccgcgaaaaaaaagatgattcgaaaaacaaaaaaaaaagaaaggcgatcaaaaaattttgggcatttttttgaataaa

SEQ ID NO: 76788 - DNA, 267 bp, Heterodera glycines
atggtgctgaatccgtcagttgcacgatgtaatttgccaaaaatttacgattggggcaccaaaactgtgtacttccagccccaaacgggcaaagcaatggacgaaaaggcatatgtcggctatatttattttggtaaaaactattttttaatgattttaattaatttatttttaaattaagttccaccaacgttggacccgatgaggttggacattggcaacatttatgattggttcacaaatccacttccatatcaggtcatttga

SEQ ID NO: 76789 - DNA, 98 bp, Heterodera glycines
atgaacacatcatcttccgtgcgtacaagaagaccaagcagcagaagtccgcttcattcatcgccaacagttcaagccgagccgaagaagccgtgtcg

SEQ ID NO: 76790 - DNA, 105 bp, Heterodera glycines
ccacctcttctcggtgttttcgtttggcatagttgtaattccaacgcatatttgacggtgaaggagcagaagccgccctaacttcaatcggcaaatcggcacgca

SEQ ID NO: 76791 - DNA, 269 bp, Heterodera glycines
atgaacacatcatcttccgtgcgtacaagaagaccaagcagcagaagtccgcttcattcatcgccaacagttcaagccgagccgaagaagccgtgtcggtccgtgaaggcaaatgacagaaagtgccgcccataatcagcagatcaatgatggatgatatgatatatgatgatgtaaagatgatgcttatttttaggatatacaatatgtattgtggaataattattgcattgtctgtctgtgctgttgtatatttttacgtgtattga

SEQ ID NO: 76792 - DNA, 585 bp, Heterodera glycines
atggcgttgttggcatttatggggcatgccgggtaaaagcgattttacagtacctaaatattgattggctatttgttactgtctccaggacttttgtgacggcacccaagcgtatacgatgagtccatcatatttggtaaatttaaaaacaaatataatttattgaaataaaattggagatttgggacagtcaagaaaacaaattttcatttttgtatcgataatttaaaagataaatcggattggacagacccgggattagtgccagagtctaagtccggcattagcctttttggggggctaaaattggaccaggcttaacatttttgtcttaacttttttttcctcttttaaaatacgatgaaataatatttaaatctttttcaaattggtttaataaaaataatatttaattttttttttcaggtttgtggcccagtcacaaacatcatctcaaagtgtaaccgtgactccattaaacacaatgattgagaacatgagagtgacggaaattagacatggaaaccagaaatagtattcaaaatatcttttttcttcaagaatttttttttttgttaaaataaa

SEQ ID NO: 76793 - DNA, 300 bp, Heterodera glycines
atgttcaattttaaagttttgcttttcttattccctctgctttcatttatcacttatggcgcaattttgccaaattatgaggcaacagcaaagaatgggcccaacgaaacgccaaaattccaaaacaacgatttgattggagacaaatttatgaaatgctgcaaggacaatgaaatttcatgctcagagggtacaattaattaaaaaattggattaattaattgaattttaaatattttagtttgcacttacccaccacctgctttttcattttctgaacaatggtaaaacaaaaataaa

SEQ ID NO: 76794 - DNA, 496 bp, Heterodera glycines
atgcgcgcgaaggacattagcacatcggtcggtgtgtgtgccctcgcaaataaatgccgtgccgaaattaataatgctatacatatttaatttaaaaaataattctaaatttttctaaaagaaaatttaatatttttcaattttgtttggatttttcttaaaattacatttaaaactcgcaaataatgccatgccaaaaaaaatgctatattcaattttaaaaaataattttaaatttttctaaaagaaaatgtaatctatttaatttttttttgaatttttctttaaaaataaaataaaatattttcctaataatagaacatgcaaattttcatatattttttcaggcgacattggatatactttagaattgagaattccaatcaatctccagtgaccactaatcattaaaaaaatagtcccgaggtgcgcaaaaaccagaaaccggtttaaatcatgaaaattgcaccaaaaatcagccaaaaacacattttaa

SEQ ID NO: 76795 - DNA, 795 bp, Heterodera glycines
atgtactatgccgaggccgagctgtgcgcgaaccggcaattcggaggaatgcgggagcagcgagtgagtgacaggggggagaaatattacattatataatgagcggaagagagggggggggcgagcaatcggaggaatgacagaagggacggggaagcgatcggaggaatgacagaagggagggggaagcgatcggaggaatgacagaagggatggggaagcgatcggaggatcagggcggcgactttaggatcaaaggaggggaggaggactcacaaataatattagggattaattttgtttaattataaaatattttattattgcaatcaattagtaaatgagaaaaataattatggatccaatctgtttttaaataagtcaaaattaacagttatttgtggtgcgactcgcgaacaaatggtggtcacgcggtttgtacgtcaaagataaagcccggggggaattgtgccggcttcgaatggagtgccgaagtgtgctacgggggcagtcaatgtgtcgaagggcggtgcacaaaggcaaaaacgatggacaaagagaatgacgagggaaaagcgaagaaaatggacgacgacggcacggcatttaggaggggcggcgccgaaaggggcgacggatggcattcgacgatcagttttatgaaaaaacgataaacaaattggccgagacaaaagccattctatctgatgctagtgtgtttaattgtgatggagaaattgatgaaatcccaatttttggcactttaatttaaaagtgaaccttttcaaagattca

SEQ ID NO: 76796 - DNA, 101 bp, Heterodera glycines
tacattggggcaatggatgttgggctaccgtatcagttattaaaattgttgtttttcaaaaaggatactaaaactgggataaccccattcagagactagtc

SEQ ID NO: 76797 - DNA, 363 bp, Heterodera glycines
aattgttttgaagaaaggagctcaaaaaacgcatttctgcgttaaaattttttcatttggacgtcacttttcgtcactagaaatcacattttggcgacttcgtcactaaaatagttaaaaatcactattttggcgttttgtcactttttttcactatttcgacattttttggaaaattccttaacaaaaatgcaataaaaccaaaaaatacacccctaagaatcgacctaaaaattttttcaaaaaatacacccctaagaatcgacaaaaaaaatttcaaaaagcactcctaagaaatgaaaaaaattttctcaaaaaggtattttcgtggcaagaattttaattttaaaaattattttttta

SEQ ID NO: 76798 - DNA, 2112 bp, Heterodera glycines
atggacaagggcaatctgtggattgtgcccggcttcaccattctcgtgttcgccggcctttggacaacaaaattgtgaacagaaaaagaagaaaggggggggggggagcacaaaaataatttataaagaaaatatttattaatctaacaagaatattcctatttggaattatttgaatttaattcataaaattattaaattcatccatttgttttatttttgttttttacgtatttgctaatttcagatcgaaaatcgcgctcgaagaatcagtttgtcgggtgagtgagcgatcgtacactttttaaagactcaataaattaatatttataattatcattcattatgcatacacagaaactaaaaatatattaaaattatgttttaatgtaattcacaaatatcaatacaattcaaatatatattatgatcaaaaaacatatataatataaaagattgcgatgcaaattatctacataaaatttttttgccattaatacattaatttttgtcaattaaaaaatatttccattaaattgtgtgccctcctttcagagcgggtccatctacgatctgtccggcacaacgttggacgatgacgcgcaacggcactgtcaaaccgcgaagaggtattacgtggcaccggaagagcccttctcgtacgagcacaggtggcgcgaggagcgggaagtgaagaatccggaggtgggtgatcatattaaatttgaaattttgtttattttctcgaattggaattttgtattactcgggttaattttcgatggattagcaaatactgcaataccgtatttggtaaaatgaaatccttctgaagttttatcggtctgcaaaatgcaaaaaaaaaaaaacatttaaaaaaactgagagcaaatttatactttgtgcacaagacaaaagcgataaaaaatgtaaaattaaataaaaattctttatttaaacaaatcactgttttagtggattctatggttttgggcgcccattgtgttcgtcatgtacgtgatgacacgcttttctttggtcactccttctcgaaaaccaagggaaataagtttcaaatataaattaatttaaataatatttttcaaaaaattgaagtatcaatttcaaaaaatttaaatttttcccaaaaatttcaggcatcaatttcaacaatgtcgtgaacgcgtctcagaatgtgctgatggacaacgacggcatcatggaagtggacactgacaagctggacgagcgcattccgaccattgcggacaatttcaaagtggccacctattcacgtgcatttgccggtgcgaatttttaaaaatttcgctttttaaaatttatttaaatcttttataatttcaggcttcattttcttcgagctttcactcgtttttgctcccattgtgctgctgatgttcgtcctaccgttgatggtcggcgccggctaccgtacctggggcctggacgttgcgcgggcgtggtgggaacgcaaggaatggtaaagaattgaaatttgaaaaaattgtttaaaagtattatttaaaaggaatatttaaaaattaaaaagggattttatatttattttattttaagtttttttagttgtactttattttagtatgccttttaaatcaattaaatggctaattttacacctttaatacttttgtttgttaaaattttatttttttaaatttaaatgaataatttatttaaaaataataattgctttgaattattcaatttcttagttttccaaatttcattgcactgtctgtccattttactttgcttcaaattgcgcctgttcaggcatggcaccacccttacgcctgtgctgggcgccgtcgacgagcatcagcagcagcgactgttccagcggccgttgcgcgactgggagcgcagtccgccgcgcattccgttaatcccgaggatcacttactgcgactacaactacgtgtcgctgggcaacacccacacgctgacctaccgctgctatttggatgcgaattggcacgagcggaccgcgctattcacatggtggacaaaatacgggggattaattaacggaaactgaatattgagcgccaccagttgggcgccaataaa

SEQ ID NO: 76799 - DNA, 936 bp, Heterodera glycines
atggacgatgaagagaatattttacaaaaaatttatttagaattttatttcgacaggaaaatgttcggcgacccaaacgcaatcattttgtatgtcaatcaacccgacctgttcccggtgtgccactttgagcagctccaatttgtgatgttccaagtggaaaagctggccaagcaggacggtaaccatgtgctggtccgtcgggcgtcatttattgaactgcgcaaaaggtgaacaaatttggaaatgtctcaaattgacatccaaatgccattcgagacagggccacatgcttagtaaatagtcagaaatttcgaaaaattggggtcaagatacaggaattgaatctggatcagattttttaatttaaccctatttttgcggtctcatgaccggatcagtatcatggaaaaaaaccctatcatcataatctatctaaactgtggccgaaactttattttaaaaaaaaattaattaattgcactatttctggaggcagcaaggatagcctcctcaattgcccttattatctaagccattggttcatgatccacggatcacttaacgtggatcgaaaaatctgtaatcgaaatccgtatgcataaagaccgttttggtgatcccaggctcacgatccattgttctaaggatccgatcctcgtatcaattttaatttttttctgaaaaaaaaaattttattggattctttgaaaacctaaaaattacattaatccgcagccgaatttctatttttgtttagacttagacttgacgaggccggcgactattcactgtattttgacggtaccaagcgtgttgcattagttcacatggcctacggttatttgcctgaacattatcctgagaaggactttgacctgcgcgtgatgatggagcgttcaacagctatcgtaaaaatttaaatattaaattgaa

SEQ ID NO: 76800 - DNA, 208 bp, Heterodera glycines
atgtgtttcgaattttggccacctgttgagggtcgttggggaagaaatgttccaatgtgccgggtttgctcaaaatcttaaaaaaaataaaattaattttatggcatcattttccagcgaacacctgttggattttcttcgttccggcaagttgaagacgaaggtttggcgacagctaaataatatttagaagataattatgaataaa

SEQ ID NO: 76801 - DNA, 184 bp, Heterodera glycines
aatttttaaaaaatggcatttttaatttcataaaaaaattatgaatccgtgtacaattggcagcatttttcacatgttcttcaaaatgttaacaattcgtcaaaatatagccaattttttcaccgcaaatcatttttttaaatttaattttccatttaaacaaaaattattacatgaattgacc

SEQ ID NO: 76802 - DNA, 840 bp, Heterodera glycines
atggacacacaacgaaaagaaattgaaacatttggaatgcagccatttcatgccattgtaacaccggcgaacacgacgatttggctcaaatgctcccagtggtaagtttcagcgcatttttaattggatttagtctaatgtccatttaatcccaaatgaatttacagcttgcatccggacgatacggaggagttggaggacgtgtggaagcccagtccttcggtcattggaagaaaaatacaacaatttctcaaaaaaattcgtgaagtttgtcactttctgtttcaaatttattttaacaattccagaaaataatacgttctaaatcgccttacgcaaaatctcgccgtgtaaatctggcaacttattgctggcaaaagttgggcaatatcaatgaaaaggacacatcgaagaaaaaatgggtaactataaagagcccaacgtttcagaagacaggcggaagggacaaccaaacggaagtgaccaaattcgtggaagagtaaattggactgaattgagtccacatattcgattttttaactttttaggcttacgaaaaaggacgacgagaacatgagaaatttttatctcggggaccattttgagttggaaatacgcaacattgacgctgcaaaaaaaggatggtatcggtgtcgcaacttaactggaaactatgccgaggacatttcgcaaatttatcatgtggatatattggaacactttcgcactgttatggtagaaacaaaattaattcaaaaaacaaaatgcatgcaaaaaattcagtactcagtagaccaaatgcctgatgaagtgaagaaagccgactttgccgaacgaata

SEQ ID NO: 76803 - DNA, 382 bp, Heterodera glycines
aaagctgtgctcgaagaagtcgcgactcgattggaagaacacaaaggggatgagacgagcgttgaaagtcaggctgaggaagttacgagtacgacgttgcagcgtggtctgcttcagcacgaagtgggaggaatggaggcacagcaaatggttgtgggtgagcaggcgcaatgcccatctgctgagggtaaccgtttgctgtttttaaacatttaaagaaatgagtaaataagcgtttttaggtgttccgcatgccttcctttgcgccgggtgtcagttccgcgcggattgtgccaacttgcttcgtgccatcggtgctcttttgaaagacttcggcagtgctgcatctgttgacggaggacgcaacaacgggactacctaa

SEQ ID NO: 76804 - DNA, 75 bp, Heterodera glycines
tccaagtggggaattgaacccaggcgaaaaattatgaaaggtagaaagtttaaccactacacaacatgtgcatgt

SEQ ID NO: 76805 - DNA, 2817 bp, Heterodera glycines
atgcacgaaagggaattccgttttgaggcgattttggcaccaaaaattgaggaggaggaagtgcaggcgctggtgggcacggagggattggtggacggactcgtccgattcggacgcaacggaaccgtacttgcgtacggaccaacaggtgaacaggacacaaattaaacaaaataatgataaagcgaagagtcccgtggcataatttttaaccctaaggcattttaattattggagggagggaaatccaagaaatacgataatttatcagtgctgttaagtgataacgctcatttagggaccggcaaaacctacacaatggtgggcagccgcgaacggcccggcttgatgagtcgaatgacccgggcactttacgagcaattggccgaaatgggcgacagcgaaacccgcgtttacatttcctttatggtctgatcagcaagcttgatcacttactttgtcagcacacattttcccaaaaaggaactttacaacgaattgatccgcgatttgctgagcacagaaagaaacggtccgttggaactttttgaggtgcggcgaaatgacaggaaaacaaaagccaaacaaacgaaaagcaaattggcaaatgatccattggcctccctttgcgaaggatgagcgtggcaatgtccatgtccccggattgagtcgcgttcgcgcgtcaaacacttcgcgacttcttcaattaatccatggaggaaacgcacggcgaacgaccgaaccaaccgcggccaattcgtaacagacaaagggacaacgaaacgagccaaaactgatcattatttgtaataagtacatcgtcccgatcacatgcccttctgatgatcactttgtggcgagacaatgccgaaaaggggcgactttttctgatcgatttggccgggtcagagagagcgacgaacactcaggcaagaagggcacggactttgtttgacttatcggatcttcagaatcaaggacagcgactaaaggagggggcggcgatcaatcgctcactgctcgccttgggaaatgtgaaatttcaactaaaaatataaatattgtctgattgtttctttttggcaatttaaattcaatgctaattacccccctcccccgagggtcactttattaaggtaataatcttaggtgataaattcgctgtcaaatgcttccgatggccgccgacccgcttatgtgaattaccgcgattcaaaactgacgcgacttttgaaagattcgctgggcgggacgggcgaagacggcgcgggacggacggtgctaatcgcacacatttcgccctcatcgacggcttacaacgaaacgtttaacactttaacgtgagaggggcgctcgctcaaaaaggatgaagatgggctaaaaacgattgatccttttaagatacgccagcagagcgaagggaatcactcgtcgggtgggatggaaggatgccaattttatctaaggatttcctaatttgaagctgccccagcccatccgaagaacagcttccgccgaccggctttactccgacgcggtggaaatgcttcgacgcgaggcgcaaagggcggggcgggcggaagggacggacgcaattgcgcattcgtcgtcactgggaatacgtaaaattagaatggcattccaatttggcattttcgctgggacactttcatcactcctttagtgccaacggatggcaacagagcgcggcgtggaaccgtggccattccgagccgacccttgcagggccattccttttcgttgtcaccgtctatccctccgctgttgaataacagtaattcacttcccggcggccgttctcggccttcaaatgcaccaccagcgaacaacgagtcgaatgccgccactccaaaagtgccgaaattgcctcgcctcggcacttcgctgttcgactctctgcgcgaccaacacttggccaatagcgaacgtcaacaccgccttaggtcagaaaacgtttttgtggttctcatttcttctgtttagagagcggctgctgcaagcgaattccgaacattacgaattggaattggcactgaaggggaggagggccattctgaaggcatgcgaagcgcagcaaacgcacggggagacggagaacgcgcaaaagtgcgaaagggtggcggagagagtgcggacggaagtggcggacaaagagcgacggacgagcgaattggccgacattcggcacaaattggagagagctttgagacggggagagcaaacgctgcagcaaacggaggagcgaatgaggtaaagccgaatcaaagcagaagcgaaaggacgaaagtgatcagtcaatttcagagggttggccaaagaccagcagcaattgcaaatcgtcgagttggtccactcactcgcaacacaacgagcggaaagagagattttggcactttttaatgagtgccatttcattttccattcgattttaggggcggcaattcactcggatttcgctttacaaggcaaacgtttacagaaacaagagaaccaattgaaacggataaagcaatatgaaagaattgtggacagattaattggggcagacaaaaatttggagggtaaaaaaagagaaaaaaaggatttaaagataaaatggcaaaatttaggtgaagaaagagcaaagctgcacagggaatatcgccttttgagaagccaattggacagaatgttgccggtggacaacggactgccgtcgtggaacacacaaatattggcggagagaaatgccaaagcgggacccagcaaaaacgaaaagccgagactgagacaaagcgaaagcatttcgcttaatgg

SEQ ID NO: 76806 - DNA, 86 bp, Heterodera glycines
atgtaaaaattaacagaaattctcgggttcattcgatagttgcgagaaattccccggagaaactccaaaataatgtgaaattgatt

SEQ ID NO: 76807 - DNA, 4565 bp, Heterodera glycines; identical to SEQ ID NO: 1922

SEQ ID NO: 76808 - DNA, 336 bp, Heterodera glycines
atggtggtgcaattgacttttttgatcagtataaaaggttataacagtctaaagtttttcagattttttcttcctctataaaaaatgttatcaatcttaaaaaaagtgaactcatatttattggacggtcatttttgccaaattattgcataactttggataaatttctgtaaataatttataattttgaacacttatgcaaattcgtttcagagacggtatgccaaagattcaaaatggctgaaaggaaaccattacaaaactaacattcaagcaccgtcgcttggcttttaattgcaaaaattggcatttttttggtgaaaatcagttaataaa

SEQ ID NO: 76809 - DNA, 74 bp, Heterodera glycines
gtcgccagaagaaagattagttttgcataccgacaaactgatcaacgaactgatcgccaaaatcgacctgaaaa

SEQ ID NO: 76810 - DNA, 314 bp, Heterodera glycines
caaatgataaagctgacaagaaaagggaaaaaggagagggggttggagattcagttgatggcattttctgttctcgtcctcctcctgccaccgcttttgctgtgtttgttacaagcgtcgaaaaaaatagcaccaaaaacgaggaaaaggccgcaaaaaccctgcaaattgattggatggacgaagtaaagagaagagagaatgatggagaaaatttggcgaagtgtcataatgacggaaagaacgacggggccgaagttttggatggtcaaataaatgaacacctggcaaaagcaaattcaaagaaaggctaa

SEQ ID NO: 76811 - DNA, 2158 bp, Heterodera glycines
  unsure (1)..(2158): unsure at all n locations
tttatntaattaaatttgttttttttcattctgtcgacacnacttcgctcattttgcgattttccaatgttttttcttatcattttgtctatctttttngtagctttcgctcggtctctttgctctccgtcgtcgtttttctcgacgattgtcgcaaagaccgccgcgtggatgctttttatatgcgccggcgtttaatttatcctcaaaatttgcatctctctctcgcgagtgtgctctcattcagtaattgtttcatttggttgcttccgatttaagtttggctgtttcaggatggttaatgtttccactttcgcattattattcccgtcttcggatgacccctccgccgatgtcttttggctgttccgacttttgcccactttgactgcctacggcactttgcttctcctcggctactttatagtccgatgcattcgaaaagaggcgaaaagtagcacacttttcttcgcatcatttagcgtaaaaatgtgtagggaatgccaatattttccgccgccatttccttttgcgattgcttcgccaattcgccgtcggacaatcggccgaacttcggacggcccaaagcgcgaaggaaaggggcacactttcggagaaggaacagctgagagacggggcggaggacgaggagggagggcgcatttgttcagtcggcggcacggcacaattgcggagacggaagtcgttgttggctgactgtctgtccgtgtccgtctgtttcgccggaatccaagtcattttgtccatcctttgtgcatcgatcccccccccccaccgttttcaggtgactttgatttgtatgggcttcttccaggaacgcattgtgacgcgcggttatccccacagaacggagccgaaaaggacagactttttccgggacactcagtttttggtgttctccaatcgaattgtacgtactggcattgacccaccaaatgaccccgctgttttgaggtggcattggcactttccggcgcttatcttttcgtcactcggaaagcgcagcctccgcacgttgcgcccctttacctgcactctttttcctccttctccaatgtcatcgcttcgtggtgccaatacgaggcattgaaatacgtttcctttcccgctcaggtgccattcttttcaccgttggagtgccatttaaagcaattcccccccccccattagactgtgtgcaaagcatcgaaaattgtgccgacgatgctcatgggaatattgctgcgcggccagcgctattccaccagccaatatgcttttgcgctgaccctcgtcctcggaacttcggtgttttttctcgccacttcctcggattcttcccatttcacttccgctcgtggcacttcccattttgaaaaaccttctgagaaggaagaaaaaggcctttttatcgttttggcacaatctttacgggcttattccaacgctgtttcgggttttcttctgatgctcggctatttgctgttcgacgcgttcactccgaattggcagaaaagtaaggatggtttattgttagggttcatttgttttatttggttttctttgatcggtcttggcccattaatttaaatttgagaatggcctaatgaattaattggtttcagaattgctcgaacaaccgccccgaatttcgtgctcccaggtcctttcgtgttttgttgtccgttcgttcgtcccctcatcattttctttccattcagatgatgttctgtgtgaatgcgttcagtgtgctcatttgtctggtccctctcctccaacaatggactttgccctcctccgtccattttctgtttgtccatgagtccgttttggtcgattgtctgttcctttctttgggctcgtcccttggccaggtcatttattcacattcccttagcctttctttgaatttgcttttgccaggtgttcatttatttgaccatccaaaacttcggccccgtcgttctttccgtcattatgacacttcgccaaattttctccatcattctctcttctctttacttcgtccatccaatcaatttgcagggtttttgcggccttttcctcgtttttggtgctatttttttcgacgcttgtaacaaacacagcaaaagcggtggcaggaggaggacgagaacagaaaatgccatcaactgaa

SEQ ID NO: 76812 - DNA, 768 bp, Heterodera glycines
atgcaaagtgacgaagacatcggcagaatggtggccagtgtgccggtggctatcggcagtgccatggaagtttttgcggagaaattgttgctcgcagcggccgaaagtgtccagcacagttcaaccaaaacgctctctccaatgcacatgtaaaggaagaagcggcaaataagcaaattcttaaagggagaagcggaatgagaaattgctacaatagttagagtggaatttagacttttgcttccgttctttcaaatcccaactttcagcaaaatggccgtttctcgcgttccgcaattttcttttttggagcctatgttgagggatgttccgatgaacccgaaaatggccccctcttttgtacagcaatcgtcttcaacgtccaacggcgaatgaggcgatgctttccgtttaaatacctctcacattggacattcatttaacaaggctttactgcgattgcttcagttaatctgtaaaaatgagacgacaatttatttttttattttatctgttgttttcaaaacggaaaatatttttacgatgcggcggattattattaattaattaattttaattattattttggatagaaatggaggagaaagccaagcaaatccgattgccaaaaaaggcggagaaagtgaagaacaaggtcagtcagtgcccgacttccattcatttccaatttttcctcttaaggcggcggccgtcgttcaaatcactgccgagcaacttttgcgtgaagcgaaggagcgcgagttggag

SEQ ID NO: 76813 - DNA, 899 bp, Heterodera glycines
atggcagtgagctgttggctggccgacaaaatgatttgcgacctgtggcttcagcttggcacgccgtatttgcatgccatttggcatttgttggctgcttatgccgggtgaggaaaagataattattgatttttctaataaattttcgcgccctccctggagagagcgctgtccaaaaattgggtttaacccataagcgtccccctgcacggaaacctttagtaaaaggcgaaagatttcatcgtccgaatacagaggaaccagggataaaaaacagcgggtaaaatggatgaatatttggaaaataaaaattatttatgatgagttaaaacagaggagggacaaggaaaaatactgcgttatatttctcccgttgtatgtcttctttgccttctctctttggtgcactctctttcagcgaaggaacaaacgcagcgaaaagcgactaattctttacctttttttattcttggcaagataaaaatctgaagccaaagcctaagaaaagattttaagattagcccttgatttttgaagctttccgaattcgccaaaacaatttcccgatatcaaattccattttggtgataggtttttgttttatttggtgaaggtggttctccattagtagcttttttaggcctaattttttagatgttttcatttttattaaaaaacgacaaaattatgaaacaacctaatattttttagttgttaccgaatagcatttcttttttcggcaaaaaatatttacaaaatgaataagggtcgtttcggcgccagcccaagtttttggactgttaattttttcactgtcaatcaaatccaataatcttggtatcattcgcaagcttaacatgtatattgcttctcaattagaggacccaaaaattattaaa

SEQ ID NO: 76814 - DNA, 351 bp, Heterodera glycines
atggcacagggcaatgaagaagctatcaaaacgaatgcattcactcgccggttcaataaaaccgagaacggacaccgaaacggacaaaagaatgacggccaaacgaaagtgaggcctaagggggaaaagaatggtcaattagtgggaaaaaatcaataatttaattatttacatttaaaatttaattaaaatacaatatatgttgtaattaaaacaaattttcaaaataaaatttgaaagttgtagctaactcctaagtttctgttaaatgctttcctcaagaattaacatgttttttaagccaaattattatgatagaaatttatttttaaaattaaattaatttttgta

SEQ ID NO: 76815 - DNA, 718 bp, Heterodera glycines
atgttccttgagcagtttgcgcggcaccatattgtggttgagcagcaccggcgtgtacgccaccagacacgtggtcatcatgtgcagaaggaacagttcgtccaccaattggccgaacagcgaaagggtggcgtggtaataagccgacgcgagcccattaagtgcgagaaaagcgtggggacaaatggccacggggttcacccggctgagaaagggccacaggcggacgacgttcagcaggggcaacagcagcagcggaaggttggaaatagtgttggcaaatcggaaataaaggcaaagacaatttaaaaagtgccaaatttataaatcaaatttttagttgggcaaatcgcaaccgaaaataatggaaataaaattgaaaaacatttaatgtattaaggaaatggatgtatttgtaattagtttaaaatttgggaatttattaaaaattaaaagataaaatattttaaaataattgaaacaatttatattgtttaaaaaatgttcgaattttcttagccaataattcttaaaaaaggaaggaatattgaaaaaataacaacaactcactcggcaacgaatggcacaattttgtatttgttgtcggacagtgactcgcaccagggcatgcccgactcaaaggcgaaccaatggtccattaaagtcacaaattgtcaattatctgacaaaacattttaaaattagattttaaaataga

SEQ ID NO: 76816 - DNA, 1502 bp, Heterodera glycines
caatttgtgactttaatggaccattggttcgcctttgagtcgggcatgccctggtgcgagtcactgtccgacaacaaatacaaaattgtgccattcgttgccgagtgagttgttgttattttttcaatattccttccttttttaagaattattggctaagaaaattcgaacattttttaaacaatataaattgtttcaattattttaaaatattttatcttttaatttttaataaattcccaaattttaaactaattacaaatacatccatttccttaatacattaaatgtttttcaattttatttccattattttcggttgcgatttgcccaactaaaaatttgatttataaatttggcactttttaaattgtctttgcctttatttccgatttgccaacactatttccaaccttccgctgctgctgttgcccctgctgaacgtcgtccgcctgtggccctttctcagccgggtgaaccccgtggccatttgtccccacgcttttctcgcacttaatgggctcgcgtcggcttattaccacgccaccctttcgctgttcggccaattggtggacgaactgttccttctgcacatgatgaccacgtgtctggtggcgtacacgccggtgctgctcaaccacaatatggtgccgcgcaaactgctcaaggaacatttgtgagagagagagaagagcatcatgccaattcggattgggttactgatcaaagagaagggcatcatgccaattcggattgggttactgatcaagaatatggcatatattttggcctatttcgaatctcggaaccgaattaaaataaaagtcgaaattcgaatttttcagaaattctcttttatgttcgaatctttgtgtaatgattattttttgttgttgtaatggtttatgatcagtttttgcttgttttaatttattttagaacaaaaatcgaattttcaaaaattggggtttagactttttgttcgaatccggggttcgcgatgggccaagatgggtcgtgattagcacaataaatcagcatagaaaaaattatctaaaaaaatttgcggagggtgacaaaatctacaagtaccttattattatcaacaaagaatataaaaaataacttttattaaattaaaaaaaagcatcttttcattttcttgcaattatttttgttttattacaaaaattaatttaattttaaaaataaatctctatcataataattcggcttaaaaaacatgttaattcttgaggaaagcatttaacagaaacttaggagttagctagaactttcaaattttactttgaaaatttgttttaattacaacatatatgtattgtattttaattaaattttaaatgtaaataattaaattattgattttttcccactaattaaccattcttttcccccttaggcctcactttcgtttggccgtcattcttttgtccgtttcggtgtccgttctcggtttcattgacccggcagtgaatgca

SEQ ID NO: 76817 - DNA, 885 bp, Heterodera glycines
atgcttttcctcccacttcttctggtgcttctcctccctttgtactcctccgtcttcgtccaatctgtttcccaacggcgtccggtccgaattacgcccttcctttactccgacgcgttgaacatcgctgcggctggagggtatgttgtgtattttttgaacaaaatttcagggaattttgtggcatttttcagggttttccgccttctcccctcgccgaagcaataagaatttttcaattttttaacatttttttattctcagaagaacataaaatacaacaaaaatttttttttataaattttggcttttctccagttctgttgctcctctgaagaaggaaaatgccatgtttgatgtgccaacaaagtttggctgggacagccaaacgatgcgccagatcactcccttcctctattcatcagtgaacagcggacagcagcaggagagaaagcgatttgaataacggattataatgtgaatgatggtgataatggagatactatactaccgtataatttctaccgttgatggatgtgctctgatcagttataagcaaattatgggaatttgatcattcaaattaataatatcaaaaagttgcgtctgcgtattttataattgtacaagtgcattacatttgtgagctagctgtttttttaatgtacatgccatagcaaatagtatagcaaaattttgctgccttttcatagtttgaattttacgaaattcggtgcccattttttaaatacgcaaatggcgctagcaatgtttatcccctgctggaatctctatcaattcgggttatatctctcaaatatgaactatcatcatatgcaggtttattttccatttagaattctatataaaccaagaagccgaaaa

SEQ ID NO: 76818 - DNA, 2526 bp, Heterodera glycines
atggcttccgacattcaaatgatgcacttgaaaagagcatttgattggtatgaagagatgaagtcacagttggaaataatccgcttcaaaaaggtacaaaacttgcttagaactgatggattagctcgcgaatgaaagcaatggtaaaacattgcataccgtacgacatatgacaacgttgtataccgtacgcacaacattgactttggctactgtagccctctaattaattcataaaatcatttttatagaaaatttgaaaattttggataaattaatttctcttcggtttcagcaagcgcttgagaatgagtcggtggaagtgaattcgcgccttgccaacgaagagtcgcgtgcgattgaattgcaaaaggagcggaaacgcaccgaagcggagtgcgagtcgttgcggaaaaacatcaccgacatggacgttggcatgcgcaaattggaggcggagaagcaggccaaggacaaccaggtaacggaaaagagcaattaattaattaattagcaataattagacaaacgaattgaaaattaattaatcaattggcgataattagcaatctaatcgaccattaactaatgaattggcaaaattagcaaacgaattgacaattttttaagttacggacactggccgatgaactgcacaagcaggaactgaccgagtccaaactggccaaggagcgcaaacagcagcaggaacttgcagccaaactgcagaacgacttgcaaatggaggcggagcgaaacgcggcggagaaagcgcaccgacagaaactgcaacaaactttggaggtggccaaagtttcaaattctttcaacggcacgccgtgccttaatttcaataaaacaaattgtcaaaaagtacagatattattttcttttgtttaaagtcgggttgaaaatgaaatggaccgcgagcgtcgtgcacgtgccgagcaggagaaagcgcgccgcaagttcgagggcgaagtgcgcattgcacgcgagaatttggacgagatgggcaagcagcggcaggacatggagacgagtctgaagcgcaaggaggccgaccttttcgcactgtccgtccgttttgaggaggcgcagtcgcaaggcgcgaaattgcagcgacaggcgcaggtcgaaacaaatttgggacaaaataattaattaaaatatttttaattaatttattatttatattttgtgtgccttttttaggagatggacgcacgttgtaaagagatggaggcggaattggaagcggaacggcaggcgcgggcgcgctccgagcgcggccgaggcgaaattcaatacgaagcggacgaactgcaggagcggttggaacagcaggcgcaagcgacgcaatcgcaaatcgaagcgaacaaaaagaaagacgctgaagtggcgaagctgagacgggaaattgaccagctgaagttgacattcgaatcacaagcgaccgcactgaaaagtaataaattgggaaaaaagcgaaggaatcgcagtgatcaaagggaacgaaaaaaatgtaaaatcatcagagggtagggtacaaaaaaacaaaatattaaaattcctttgcggcaattaccatcaaaggactcccataatattccttttcatcacaaaaagaaatcggaaatatttatttttcggcgaggtttgaaaatttgaaaaacccaacgtcctgctacagtttctggtcaaggacaatttcaaaaccaatagcaattttcgaatttcaaaatgggaatgaaaaaatggccaactttatttaatcaattagaccaaggagttaatggagttcattgagtccgcatttatatggatgaggtcatttttgattttgtgaccccttctaaaaatttcttaaattcgttaattttcaattttttgtagaaaagggagcctcgggctgcacggaattgcacgaacaaattgaccaagtgcaacggatgaagaacaaagcggagaaggagcgcatcgcaatgcaacgacagctggagatgcagcagagtcagctagacgacgaggcgaagcagcgcatggatttggaacgacgggagaaggcatttgagggccaattgttggagttgcggctgaagacggaggaacagtcgcgacaaattcaggcagggcaaaagcaaacggagaaagcaaaatggagacatttaaaatcaaacaaattaattaggaaattgagacgaattaattggggaattaaaacgaattaattaagtaattaaaatgaatcattattgaattaccgaaataattagctaaagaagaatattttaatgttcctccgcaggagttgcaattctccaagcagcgcctgcaggccgagtgcggcgagttcgggcgccaagtggaggacttggagtcgcagtcgaccgctaccggacgcctcaagtcgcaattctttgtccaagcggaggagttgaagcgtgccgcaacggaggaacagcgcgagaagcaggcactgagcacgcacgtgaagaacctgcagcacgagttggagcagctcag

SEQ ID NO: 76819 - DNA, 1829 bp, Heterodera glycines
  unsure (1)..(1829): unsure at all n locations
atggaaaatgctgaaattaaatctcaacgaaaaaataaaaaactcgaacatgaaggctgcctgtatgtcttccatttgttgaacgccgatggtgacgtaaaattttggcgctgtgaacatcagcacggcgaattcaaatgtcgagggcgcattcacacaacgctcaatgacgtcgttctgaagacaattggtatacacacgtgcaaccgcagcgcggcaaatgtcatcgcacaaaaaatcaccaccggcattaaacgacgtgctgctgaaacgatggaaacgccagcagcaatcagggcacacactcttcagcaaattccaacgccagtaatggcgaacattccaacaaagaacgcgacaaaaaaagtgaaaaatctatttatttttttacagttttgagtttaagctggtgaagcgagtccgccatgaaattgaattgccgccgccagtgccggtaacgcttcaagaattggaacttccagagcagtacagaatatacaaacgcaccgaagaaacgcaggagcttttccttcttgccgattctggaacgtataccgatcagaaccgagaaggacaacaacggtgtgtttaatgggaattttcagccatttctttaattttagaattctcatttttggccggctttctttcggaaattgggcttccgaaatgaagtacatttacgctgatggaaccttcgcagtgcaccggcgctcttttcgcaactttacgtcattttggcgcggtacttttttgtcaattttgtttttcaatcattttctccaaatttcagtcgtgataaatgggtgtttccggtccttcactgcctactgacgtgcaagtcgcagtccacgtatganaggatgtttgacatggtccgccaccgctggccgactttttggccgacaaacgcttccatggacttcgaacaggcgatggtcaacgccttccgtgctaaacatccacagtgctcaatcaacttttgcttattccatttggtgcgcaacatgaaagcgcgtcttaccgacgagcaaactcacgtgagaattttttaaaattaatttttaaattctcaaatttagcgtttcaaaacagacgcagcctttgcacgagcagccaaaatggtcacttcgctggcgttcgtgccgctggcggaccttacacccgcgttggcagcactagaagactatctacctaatgagcttgagggcgttctcgattggtcggttgagttaaattttttttcaatttcattagtaaattttaaaggtttgtaatcaactacgttggacgtcttcgaaacaacggcacacgcactcgtccattattccgtcccgaagaatggagtgtgtacgagcgcacaatgaacggcaccaccgcacaaacaacttcgccgaagcgtaccatcgcacgttgcaacatgcgatcggaatcggacaagcacacccgacaatatggaaattcatcaacattttgcgtgagcaccaaaaaataatcgacgtggacttcgaacatttccttgccgggaatgctccgccgatgaaagcaaagcgttaccgtgaagcggacagacgaattttgaggattttggagcgctataatcaggaaaaagcgccgccgcaaatcaacgatgatcaccaatacggccaaaatcaaaataacccgaatttgttcattgaaatgcttgggggaatttcgagcaattatcaaatggattgttaattttttgttaattttatttgttattacattttggataaaacggagatttttaaaaattgagccaaagcgatattttgatgaataattttaaaaatcagaacatgaaa

SEQ ID NO: 76820 - DNA, 277 bp, Heterodera glycines
cccaaacagcttaacaatagttcccggcgcggctgacagcagcagcattgaagagaaccgacgtttgacatcgacaattgaggaggaagcggtgccaccgccgacgacaccgacaaaaaaggaacatcccggcccatgagttaattaaactttgaaaattgaaaatgaatggatcaatcaaatcccgctcattttaaatcatataataatttgcattttgtgtatctctctcttaacatttgcttgccattttgtgtcggataaagaaaaggaaaaa

SEQ ID NO: 76821 - DNA, 798 bp, Heterodera glycines
  unsure (1)..(798): unsure at all n locations
atattacaaataaaatnttgaaaaaaaaaattctaattgccttttctttagtggggtctgatggacgattcgcagaaggaatacttcacgggttggatcaaatggtgtgaaatgtgagttccacccaattaaaaattaattaaataattaattaatcaattaattattttccaattaatcagccctaattaagcggcacccaatacattccgctctcatttctgctcggtttcttcgtggctgtggttgttgcacgctggtgggagcagttcaactggatctcgtggcctgacaaattcatgatggtcagtcggacgggccattaattaatttttttttttttggaattcccgaaatctcgggccaattctcggtcttgagatttgtggcggctaaatcactgtcgagagagacacattgacatgattctaggccaattccggctctctctcaagtgtaaacctggcacagacaaatctcggtctcaaatcttgaaactgaacccttgagacgaatcatggagggacgccaaattgattgggattgaatctcgagaaatatcgacaaatttccattcctgcgcagtactaatatgtgtgaacaccccccccccccctctgttgatcacagtgtgtgtccacctgtttgccgggccgtgagaatttggagacgcgccgaacattggcccgttggaccagcctccaatcagcgatcgcgtggaccggcatttcggtgcgaacgctgaaacgattcccgaccgagcggcatttggtggagagcaaactgatgacggaagaa

SEQ ID NO: 76822 - DNA, 371 bp, Heterodera glycines
atggacatttggtcggctgggattacgatatatgaaattattttctccaattattttgtcattgaaacaaattcaatgacaatcaatcaaggggatttatgggtaaaaaataatttaaaaagttatttaatatttattttcagccaaatttggcaaacaaaatgacaaaaattggcgaattgtaccgcagtgccaaattgtttgagaatccttccgctgtaacacaacaattatttgccaagcttgatttgccaaatggaaattggaatcctggcagaaaggattggtggacacgctattcgggagtgatcttgaacattctcgacatatggggcacacatggaatgcctgaaattgcctgcctattaggc

SEQ ID NO: 76823 - DNA, 948 bp, Heterodera glycines
atgcatacattaattccattgccgcccgttgcactgactcctgctgaaataattctttcaaaaattttgttcaatatgcctgctgatggatcttggaagtttctttgctttaataaaagaaaaatacatataataaattttaaattttgataaataaaatgcaaaaaaatattttttgatgttcgatttaagattatgtaacgagttgaaaagcgccaatttgtctacagtttctcttgctttaaatggaatacggtagtttttttaaaattaaaaatggataaccattaacagttcaggcgcagtataaagaaatgtgacgatcaaagaatttggatcaatttgtccagttcggtgatattcgtcatcataaaagatacaaccttaatttattaattaattactaaaataaaatttatatttgaattccttaaaaagagttcataaatatgaattatttaattcaatgatgttacactattttaatcaaaagctgaattaattaattaatccttaaatttggcaatcaaaggccgccttcccctactatttaaggatatcgtgccaaatttggcaatcaaaggccgccttcccctactatttaaggatatcgtgccaaatttggcaatcaaaggccgccttcccctactatttaaggatatcgtgccaaatttggcaatcaaaggccgccttcccctactatttaaggatatcatgccaaatttggcaatcaaaggccgccttcccctactatttaaggatatcgtgccaaatttggcaatcaaaggccgccttcccctactatttaaggatatcatgccaaatttggcaatcaaaggccgccttcccctactatttaaggatatcgtgccaaatttggcaatcaaaagccccctctccaaccttttaatgatttttttcatttttatggcaaaatttaaattttag

SEQ ID NO: 76824 - DNA, 814 bp, Heterodera glycines
atggtaaagcaacaccaacaggaacagcgcagaaagctggccatgttgcgcgaagttgagaggtacttttaaggggcgtttttagcgaaatttttagcctgtagtcaatttaatatttattttttgtaataataaaagaatattcaaatataaattataatttattataaaattattaaccaaaaaatcaattattcaaatataaattataatttattatgtaaaaattattgaccaaaaaaagaatcaatttaaaaaattttgtaaaaagctcaatataatattatataaatttaaagttaaaattattaatataaaagttaaaaggcaaataatcaatgaaaaaaaaaaaaatttattttttgggaaaaggagaattttattactttttcaacggggtcgaataaatagaaataaaatctaactctgcctaactaacaatgagtgaaaatctgactcagaaatcccatattaattaaataatccaatcaattttctctagctagcattttttttcaatcaaaagcgaaaaccaagggttacaggatcaaaaatgatcaattttcatcaaatccaaaaatattggccaatatctttgccattgttcttgcattatattgaaaaaaaattatacaaataattttaaatttgtagaaaatttctttttcttctcacctataaaatcataattaaaaaaaaaattattaaaattattctaatttacagttgattaattatgcaaattatacaaatagagaacaactaattattttaataatgttaaattaaatattttgttaaaaaatttctatta

SEQ ID NO: 76825 - DNA, 319 bp, Heterodera glycines
atgccaatcgccaattcggcactttatgccaagatggaccaatgcgattgtgccatgtttgcagactgtccactgggcaaaacgcgtgccaccccggcacagcgatgccggcacagcgcaacgccaaggcacacaaagaagcggcacacagttggcgccgcacaatcgacgccatggacacgaacagaaatgccgcaagccgcttcgtcggaggacattgatgatgccaacgaagatgattatcatgatgaaaaatcagtgccctcactgtcctgccagtgccgaaaacggcagtgcccagaatgtgccaaacatgcgg

SEQ ID NO: 76826 - DNA, 980 bp, Heterodera glycines
atgaagcgaaccaacgcatcaaacatcactccgcctcgcgcaaaacgttcaatggcacctgcacaggacctggacccaaacgctgtcgcactcgcggagcaagaacgacaacgcaccctggtcttcattggcctcccggaaagcaatgccattcgcccatcggaacgtgttcaggaagacagggaagccgccacaaaaatcctggaccatcttgaagttgaggcccaaccaaccgccgtctttcgactcggacgttacgacccgcagcgaacaacaccacgcccgctcaaggtggtcatgccaacaaccacacaccaacacatggcactcggaggatggaagcgcgagcgtgctcgactccgttcgcaacaaaatttggcccgtctgttcgtccgcccagcgctgaccaaagaacaactcaaggaagaatatgaagcgcgcgtccgaaaacgtcaacaaaaccctgctcccgtggcaccagcaatgcaacctcgccagacaaatgttccgactcccgtcaaagaaaatgcaccaaaccagaaggaggccagcgacgacatttccaaaccgctggaagtttttgaccaaacaatcctcgtatgttatgaagcattaaaatcattaccaccaaacgacaaaattgttcaccaaattcaatcactcgaaaaacaataccctcgtcttttcaataaatagttctgtcagacctccaaacatttcctcaaaaaaaaatacatttattccagtacttcacatttctcaccaaaatttttcctcaaaaaaaaaaaaaattttttttttctcctacaaccctaaaaaaaacaaccacttttccctttgttggaggtctgacttttctaatttctgcttctccattcaaaatttcaattcttttatcactgctttccatttcacctcatttccgccaaaagtgtaagtggcacatgtccttcttttggttatttttatttttgaataaa

SEQ ID NO: 76827 - DNA, 325 bp, Heterodera glycines
atgattatcactttttttcagcagaatggggaaacactgccgccgccgccaacgcaatttacaatggtcggaggagtacccgtggcactgtcacctgcacaaactgctgctgctgctggggttcaatttgttccgagtgagtgttgcgtggattttgaacatcattaacattgtatagacccgtcatttcccattttcagagaacgattcaaagtatgagacattggccagtttggatgcaaacatctttgtgaagttaacatgcatcggattcgaacctggaaccccccttttggtgactagcacatacatatgtatcaattaa

SEQ ID NO: 76828 - DNA, 1089 bp, Heterodera glycines
cacaagtgagcagcaaccaaatgtcggacgagccaccgccaccagcagcgccggagacgcccaaggaaccgccaacacaagcgcaggaagtgccgccaccagcagcgccggagacgaccaaggaagcgccaacgcaagcgtcagaagtgccgccaccagcagcgccggagacgcccaaggaaccgccaacgcaagcgtcagaagtgccgccaccagcagcgccggagacgaccaaggaagcgccaacgcaagtgcaggaagtgccgccaccagcagcgccggagaccaaggaagcgccaacgcaagcgtcagaagtgccgccaccagcagcgccggagacgaccaaggaagcgccaacgcaagcgcaggaagtgccaccaccagcagcgccggagacgaccaaggaagcgccaacgcaagcgcaggaagtgccaccgccagcgccgacacgtcttcagccacgctcagcgcctatcaacagcttcaaggatgtgcgcccggtgctgcgggagatgctcgaccagttgcaccatccgatcatcgacactgtggagcgacagaccgggatggaccgcgagcaggtaaaggaagggaaggggaagacattccccgctctaattttacaatgcttttcagctgttcttcaccgtggtcgccctgttgacgttctacctgctgtttggctcttacaacatgttcgtgagcaatgtgctcggtgggttttcgcctttttttttgtcttcaccgcctccactaatttttgtcatttttcagtcaaaagttacccgttctaccagagcgtgatgaccatccgatcgcaaagcaaaagtgagtcaatttttccaatttttgattttaattaatatcccaatcccattttcagcggacgacacccaatggctcgcctactggtgcgccttcgccctcttctcgctggtcgaccacttcatcgcgccgttcgggctgtatctgctgctgaagacggccgtgctcgtctacatgctcctcccgcagacgtacggtgcgcacaactgcttcgtcaactatgtgcagccgatgatggagcgatttgcggagcgccgtgtctga

SEQ ID NO: 76829 - DNA, 658 bp, Heterodera glycines
atgcgccatcatcaacttcgaactcggaaaaacaaaagcgaggcatttgtctttggtctgaaggtgggaaatttgatagagaattatgaaaagttgtcaaaggttttcggtacacgcacgaaaaaaacgtccgatggaggtgcactgtgtgtgctgccatgcccgcgtgacaattgcggacaaaagtgacagcagcatgtccggttttctcggacaaaaagaacaatcatttgcctaagcccccgaaacaaaatgtttgggaggcatttaattcattagacaaagaagaatttaggcggaaattcgacggcaaaaaactcgagcgcgtgaaagccgaaccccgaatcaggacaaattgcggctggatggcgaggacatcgtgctatacgacagtcgcactgtcagaattggaacaaagaacgttgtgctcgtttttgggtgcgaacgggttgtctcattaggggccaaagacagaatttatatttaattttttagagtttggacatttgagcaaaaacagtgcaagatggcatttggacgggacaatgatgccgagattcacgatgtcattacggatcttggtctgcaggtcgaaggatacgcagaaaaattgaaggactacgaaaacatggaagattcaagcatggatgttgcttaa

SEQ ID NO: 76830 - DNA, 53 bp, Heterodera glycines
ttcacattcatttttaccatcgccaccaattgtgtgcacgcgtaatttctgag

SEQ ID NO: 76831 - DNA, 643 bp, Heterodera glycines
atgagaagggccctgaatttgaatatcgattatacagccagcgattatctagccatcatacaaatttataatatgataaaatgtaatacaaaatcctaaaccaaatctatgaaaattaatgttgtgtagttaaagaaaatcggatattgcttttactatagaaaaacccaaaataaaatcagattttaatcttctaatatttctcagaaattattctaatcagccgatcaaagccgttgaaaatcacgtcggagaaattgccgcgaaatttgataatctaaaacattattttgtgttgttaccaattgcaaaccgtggaataaaagcgcttttcactgctaaacgaaatgtaattctgtcaaaaatgcagtgtaaacaaacagaaatggccagctttgtgaagaaattcaaaatggagcaaagtgccaaaagataggtaaataatggtggcacgtaatgacattaattagcaaggattcgtaaaaaaataattttatagcctattaattcattcctcatttggcggttacatcaattagagcagaactatttaaaataattcgaaataagcaattaatgcaaaatagaagcacatccaatgagcgcgatcagcttggatttgcatttttgaatttcaaataaa

SEQ ID NO: 76832 - DNA, 1859 bp, Heterodera glycines
atggaagtcgagcgacggaattcgagcaaaaggctgctgctgggcaacaaccaaagcaaaacgcccgaggcattgtgtgttgtgaaagtgagccaaacaaatggccaattttgagctttccacgcgttacaacgcccccttaggcgatattatgccaattaatggatcgtaaatttagcagcgaatacagtaaacatggcatttttggatttattttgtttttttcccaatttcagttggatgccggcgacgacgggggcgaaagtttggccagacgatgttcggcacgcattctgtcgacggtggccaatcagttgagacttcggcggacacggaccagcagcaatggcctttagcagacagaacaccgaatttgccaaatgtacaaacgctttttaaaaatttaattttctctctacgccattcctttctctgttcatttttcgtccattaaaaaagagaccattgaaattcatttgaacttaaaacggaacaataaaatctcaattttaaatagttttatatcatttaaaaatcaaaattcattgtgaaaattttgtataaattacgtcatttgttttttcctttaaaaagcattggtccaatcacaattcaatttctcacaagtcccccccccttcctccgttcgtctctttttctgtccattcaattggccatttcgatcagtgcgttcaccgtcgagtctttggcccctcgattggcctccaaaactgatcggatcacttctcggtcaatggtcggaaacatttcctgcatttcgtccaaatccttctccgagaaagcaacttgagctgaaaacaaacaaataaattaaataatttcacaaacaaaataaatattcagttggatggaaatggggcgatttattgctattaaaacggagcaggtcgtccgtccccccgaattttttttttattcaaacctagaaatttttcataaaaaaaaactcataggaaatttcttagtaagaaatttcaagaaaaaaattttttgagaaaattttcagcgattttttggaaaatttttgaaaaaacttagtagttcatcataaaatttcgaaaaaatcgctgaaaaatttttttcttgaaactttctttacttagaaatttcctaagattttttttatgaaaaatttctaggttttaaaaaaaatttttttaatttttcgggggggggggggacgacgtggggaaaatgaagtgcaccactattaaaaagccaagttttcttactctgcgcggctgtcgccgtttgttgtccgtcgctttgctgcggaggcgcgggcacctgacaatgaatgaacgaatgagacgaacagttaatcagtcggttgttaaatgttaaagtttaatcaaaatcttccaaatcaaaacgggtcaattctatgccgacttttttattcgaaaattggtcaaattaaaatccgaaggaagcaattttctccattccccccccccctccaaaattcatagagactgagacgaatccgggactcccattcccggacttttgagggaaaacaccgggaaagagataaagtggacttttagtccttgaaatcccggcccatcgtcaaatcccgagccaattcaattcagaactcattctctgtttgttatgttagacctgttccgtttgttgttggtgttgctgtgggacaggcgaaaaggaaatgaccaaattgacaacgccttcctttccctccccctgaaaatggaattttagcaaaagggaagaaatgcaaaaactcattcattgtatttagcaattaaaataagaaattgataagggattgttattgtatagaaatttaaaaaatatatttattatttttagaa

SEQ ID NO: 76833 - DNA, 1666 bp, Heterodera glycines
gcaaatccgattacgattatccgattccgattatggcccaaaatccgattaattgcgattccgattacgattacgattccgattcggcacatccctggtatataagttgattttcgtacgagttgccattgaccctttttttattatttaattaaatttattggtaattgtttagcggtgggggtgaatcaaaatctcctcccaaaaatgcgagattcgaaaattttaattttgagtttttgctcaaatccgggttcgggattcgacgtggctcaaaattaatatcagattcgggttctccgctctttgatttttattcaaaaatttatttaactaattattcttcgaattcaaattttaggccattgtctccgcccgccgaccaaaacaacgaaaaaggcgccaatttgtgaacctatggccattgagaaaagaagaaaggaccgaccatttgattacctctgctggacttgatttgatgctattttctctttgaatgtgcttactttttcttttgtttaatggattttcattcaaaatcaaaattagattttccgcggctaaatgttgatatttaataaaatcaacaaacattatgccatcaaaacaaataccaacgtaaatttttaaaatttatttaagtggcttataattttatgtagagcgataacgcaaaaatgagttctgctatctctctccccattttatttttgcgccaaaagtcatttgaaaaaaattgctttaaaatttcaaaaattatcgaaattttaaaaatgatgttgagcctttctctaccctcgagcccattggcaacaatttaaggcgaacagatttgaaaattgttttgataaaaaatgcgattctcgtgtttttctcatcaagtattatcgtaaaaaataggaaaatcctaaaaatccaggctttatccaacgcattaattcttctgctatatattgtgtgacatcattcgaatttggccaaattgtgcttatttctgccaaaaaatgaacaggcggtaaggcattttttaaaagccacaaattcctcacttatttagcctaattgtttcccatttcagttggatttgcaacgacgtttggatggacattttccccacttttgaccatgcccaactcggcctcaaattggcacttctttcgccacgtttcaatgcgttggtggacaaacatttcgatggcaaaagcgaattgacaatttggagaacgatcgaaattagcaagtgcattggaacaaaaccgaagctatctgtgcggatggatgacaaatttgtggaatttccgttgccggaccgtccgttgcccagcaaaatccgttttaagcaccttcatattgagtaattgaaaatcagagctatggcaataaaagcatttatttcattttcagttacatcgatcactccgtcatcgcttttcttcgttccaatcaccaaattttcgacaaaagaggcaccaatttagacttgtggattccatcaccacacaccacggatggccagcggatttgggatgtttttgttcgtgaaatttggccaattttttcggaaaatattcgccacttgggctttaccggtgctgatcatttggacaatttgatggttgcactctccgagaaaagatggacaacccaagcgattgcgttgcgatga

SEQ ID NO: 76834 - DNA, 2366 bp, Heterodera glycines
tccccttgtcattctgtgcgcactttcactgctgctcgctctgctattttgctcgccacacttctttgggtggatatattttttgttggattaatgccattaatggtgggggggggagaggatgccgtggcttagtggattaagagcttccacagtttaattgtatcgtgggtttgagtcccattcgagtctcaccaagataagtaaatcgttcgtactctcaacaccgaaattaccctcatcgagaccttccaattagcttcttgtttctcgaaaatcgtgactccaaaaacccgagaattttcacgagatttcagaccacactaattttcagtgggtagcacaatgctgcctcgcgcaccgttccggcacgccaaatcgtacatcgcgcactcgcattggacgcctctcctgtgcactgttgtgagttactgttttttgaattcagtcgagaaatggtggccgaaagctttatgttatttttttaatattaaataaatttggaggaacgtggtaattaatgataattgcttaatgataccccccctcattaaataacagcaaaaaaattttaccgtatatattcacagtacatctttatcaaacaatacagttgataacagcccttagctaaacagtgtttatattttagcctggtcagcgtactgtgctttgcactgatgggcgcctgcctgtacggtaatgaacacgtcaacaaaagcgtgcgcgaatcgaccggcgcacttgcgcatgtcgcaaacgcattccgtgtcgcaatggaaacggtgttgtttaaattttggggaaacgaggttatcccaggacagaaagttctgtatctcgaaacttttaccctccattttgtgtgtttttttggaaatttgactccaaaatgatgacaaaaaatttgtcaaatttttcaccgaaaaactgttaaatttctgctttttttttcactggcgctgaaattttcgaaaaaaaattggactaaaaagttatagtccgaagagcaaaaaaaaaaagttttcggattccctcgagactcttgacttggtggtgttttgatttgagattaaagctcgaaacggtaaaaaaaaaattatagcggtaaaaaagagttttttttttgcaataaattaattacctgttttaagttgccgaacaatattgaaaatgcctaataattaagtcaattcattcttaattcttttcaaaaatttcagacacataaattgaatgagtcacaatggcatttgtcgcgtcacatcgatcagcttacattgctgattgaacaaaagagcaaagatgtgatcaatcaaactacggtaaaaagaaaatcgaaaattaacaaaaatgattttttttataaatttttgaattttgagattttattttatgttcagatgatccgagaagctgattcgctgctgactgaactgtcggataaagtggacgagctcaaacaacgcctggggcgcacattggccattttggcggacacgcaatttttggaggcggcaaaacggaagggcgaaagagtggagctggagaggtgatcagagtggcggaataatgagaaaaaagaattaatcattttagtaattaataatttttcttctgattgccgatggtttttattaatgataataatttaatttttaattaatttaattattcatctgagatgaatttatcttagagtaattaattaatatttactattaatcaattaattgctaattaattaattaactgtctaagattgttttgaatttaggatagttaattaaataattaatgactattttaaagtgattttcggtttaattaaaactagggttgttattaattaattgctaataattagtagttatacgtctcagataataaacctcagataattaattaatattaattaattaattaccctctctcagatggttgctctgcctgttgttgcctttgattatgctttccgtgctgttcgccggtgtcattgcgttctgtcgccagtcccgtaaaggtgccatcattttctctggccttggcttggtcatttttctcgtcacatggcttctcttttctgcggcatttccgctcactgtggtaaggccaacaaaaaattaatttaaaattaaaaaaaatagttggaaataatttttagcgggtattttgtaatcgtctatcggatttatgcatttaaaactgtaaaatttagttcatttaaaaaaattgctaaaattttaatgggaattactaaactttttttgaatttttagttacaaatttcaaatttctccaatgaactctcaactatttcacttggattttcaaaatttgtcaaaaaaaaaactccaaaaaataaa

SEQ ID NO: 76835 - DNA, 848 bp, Heterodera glycines
atggacagagtggtagtgaggaaaaaggctgaatttgcaaaagcaccgtcaaccaactgcttaccaattgcaatttttgtcacttcatatgctcgtctacacctttatgactatatggaacaagtgctgcgtcttggtcataagctcctttattgcggtgagccaaaaaaaaaattttttttttcacctttattgacctattattcaagataccgattcaatttattacgtgacaaacaacgggagacagcaggtgcctgaaggtgaagcgctgggacagatgaagagggaacattgctcgaggcgaatatacgaatttgtgtccggtggtccaaagaattatggttttcgccattgtgatcgcataaatggagaggatgagcgtgctgaattgaaagtccgaagttttcgtctctcatattctgcgcagcaactgctcaacttcgagtccatgaagcgcattgttttggcacattacaacattgatggacaaatgttaacacatttttctctcacataataatcctaaaattctattccacagagatgatgtgctggacatggaaggtgttcatgttgtcccgggaagcaacgcgtcgataagaatcgaatttccacaaattggccgaactccatgttcggatctgtacacctacgacgctcacaaagactaccaacctcattatgtgaaggggcgcattcgccccagcatggaaactgtaccattcggatttcgtgaagcacaaacggttcaagaacaagctgaacatcaccaacgacagctgaatgattttgatgacaacttattaattgttaaccttcccggatgctcaaattggaatcaataa

SEQ ID NO: 76836 - DNA, 1557 bp, Heterodera glycines
atgaggaggagaaggagaagaagaggacaacagcaacaacaacaaaataataataacgatgacgaagacgatgatgatgataatgatggtaacgaggagggagacgacgatcacggtcatgatgctgataatgaggaagaagaagaagttggaacaaatcggtcggtcagactttgctttttcgacgctgaaacgtcccaagatttgccacttcaactgcgtacaaaggttgtacagaaacatgttccgatgctcattattgccgaaattatctgcgaagcgtgtataaatgaaggaatttcggttcattctggtgttggacaatacgcaaatgggtgtgtgtgtggtcctcctgcgggaccaagggggcgtcgctggtgttctcctccgtttctgaatgcacctgaggatgacaatgctctaccagccaatgtccactacaacccacgaagactgtttttccatagttttgacgacgctaccaacaatgacccggtggacgattttatcaactttctcaccggaagtggtccacatggtgtgaaaacaatttgtttatcacacaatggcggaaaatacgacattcatttaatactggaggcacttcaccggcgcaatttgccaccaaagcgtatttgcacaacgggactaaaaattttttcgatgactttgaaagggaaccatcaacgacacgtgatctttaaagactcgctgaactactttttctgtgaattggatgcactaccacgcacatttggattgaacgctgaagttgcaacagcaaaacctttctttccttatctgttcattcggcgtgaaaatttacaccaaagattgcatggtttaccgggcaaagaattttatcagcctgatcacatgaaagcgtcaaagagagattcctttatgagttggtgggaggtcgagaaccgttctgcacgcttccaattgcgtgaacaactcatcctgtactgtatgaatgatgtggcaattctgcgcgaaagtgtgcttcaatttcgccaaatcattgctgaaaatacgagaggactggacccgtttaaaatctcatccacggcagctggtcttgcgttggccaccctccgccgctgctttcttccaatgaacaagcttgttaatgcgccagaaggtggctacctaagggggcggcgagcatctgctgaatcggcacgatacattcgttattatgaaatgacgcatccgggggtacatgttcggtctgcccaatggtcaattggtgaggctaacgtcgaagacactggctaccgccttgatggattagtcacacgtgaaccccctcaacgcaaccttgccattgaatacatgggttgcttttatcatggtaaaaaaaaggtcgcccttttcaaccgaacaaaaaaaaaatgcttaaaggttgccccaagtgttacgctaacgacagacaacaaaaattggcaggtggaaggacagccgaagacctgtatgaacgaaccaagaggcggctatttgaactgcagaatcagcatggctttgagctggaagttgtctggggatgcgaaatga

SEQ ID NO: 76837 - DNA, 2307 bp, Heterodera glycines
atgaattattcagattcgccaagcagacgagcaagtgctgttgcaaattgtttaccctctccgtcaataatggagttggcaaaatcggcgggtcttttgtccctaaatccgagcggtaaacaaaaaaaatttttggaggggattaaatttcagaaaaaatgccaacataatttaaaaaatactttattaattgaaattatcaaaataattataaaaattaaaattctttaatttatataacattttttttattaaactcaaatgaaaaattaggaattattttctaaagaaaaaaatatatatttttgttaaaataatttataaaattaattttttacaatatttaaaaaatgcaaattaatttgaaaattttttattaattgaaattatcttaataatttataaaatgaaattctttgatttaaataacaatttaatttcgataaactaaaatgataaaattaagctgatcaaaattcattcttaattttaagcaaaaatattttttaaattgaaataattaaaaaaaaaattataattaaaataataaaaatatcattaacaaatttaaattttttgcagatttggtgtttgagtcgtccgtgctcggcattgcctactacgactttgtgctgtcggttagcgaggttgaatatgcgcctgcaccatctgctggtgctgaacatgaacaacaaaaaaacgaaaaatcgccaaataaaaaagcgttggcgaaacgtcgtgtgcacgagacgggaagtgcgccgttgaacggaacgccaacgatgggcggcgctggcgcaaatgcggcgccaattcaaagaaagcgttgccaaacaatggaaaaggaaaagggcggccgctcattggtggccatgttgcagaagcagcgaacagaaatgcaactggtgaacaacaaaagcaacaacacaagtgggggaaaatgaataaataaataaattgaatatttgaaattaaaaaaaaaatatatatatctttaaaaaattatttaaaattaaaattgattatttatttaaaaaatgaattaaaattatattttcttatttaagctatgagggttttttgaaccctacataaaatctttctaaatttcgaaaatttttagaaaaaaactaatttttgaattatttctttttaattaaaacctaaattaaatttattttactctattttccaaattaatctactaggatttttgtaatccaccatataaaagcaacaatttatattctagccaaatactaatttattatatacataaaacttttttcttttctaaaagttcttgaaaaaatacaaaattatttatttattgtatacaaaataaactatgtttttagtttctcaatttttaataattaaaaaaaaatattttttttatataaaaaaaaaatattttcatatattcctttaaacacaaaatttttaatcctaagctttatattctagcaaaaaatgtatttattatatgcaaaaccttttttatttctaaaattaaaatctttttaattttcttttttaaaattaatttttatacaaaataaattccagaatcttcatcgcttctgccaagctttgagaagggttcgatgggcgaaattcaagaaaaatgtgaaattgaagaagcagaaaaaaatagtagcaacaccacaagaacaccatcaaaatcaccatcaatagaacgcaaaaacaacaaaaataattgtaataatacattgtacagaatatttttggccaaatttgatgcccatacaaatgtgcaatggttcgaaagtgtgttggtgccacgggtaaaattttaaatgttaatttagataattgaagcattaaataatttataataatggggcctaattttttatttatataaattacaaagcattatatttttttttattaaataaaacaatatcaaatttattttataaataaggtaatataaaaaaaataaaaataaatattgtttattaataaaaattaaaaatcaatctaattctgggggtccagatcagggtttttttgatctaatacgtcatccattttaggtgggttttttgggatctggtattttctgggtttttgccagaaaatacaagtccaggggcccagacttttttcaaaaatgtcataatagaagcaaaaatgaaaatttacagttgtgacttcctaaatttgctgaaaagttggttttcaaagcaagaaaaaagaataaacataaaaattgaataaacataaaaaattataaaaatagaattaatctattgcagagatatttttaatacaaaatta

SEQ ID NO: 76838 - DNA, 222 bp, Heterodera glycines
atgaattattatgttaatggaaagcataggcatagtaatgggttagaactggggcacaacagaaatttggtctctctaattgcctgcgggggcacttcaggcaattcacaccgcgattggcacatcttcaaaaagtaattaattaggtaattaattattataaaattaataattaattttagagaagacactagaggcccggaactgggatttcagtattga

SEQ ID NO: 76839 - DNA, 303 bp, Heterodera glycines
atgcccaaaaaccaaaagtcaaaacgtttctccaaaaagtcttcgtctgcgtcggcagcattgtcaagtccaccagcattgttggacatctctgctctaccaaacccggtctatgaagacatctcatcaccggaaggatcggtcattactggcgccgtggtagccaatacaattgtgtcaacaattgagccaaacttggacaacgcagttctgacaacgctttcgccggaagatgttgatcggatcttcgctgatgatcccgggatggcagaggaggttggccgaactgatcgaggatcctga

SEQ ID NO: 76840 - DNA, 634 bp, Heterodera glycines
atgggccccccatgcacatcgccaaaaactcctaatgacgagcaaatagtgccggaaaaattagcagttgatgatgaggaagaagtgcagagcaatgaaccgtcagaagctgataattcgaaccaagaaagcagtgaatcgaccgttacaaacagacaaaatgtgaccaaccaaacagttgcagatattagtggtgacaaaagatattctctaagaaatcgattggctataacaaaaccaaaacggttcactgaatgatttttctgtatataatgagtcctatcagccaatattttagataaatcaaaatcatctttgcacaatcattctgaataggcctatcaccaacaaatgaatctgagtaagcaaaaaaaaaaaaacacacatttactcacaaatatcgagcaaatcagtcatgaatgggtaagtctcgaggaaaatggttttaagcttgaaaaagctgtccgaacatttcttgttgccgaccattgatgcgcacacagaagtctcatcgccacagaattgccgggataagcagtgaatgacctcgtgacaacacacgcaacaagctttgcccacggcttggtatgtgcacgaatgccggagggattaaagtaaaagcttaaaaaataaa

SEQ ID NO: 76841 - DNA, 1294 bp, Heterodera glycines
atgtttattcgaaatatgatttttattgaccatctaatgtcgagattattaaaaattattacaatagatggaaattttacaagttaccgaggtggttgatagtttaactatatatatataggttaatgtattttgataataaattaattagtgtataaaagtgttgtaatgtattcattaaatatctgtatgtctaattattgcaagttttttgtgtaatgttaattaagaaacaataatcactaaatgtaggaaaatgacaattctttgaccaatatgtttttacagaggaattttatgacgagggttagaaatcttattaattaattatgacaaattacaaagaatgttttgtagtgatgtatgatatgggggttaattgttgtgacaatttatgaaccaattatttttgattgaagtgttttatatagggatttttttatagtatgtgtgatgtttttaaaacttatgtgattaattatttcaaattaccgagaatgacttgtaatatttttattagttgtaaaagaattctaattaataatgagtcgtaaattattttgtataatatagctaaaaatcaattaatcatttcaaaggcggaacaatgtttggtgagatggttttacaattatttagtatggataagtattatgataaattactaagattttttggtagtgtatgtatgatatctgtattaattgtaattataaccaattattctttaatttttacaaactgaatatttctagggcaaagaagggttatgatgaaacttaaattatgtgtcacatttttgttgtaattcaatgaaacagaatacttgaagctgagacaaaggaaatgatgaacactaaatgagtatgataattgttgacagattaacttagttatggtattgatggctaggaaatatggcaattaattctaaaatatctgaaaaagaatgcaacttttcgggtagcgataaaccttttttaagtaagtaactaattattacagccacaaggattttagaaatgtataaaaacaaggaaaataataaaaggtgaattttcggtagccaatactcggctctccggtagtcagtacctaattaagctcggccctccggtcaccaatacctcataaggttcggctctccggtagccaatacctaattaaacttggcccgccagtaaccaatacctcgtaaggctctgacaccgaacactgaaaacttcattcttttgactatgaatttttatttttatgcaaattgttatcctcgtggtctaaaatttatatgaga

SEQ ID NO: 76842 - DNA, 1838 bp, Heterodera glycines
atggaatacgtgcttaaactccgtggattgacactcaattatgatgtgatcaacaaccaaggctttagatataaaaacagcaagtcaaacgttatgctcaaacaggagagattgaaccaattaatgtaatatacccaaactttattagacccaatattcgtgatggtggatctgtaatatcaagctctatgcaaaaatgttatcagccttatattgggaagggtattgtaggagccgattataatgttctcaattttggacacactttgtaattgctcacccattataatgtcttttcaccattcattgtaactattttgtcagcacacattgtaataccttcttcaccaatcattgtatctctctcacacatacacatatgtacccttttgtattttgttcaccatttattgtatctctcttccacacgcataaacatataccccatacacacgtacacatacatgtaccccttttatttctctattttatacctcaaattgtgtaattttgtcattttattcacgttttaataaaatacatgaataattaatgattggaagatacaatatgaaaataatttatcatttgggaatgtgattttacgtagaaaatgcataattaagctaacgaagatagtatttgctaaattaaagaaaatatattattaagcggatcgatggtaaaatttgataaaaagtaaggaatagaagatacaattttaaaaaatgcacgagcatgtcgtttttaggtagaaaagtgcataattaaggagtgaacatgcatgcagaattaagcaatggaagttacaatttgtaaattattaagcatttgggaacgtcatttttaggtagaaatatgcagaattaagagaaagaagacacaatttgtaaattattaaggaatagaagatacaatttaacaaaaattaagaaaaataatgattaaatgaaggaattactcaaaaatgtgtaaaaattacacacatggggtgtgtgtgcatgtgtatatgtgtaagtgtgcgtgtgtgtgtgtgtgtgtgtgtgtatgcgtatgtatgcagtgcgtgtttatgcgtatgtaagcatgtgcgcgtgtgtgcgtgtctatgcgtgtgcttatgtgtgtgtattgtatgttttttcgagggtgaggataagtgtgtttgaaagttctgcataatatttattaacttatataaaactcgttaattttaatcataaacacaaacaatgctccttgcctaattcaacgtaaaataattctaattataataaggaacatttacaattccattgaataagtaatattcaaaggaaacaagagaaatagacaattttgaatctaagattgaaccgagaatagaaagtaggtttgacaaacagctgactgactgtatgtgacgagaaagggtagataagggctaattgtatgcgtgaagcaggtcttgtaataggaataaatgaagaaatcatataagaatattgtagtgcaccatagaatcaaggacaattaataatgggtgtaagagatagagatagagaactcagaaatgtggttgaagagagtcaatattaaatagtgagaatttaatgtgagttagtaagcaaacattaggtaatgtatagggaagagaatagtttgataaagaacaagaatacgaacacttggaagataacggttcgagaataaaacatagtgttggaagaaaagatattgaaaaatagctaacggaaacgattatttagacaatatgtaggtctgaaataacagtgaaagtaagcagatataagagtagagaaaatacattacggagaaaaggaaaatattcaaataaa

SEQ ID NO: 76843 - DNA, 367 bp, Heterodera glycines
atggctgagcaatctgcatttcaatcgaaattaatgttactacggttgaagaaggttacccatttaccaattgatactgacataaaaggaaatggtgagaaggaagctgaatttgtaagagagtgcaaagagaaattagagatcttaacccaacaaagatagctgtgaaccaagaagagtaggattgttaaactatgcttgaacaatttgtgcgacatatttctttacgaaattacagcctttaacagactttacttcaataatgatgtactcgattttggagaatatttgggataatcgttcaatagacgtaatggccatcgaggattgaaaggtgtatcatgttttgattacctacgaaaataaa

SEQ ID NO: 76844 - DNA, 714 bp, Heterodera glycines
atgctaaacatatccgcttacttctattgcagttctctctgtttccaactattcatccacagaataatgatcaatttgccaagtgttcagttgaaaagttattgatctagaaatatcgcaaacaggccttatactagtcatacattcctttagtacatcaatgggtactaaaagacgctgccttccttaataatgccttagttcctttgagacatcaaataattccctcctaaacgataccagcgctgtcattaaaattttcaatgtcattacattttttctcattaatcgcctctgtaaatacaaattttccagttgagaagatagttgtggtagaatttgtacctagacccttcattatatttgaaagatttatgtggttgtttttagtggatggggatattaaataaattgaggagaaaagttttactatttattgtcagtaacaccataaattgaatttaattttaggtataatttacttaattttaatcaatactattgtatttattatttttattatattttaatacaactttaatttaattttttaatttagttttatttatttttatttttatttaacatttattttcttttaattttaatcttatttttatttttattttactttttatttgaattaatttgaattttattttactttatttattattcagttaatttaaaggagttgttcataacctctatcca

SEQ ID NO: 76845 - DNA, 1156 bp, Heterodera glycines
atgagttggcgtgaaactttttgtttatgtttactaggtgatcatgagaatgagaaaagtgagtgaaagtccacgtataaaggcaagctgatcactcaaaatgttaagctaaatctaatcagtggaagaaaccaatttgggagacaattttagcaaatcaatgatcaggggtaaattcaaaacggctatttaagccatcaagagtttgtgaaatttacataaatctatcagggtgatcagttgaaaaagatctaatcgatgcttttaaaccaaaaaatgttgaaatgaaagaccagtgtaatagatcactataaatcagcaaaagaatagatcattttgttggagcaacggcggtggtggcctaggctaaaagaatggaggcaattttgtgtaaataaaaagtgacaccacaccgatcataaataataataactcattaattaaataataataatgaaaaaaaaatcatcaaaatttatggtgataaaccattggcatttttttgaattggaaatgggcacaaacaaacaaaaaaaaaatttacgacacgggtttaaataaagtttaaaaattaatgagagagattttggaattgagaatggaaaaaaagcatttatcaacaaattgctaaagataatttaattattggctgaatgtgtgagaaacgaaaaaaagtgatgaaaaagtgccaaagccttaaaaatttttgtgttttaaaagagaatttgtgtcctataaaattttaaaaatcgggaaaatattttcttaatttaaatatttcagaaaaatcggaatggaaaatggactaattcaataatttaatatagatttttagagttaaccggccatccctttcttgaaaagtgaaaaaaaattttcaattttttaaaatccatttttttgaaagctttggcaaacagccagaaaaatatatgtcatggcatgacagagcaaaaatgagagagctgatttatgagatgatatcattttaaataattacaggcggcgaagaacaaaggcgtgccttttgagcacttactagcggttgttgtttttgcttttttgggatacattgtgtacgcgagaagcacaattctacccgaaatacatgaatgattgaaaacacatacaaaacatatgtaaagcaaagaataaa

SEQ ID NO: 76846 - DNA, 1277 bp, Heterodera glycines
tattcatttgactgatggcggtggtggattcaaagaagcgcaacttcatacattggcacaatgccatgccaacaatggaccaaaacaaactgcaaataagccttacggaattgaatttcgtctgcctcgggaaggcgaaatttgtgatgatgggtgggaaaaaatagaaaaaaataaaataaattattggaataaatttaccgaaaaagctaaccaatagctgaatataacaccaattatatttgaaattaaattctaaattgatggtaacattctcatctgctacccagcaatgcttcaacgaggcgatcatttggacaccaacagaaattcaaaagttacaagaaaattcatcgttggtgctagtacggtaaaatgctctaaccacaatttctggctaattattaattacataattaaccctcagggcaattctattgcagaagaatgtgttcaaaaaatggcaaaaaatggctacaaaaatggcacaatgatttggcgtggcctcaaacttcgcacaatgcaaatgaaaaaggaccaaaacaatggaagaatcattatttttgagtcatcaattgcttcacagaaacagttgaatatttttaattgttttaaccgaattttttaaaattttaattttacacttttataaaattaaatttatattaaaattattttaagatataatttgagtgcaggacaacacaaattttctgtactttttgctttgaatcaaactgctgtgccattcacgcgcttttcatcggtgaaaaatggtgaaaatattattttatatattttaaatgggcattctcggctttcccaaaatgccatttctcagatttcgatggcagtgccatgcaaaatgatttcctccgttcaaatggtccgtcttttttgtcggattatgccgacctttggcttcttggacttgacatgctgccgatggcacaccaaacagaacagcaaagagaacagctgaagatgaagctgttcattagccgcagttccaaatgctccatggaagcatgggtaaaagaaaggcaacccgacaaaaaaggaccaaattttagggatttaaagattttcctattttattttatgggctttatggaaatgatatatttggcaactatttttcaattttagctatttcggtcaaatttaattcctttaaagtttgtccaagcgtcgcattcccttgtgccatccgatccgaaaatgcaattcaacggttcgttgtgcaaaccaaatccgacggaagacgtatatgaacg

SEQ ID NO: 76847 - DNA, 1049 bp, Heterodera glycines
atggtgcacattaagagcattatgaaaaaggaaattgttttggcaattgaaaaggtcatttgtaggtggaccgcggatgattaagcagtttgatacaaaacaaataagctaaaaaatctttcaaaaaataaaaaattcattatgtattcaagagccattccccaaaatgactaaatttgcttttccaagacaggatttttagggactattcctgtaaaattttattacaaacattttgttggaaaaggccgcttaattgtccattggtatataatttaagaatgtttcaagatgccagcagcccacggatttgatgaggcgttccctattcaataatatggaaaataaatgtataataaatttgttaaatgtcagaaaactgccccattcacagcaaaaatatgacgtgtcaaaatcagtcacatttccattccaatgcaaatccgtggcgcttcttcgaccttcattattaacaatcatttcagcagctcatcacccctatccctgctatgatgaagtacgaaaagtgcaagttatcaaattaaaagcaaatgattatcttaaaaaattaaaagcaaaataattattatttaattataatatatattatttaaatttcgcaacataattaaaatatatttttatattaatcatattcgtggtgaaccgaagctacattataactatattacctatttaatggatatttatttaaaaatcaaacacaacaaataattttacattttgcgctaattttagttacaaaaactgaaaacaaatatttcaaacataatttcgtaaaatggttttgcgaggagagtaaaaccaaatttctcaaaaggaaagagaaaaaaatacacaaaaacgagatccgctttgtagccaaaatttaagaataattcttaaattgaattaatataattattttgcttttaatttttaaaataattattttgcttttaatttgatcacttgcacttttcgaacttcgcccaaccttgcacttttttaaatatgagatgtaatatattttaaaaactgaaaataaa

SEQ ID NO: 76848 - DNA, 509 bp, Heterodera glycines
atgatgacactgttggaacaacttcccggcggtggtgtcgtcaccgccaccgaatctccccaccaaattggccatttacatcaccatcatcagcaaccacaacagcaattaaaggcccagtcggcctcctcaaatgggccatcaaataacagtgccgccgggtcgggccatggccaatcgccgggcggcggcattttgctgtcggcaacttcaacacccgacggcacattgatgccagccggcaccactgatcatcagacagccggtggccatcaaaatgtcgcgcatatgggagcaggtaattaattaatgagtgctaattaagggggaatggttgccttttttgaatcaatcaatgctagtgatcgggactgagattaatgcgagtgttgctctggtgacgggaggttgaaattctcgaaaattgggggaattgatgaacaccgaatttggatacagattttcaggaccgtaatcaaggggggggggggggaggcattcataaataa

SEQ ID NO: 76849 - DNA, 851 bp, Heterodera glycines
atgtgctcgccgggcagctcatccaattcagcaacatcatcatcactgtacaacaacaataaccagcaacatcaacaacaacaggtagcagcttgagccagcctagcctatctattgaaaattgagaaatttctagaaaaaaaatccaccgaatttttgcttttctgtctttgtgtacctgtgggaagaaaccccaaattagttaattaggttcgaatttaccctccctattcatcaaaatacagaaataataaattattctcacgcttttgtgcgtaaaaagagttataattttttctggtgctttatgtctataaaattccaaaaaagggttgcataaaatcgtgagagaggcgaaaaatttaactgaatgtggccctaaactaaaattaatttgtctctaattaatttgcccctaaaaaaactgatttatctctaataaattggacataaactaactaatttgtcactctaatttatttggccttaaactaactaaatttttctctaattagtttggccctaaactaaaactaatttgtctctaattaatttggtcctaaaacaactgatttatctctaataaattggacctaaactaatttaattaaaacaaagcttccagtaattaacaaatgaattcccttccaacatttcagaatttcgctttgtccatcactaacaatcagcagcaccataacaacaatatggagcagcatcagcatcaccagcaacacaaccacggcaacagcaggccatcagcaggaggaggaggaggaggccatcaccacaatcacacgcgggagaaaaagaacaaccaagaggagcgggtcaaacggccgatgaagtag

SEQ ID NO: 76850 - DNA, 1157 bp, Heterodera glycines
atggctgtggaaaatccaaaaatgcacaactccgaaatttcaaaacggcttggcgaggagtggaagaagctggaggagttggagaagcggccgttcatcgacgaagcaaaacgattgcgcaacgagcacatgcaggtggtgattggtgattgaccaaaaatgagggagaaaaaactgatcactcactactgatcagagtgaaattcggacaaatttgacacttcatggatcaacaaacagttgttgttggaacgaaaacatctgctgctcttattatttattccttttaaaaaatatttttgtaaaattttgcaaaaacttggaaaaattaaaaaatttccattttatgtaaggttggaagcatcgatgtgtgctgacatcaaggcaatcggaaatcggaattccgacggcctaaaaattttttcggaacagcccaaaaatttcataaatcggaattccgacagcctaaaaaatttcggaaaccggcaattggaatggtaccatttaaatttattatcacttggcaaatcatttatttgtccatttgtccatttcctcaatttatttccagaatttcaaaacaggcaattttacaggaccatccggactacaaatacaggcccagacggaaggccaagcagcaactgcaccaacagcagcacaacaaccatcaccagcagcacagcaacaacagtcatcatgccaagaaaagtggtgccaacaatcagcaacaccaaaatcatcatcatcataatcagcatgcacaatgttcggccggcactgcgattggccagcagcagcaaaatgccgtcgttggccatggccatggtggccccggggcaatgccaaccgcggcagacgcattggctgcttttgatgcactcaaatgcttgccgcaaccggtgaggcgtgatttgtggggcataattgaaaaaaagttggacaggttctctcgagagccttgcgcttaggaaatttaatttttcccatgtttgggcacgtttttctcgactcagtttatcttgaaaattttaaatttaaattttttcgcaacaccacgattgtttaatcctaaatttttgtttcaacttcgttttatagtctcgaaactaattctcgacatccattctcggtaatgcaaatcataaattgaaaaa

SEQ ID NO: 76851 - DNA, 369 bp, Heterodera glycines
atgagtgagtatggaaaaaattgcattcaaataatttgtaacacatgcacacctgtgctggcctcttttccgagcaaagatgccacaaaaaaggtgggttactatcaaaaacaattttgtaaataattttgttttctttttattcaggtcatcaaacgtttgcgccgtgatgaaaatgcaccgcgagtcgaacctctcaatttggagcagttggagattccgaatacctatcgtgtttataagcgcactgagattgacgaggagcaattcctgttggcggacactggcgtttttcaaattcacggacagaatggaccccaacctaagatatcgtttaaaccattaaatgatggtcatttacactattaa

SEQ ID NO: 76852 - DNA, 282 bp, Heterodera glycines
atgaattatatgaaggccaaggctccaattcgtattcatcgacttcatttaataactatgagaataatcaatacttttcggatagagaatgcgccaacgagcttttatcaccagaaagaaatgataacgaattgtcaagaagttatgaacgaatcaaaccaaaatttttcgataaggaaatgcggggagtacatgagagaacagcttcgagaagactcaggagctcctatgaagaccaagctcaccgcgaaagttatgaagaaacggaaaaccgacgcaaaa

SEQ ID NO: 76853 - DNA, 411 bp, Heterodera glycines
atgactccattaaattcatttatatttattacaatctttgcaccattcagtggtatatttttgtttggtcaatcgcccggatgtgatcagaacacttttgtcagcaatttggctagcattttgcattgtatgggcgtccgttacccaatactcgtccatatggaaaactcaacgagggcaaaattggatttgaacgctttgaaaaaaatgaagtgcgattggcccacgcagccattggacggctacttgttgcattgtgcgagagacaatggaattccactgttggacggcagaaatttggacatgaaacgaattatagccatgagagacatcaaagaattgacagaaagccatggcattttgatgtgtacacttgaaccattacgaagacaaggtttaaaaagggaatag

SEQ ID NO: 76854 - DNA, 852 bp, Heterodera glycines
tgtctgcgccgcaagtgtcgctttgactgggcgccgtaaatgtctgcgccgcaaatgtcagcgccgcaaatgtcagcgccgcaagtgtcagcgccgcaaatgtcagcgccgcatatgtcagcgccgcaaatgtcagcgccgcaaatgtcagcgccgcatatgtcagcgccgcaaatgtcagcgccgcaaatgtcagcgccgcaaatgtcagcgccgcatatgtcagcgccgcaaatgtcagcgccgcaaatgtcagcgccgcaaatgtcagcgccgcaaatgtcagcgccacaaatgtctgcgccgcaagtgtcagcgccgcaagtgtcgctttgactgggcgccgtaaatgtctgcgacgcaaatgtcagcgccgcaaatgtcagcgccgcatatgtcagcgccgcaaatgtcagcgccgcaaatgtcagcgccgcaaatgtcagcgccgcaaatgtcagcgccacaaatgtctgcgccgcaagtgtcagcgccgcaagtgtcgctttgactgggcgccgtaaatgtctgcgacgcaaatgtcagcgccgcaaatgtcagcgccgcatatgtcagcgccgcaaatgtcagcgccgcaaatgtcagcgccgcaaatgtcagcgccgcaagtgtcagcgccgcaaatgtcagcgccgcatatgtcagcgccgcaaatgtcaaagccgcaaatgtcagcgccgcatatgtcagcgccgcaaatgtcagcgccgcaaatgtcagcgctgcaaatgtcagcgccgcaaatgtcagcgccgcatatgtcagcgccgcaaatgtcagcgccgcaaatgtcagcgctgcaaatgtcagcgccgcaaatgtcagcgccgc

SEQ ID NO: 76855 - DNA, 541 bp, Heterodera glycines
atgtacaatcgaagaatgaggaaaatgtgagctttttatacttctgtgttcaatattttttcttgttcaatgaaaaaaatattttaaaaataaaaattttcatttaaataattttagcccgatttgcacgggacttggaattatatgaaaaaccgggaccggtttttgctttttacccgggacgaaacttttctttttttaacaattcagaaaagctaaagttaaggcaatatttttacatttaagctggatttgcaacgacgtttgggtggacattttccccttttttgatcgtcctcaactcggcctcaaattggcaatgctttctccccgtttcgatgctttagtggacaaatacttcgataacaaaaaggaattgacaatttggaaatcaattacaatttgcaaggacatgaacacggacgaacctgttcttgatataattagcaaagctatgccttggccgttaccactaccggaacgtccgctgccaaaaaacattcgcattaactaccttcagattaagtacttgttgatttaa

SEQ ID NO: 76856 - DNA, 252 bp, Heterodera glycines
atggacacgggtggtgaacggtcgtcaaaacatttgatgccgaacggggaagacaatgaacaacagcaacaacagaagatgccaaaagtggtggaggtggaaaaattccctgcggcggttgattcatctccatcagtggcggccgacaatttggtggagggacagaatgatcatcaacagcaggacaacaacgagcacttggacagggtaattattactgacacaatgaatgaactggttgaagttatggac

SEQ ID NO: 76857 - DNA, 692 bp, Heterodera glycines
atgccgaaacgttgcaagaaaaaggatggcacattaagggaagcgcaaagtgcaaaggttgagcaatcattgcgcgagttgaaagtgagcgaacggtgaaaatgagtttagctcatcgcaattgagagaaaaaccccacagaaaatggccaaagaaaaaaaccaaaaatttaattattgcaaacgaaaattcgtttttcttcttatttatttatttatttataaagaaaagaaaaagtccacaaaagggataaatccacttactttgtggacatatacatacattaatcgtccaaaagtatcggattatacaagcacaaataaaataaaatcgccaagaaaaatataaaatgaggtcaaagtcaaagagatcacaattaccaaatcttttgtaatgaatgtatttgaaaaaattgagcagatgttgtccgatctgtgcaaaagtgaccggcgattgagacggaaattgcgtgccgccgcacaacgacagcaaaaccatcattcatcctcctcctcgtccgccaacagtgacaacgaatttctggatgaggaagaagttggaagtgaggaagaagaggaagcgaatgggtacgaaaataacggagaaatgagaggaggaagtgaggaggatgagggaagagaggagcaaacggacgaagaggaggaggaggaagaacacgcaaaataaataaa

SEQ ID NO: 76858 - DNA, 304 bp, Heterodera glycines
atgaatgaaacaacaacaattccgggcgtacacaatcgaaagtttgccaatcagaagaggaggacgccaaatacaacggaggatgaggaaagacggaaaaaggaacgaaaacggaagggacggaaacgacgggacacttccgaggacagtgaggaggaggacgaggaatggcacgagtcaggacgacgcgaagaggtgaatttctcggcatttttcaggtcttatcctcgaaaaataattggaattttattataaattacaggaggtacttttttgggttttcggcttttctagttcgggttag

SEQ ID NO: 76859 - DNA, 438 bp, Heterodera glycines
aggtgttgcccaaatggaagttgtgcctggtcggtgctgccatttttctctgttttgccttgctttacccgagcgtcttctcaccgatgctttccaatttgttcggcggcggtacccagcggcaacagccggcggccgcggaccgaccgatgcatccgtcgatgatggggacgaaccaacagcagcagcagaggggtacaaattttcccttttttacgaaagatataagttgtcagcggcattttgccggttggccaaccctctgaaattctaaatttaaggacgaattttttttttttgaaaattatacatcccccttggccacgcctggtactttcctcacaattaagaacgtgcccatcgccctcccccacaccatccaggcgcatccatgcgaataccggacatgcacaaccaacagcagcagcaacaacaggg

SEQ ID NO: 76860 - DNA, 1056 bp, Heterodera glycines
atgcgtttcattttactagtaaaatggggtaacgattagtgatttcgccgttatttattaaaaccaaaattcaaataatcttttaaccgctgtcggaccactaattatacatttgaattacctaattgctttttcatttcagtcaaaggacccttcaaattctcgcaattccggtcgcgatcacaactttttcgaaggcctctattttgagggagagataccacgaggttttgttttattgttaatttggaaaatactgaaagcagaggagaaatccctggtcttacaattagtattcggcaatctttggattaataatcaaaattttctataattccctttatttcggtcattaaaggcagaggagaggccccctccccaaaaaaaccaccgggtccgaatttcttatttttcattcatgttcctcaaattgaccattttattaaacgaatgaaaaatatatgaatttttaattgccttcccgtcttgtatttttgaatcgaatagaaaaaatcatcggtagaaccacctcccattttcccggatatttttggtttacttttcagttaccattttttcttaaatcatttctattttccatctttcaatccaatccagttccaacccactcaccccttttcccattttccccaccgttttgtcgtccatcggatgaccattcaaatttccccctgtcccctcttctcccgatttgtttgctttcccctcgccccaccaaactcaaaatgcatttttaagtaaattctccacttttctttgctcattccctccttcccctgcttcagatcggatcaaacagaagtacactttgtccagcggaccgggcggttcgaacgtaaacagtcgtaagtccattcattcattcatttcaatggtttttttcgccgtccggtcgaggggtgttaaaactaaatccatcgcccatgaaaatgcttttcccatttttggacaaaacaaacaaacatttcctccgctttattaataacagcgttcgaattgcccattcattcgctaaaaatgtcaaaaagcaataaa

SEQ ID NO: 76861 - DNA, 540 bp, Heterodera glycines
  unsure (1)..(540): unsure at all n locations
atgatcagcaccgaaattgaacttcccatgcctcagcgggtataagtcgtacaaacttgcggtcttttgcatattgtagagctttttatgctgtttccaatgagcctactcaaaatcttcccaacccccctacgaattttttccgaaaaatttcctgattttcagtgtattttgggttgtccagatcacgatgaaggagtgatctgatcatgttggtgcaaaagacttttttgatcagcgtcaaaagttatattagcatgaattatttcagatcatatatactaatttaatcaacctgagattttataatcaattttaaacaaatttgatacgaaattttaagtggtgctaaagatatgaccatgactgtaattnagtaaaaaaataattggatgaaatacgatcggggttcccgataatttccccgaggggtagggtctttttaatttaatttatttaccgatgatctaagttatctggttcttttcataaatcgtaaacaaaagaaaaatagaaaagttattgtctgttgtcaatcga

SEQ ID NO: 76862 - DNA, 1321 bp, Heterodera glycines
atgaggccagcaagaaatataaaggtcctgttctgccgtacgacattacagaagccgatttcaaatgtgtcaatgcttttcactcgaaaatttttgtaagaaaattaaaaaaaaattaaaataaaataaatttttcacaaagggtccctcgtgtggcgacccgaaattcgaaatggtcaaacattgcgcaaaggtaatacatgcaatattccttaaataaatattattaagtatgtgcttttatgataaattaaggtgaaattctacggagacacaccgccggagaatgggggaattaatgaggacaataaaggcgagaaaaggggaagggattaaagcagttttgataaatctttctcaaatttcactttcaaaaggaaggaattcggtaaaatttgaaaaaaatcccagcaaaccctctcatttaaatgtgttacgaatttgagccctaattacgcaattatttttgccaaattgtgctgcagatttgcttctgatgttggtcgacgggtgtttggtgtgtcttaagggcgaaagcgacgaatcgctgcgagtcaccgtcaaattgcgactgatttacactttgtccgccggctcattcttcaccgcgtgcgacgtgacgaccatggaaaccgagtaaaacaatggataagagacaaattaatcaaatacagttataggtaaattctcgaccataacccaaacaactccaaatttcctgaatctcaaaaaaataaattaattctgcttacaattaacatgaaaacacaaatcccaacggttagttgcactttttctcagtttatttaaaattcgctttgttggtctttgattaaaattctattaatgagttggaagagaaattgggagaaagtgattacccactaattagccagagaaagaatgaaattagctcatcttgtgcttttgcagagaaatcacagtgactttggacaaaaaagacatcgccaacaaaagggccgtccccccaaaaagtgtcgtctccgcgtcggacgacctcagcaacagcgacaagcgagtgaagaagcccaaagcagccgaacgggtggcgaaggacgattatgacgagaaggacgacttgggggaggaggtgctgtgcccggacaaatgtgtgaggaaggaggacgtggaggagaagattgacgagggccaacgccacttcggcacattcacattgcccggggtgttgctgcagcgcaaatgccgtgcatttttcgcgctggaagagccgaccggcaaattcctgaaagttcagctgaaagtggagcacaagtgggccgacaccagcaggggaaactaa

SEQ ID NO: 76863 - DNA, 1629 bp, Heterodera glycines
atgccgaaaattgcgctcggcactcgcgccgactcgggcgaaagcgagcgacagtcgtcgccagatactccgctgggcatttgcttggacccacacgaagccaattatttggatgtggcggtgctgcgatgtcttctgatcagaaattgggcggaagagggtaaaatggaaataagaaatataaatatgatgaaaagttaaacatttttcataatgagcggcgttccgtactttcaggcactttttgggctgtgcaataccttttgggtcgactgattgccatgcgacagcaccggtgcacccacgagggcaccttccgttcgcgcttcaattccgattcggcaacaattccaaccagaaaaacgtccaaaactgaagctgcgaccattgacactgtgagcagagagagaagccttcgggcggggcaattcgttgttttgtttggcattgaaatgccaattctctccccaccccccaaggagctaaatgatcattagcttttatcttttagaaaggctatctcacctgggccgatctgcaagagcacaacggagcaacgttcagcggtggcacaaaacgaacggacaaaatgcagccaaaggacacgcgggaagaacggacagacgaagcggtggcgggacggacggggaaaggggtggcatttgagagggatgagatgcaactgcagcagaggagcaaaagcgacggcaaacagcaacagagggagcggcagcaaacgctgggcgcggaacggacggcggaaagacggcgccgcatcagtctcagcgcaatgccaagcgacggtgtggcgatgttgccggggacgacttcgggcagcgtaaaaacttaatttattgctaataaccatgaaatttttcattttaagatgccgcgtccgagcattagctcaccgcgtcgcatgcagcgtgcctccagcatccccgcctcattccctcgcctgactgaactgctccaaggctttgcctcgacctgcaacagtcccgcgatgcaacaacggcgtcgccacgagcaaatcgccccggagaaaacagagtcaaaacggaagaactcccatttctttacagaggctattggcgccgccagcttcattgaaccaaacgggcacctttcgtttccgattgtgctgaaggtgttgggcacgcttatggaacgttgttgcgttgtgcgcgtttctgaggttggcgaatgggggcaccgtttagggacgctaattgttgttcattaagtaattagcagatattaattaattgttatagctaattaactcatattaaattaactaaaaaagattaatttccattacagcaagaagggctaattcaaattaattgttcatttaattgaagctgtgttcatctaattgtgcattatcttgaggttgtgctcactggttgtgacacttttctgaatatgcccggctccgacgcggccgaactgttcccaaaagtgttgcatattgtccttcgcatttccctccaactcggctgctccaatggatgcaacgaaggcgttcacacgccacaagccgagtttctacgcataaaagtgcgcaatttgattgcccaaatgcaccggacaaagtcagttttcggagacaaaatggcataa

SEQ ID NO: 76864 - DNA, 1503 bp, Heterodera glycines
  unsure (1)..(1503): unsure at all n locations
attgcaggatgcctcgtgcatggtgaccaaattggtgccatccctgcaaatcctttttccctccgtcagactttcgagcgtgtaattgtccaaaacattctgcacgggatcagccccagcctttcggatgccattgggtccgtctcccgttggagtttggtccgtgccgcgttccctcacattgtgcaggtccttcgctaattccatcgctcccttttggcacgtgccaaaattattcccccttttcagtgttgtgccgcccttttgaccgaacgttgtgcggaggaagaggacgtgccaatgagtgggtcgctggtcaaatcgctctacatcctccactggttgctcattgacgcggcggcggaatgcaatgaaaataagtgagtaaaattaacacaaagtaaaattctaataacttttcactttcaaaaccaatcccctatgtctctttcttattcactctaccacagtctctctctctctctttctctctctctctctgtgtctccctctctttctttttttccctctctatctctccctctccctctctctctctctctctgtctctctctctctccccttctttccctctctctccttctctctctctctctctatttctctctctctctctctctctctctctctcacatcgtctcttctctctcagatcagtctattatcccttttctcccccttcccttgcaccgatcagttttaccaatgacagtgccgcgagtggcggcggcggaatgccaaatgtgcgtcaactgacctattccgtttcctctgtccaattgttcgtttaccttttggccccgcttttcgacattgtgcgtgaggatgagatcaaaggccattatcggctggaaagcggcgttcgcctgtggcaatgcctttggcaaagtcggctgcccgagttgatttgtttttgcgcgccggtcaaacagcggcgaagtcaaatgccacaaatgaacagcacaatgccatgggcaaagagggcgcagaggtgccgaataagtggcaatagcattttgagactattggggtttagcactgctgccgaacaggggatttacattggggacaacaaaccgtccgcctctctctcctccgtttccggcgtttccggtcgccgtcagtcgcaacttccaccagtgacttcgtcatcccaaccgatggcatttacggtctatcagactcatctgatcccgccaccaaaacctcctcgaactgatgccaaagtgctcaaagagttagaggaggccaagcatcggacgggcgaatgcggcgacgacggcactgccgcagcgacaatcgttcggtcagtgagcgattacaaagcatcggagcagcaaaagcaacagcaattgctgaccaaatcgcagacgacgggcgaaggatttggggacggatcagcacgaaaagcagcagaaggacaacggaatcggtacaagngaggaggaagaggaggaacccctttcacctgattttctccct

SEQ ID NO: 76865 - DNA, 1621 bp, Heterodera glycines
atgtcaccaaatgacatgtcccgcactaattatgctgtagtttctcgttgccgcattggcaaaacgtcggccgttcacaatcagatcggtgccttcaattcgggcatcaatattctgtccgtcaatttggtgccgtactccgtcaatgatcacccagctgttttggctttggccagtttgtgcccgattttctggtccatgactcggttgtcgcgcatttgctcgtgcttcttggctcatgcgtctggcggcatgtgtcctttttgtggtaattagatgttagcaaatttgttaaggaaattgagcaaaaaattgaaaaaaaaggaaaaaaataaataaaaataagcattttttggtgacttttttcacactttttgggatttttatgacttttctgcgctttttgtgactttttgaggcaaaatttgaaatgcatcaaagaaaatgccgaaaaatacaaagaaaattccgaaaaattaaatttcgatcggtgaaaaggcaatgaaacctggatgaaatttttcgtaattgttggaagaatcatttttttttgcctattttagttaactatttataaaattaagtgcctaaaaaccgatctctatttataaaattttattctataattgttaaaatgggctttttttaactttcgcctaatttttcaggacttttttacatttttttcgtgctttttggatttttttgtgactttttttccatttttcgtgaattttttgcgtttcttatgacttttttgtgactttttggcgattttttgtgacttttttagtcgactttttgaagattttcagtgacttaaattcccagccctaataattaatatttgcctatttttgtgaaattcgatgcccataaatacacattaatattcctcaccttgggcagatttgattgtaataaactttcttttctgccctatattttagtaaagaattttcgcaaaaaaaaaacagtcaaaacgaactcaaaatttttaaatttttattaaaaaatttcattattaattgaatttttctggctttttttttataaatttgaaaaaaataacttattgaaaccggagtaaatcttttttttcacttttttttcattttaatacattttctttgaattaattcataaataaatccccacatttgtgcctctgcttctgtttgtacacgttgcgcagttgtcaagtgttgttgcacaatattatttgcatttgtcaagtggtgttgcacaatattgtgcacatttggccaagaatgttgcacaatattgtgcacatttggccaagaatgttgcacaatattgtgcacatttggccaagaatgttgcacaacattatttgcatttgtcaagtggtgttgcacaacattgtgcacatttggccaagaatgttgcacaacattatttgcatttgtcaagtggtgttgcacaacattgtgtacatctggccatggctgctacaaaagggttgtacagaatagtgatgctcgagagtcttgatgtcatctggccacgactcgactcgtggaaaaggtctcctgcctggtttttgggatctcgttccgaggctcggggccaattcttgaaccgagaaaagttctcctag

SEQ ID NO: 76866 - DNA, 493 bp, Heterodera glycines
atggagccgtctctgctcagatatttctgtccccgtcagtttcgccgattggccaccacttccttttgcactttgagcccacggcaccgcataattgccgagggcggaatgccaccgttggagtacgaatttgagcgcgaaaagtgggcgatgggcgaacggtttggccgctacggactgcgcggaggggtggacattagcaaactgtggccaaccgttgaggtggcggtgcctttgttaacctggggaattaacaaaaagtaacaaattcattgattctataaagttattgccattttaaacaaatttttatttttgtctcaaatgtccaaaaaatgcgaggaaaacgctgaaaaattttgtttttcaggaaattgaagaggtcaaagcggtgcgaaggttcagaacggcgaaggaggcgcaacacattgcgaaaatggagtcagttttggagcttaaaaagagcaaaatcacatctatttcaaaacaatag

SEQ ID NO: 76867 - DNA, 2775 bp, Heterodera glycines
  unsure (1)..(2775): unsure at all n locations
atggcgctgtacgtggcgttggccggcattcagcccagctggtgtttgcccgtgcaaatcgacgttggcacggacaaccaatcgttgctcaacgagtaaattttcgaagaacatttaattttcagggttacgagtgaacatgtattttcaaagtttttacaattgaaatatattttttgcacattttcagcccgttttacattgggttgcggaggaaccgtgtccgtggcgaggagtacgaccaactgatcgacaatttcatgaatgcgtgcaggaaaaagtccgtctgtttaagaaggggtgcaatgctttccccccccctccgaattaaaaaaaaaataaagtgaaattttacaaaaaaacaatttcttgaatttttctaacattaaacattttcgttcctaggcctaccaattcgcaagaatatacatagaaaatattttttaatggaacttattttttcttgaaacactcataaaaaacttttccatatgtcttttccccgttgattcatttttcagatacggacagaatgtgctggtccaattcgaggattttggcaataaaaacgcctaccgattgctcgagcgataccaagacgaatattgcatgtgcggcattttggggacaaatggcattttacaattgaaaaaacgatcggcacattatctgttattttaagctagtactggaagtctcaaaattatagctaaaaatcccttttataccgctggaaaaatgaaaattcttaaaatttgtttttttaattatcccccccccctccccctccttttgatgttcccccgttttgaggttcaacgacgacatccaaggcaccgcctcagtggtcgtcgccggactgctcgcgtgcacacgagtgaccaagctgagaatgcgcgacaccaaatacgttttcttcggtgccggcggagtgcgtttttttaaatcgccgcaaagggaaaaaagcgccaccggacaaattcggacaacttaaaaaaggagttgtactcaaaaagctggtccgggctgtccagttgttgtcccccattcgaatcgaaatataaaaaataaaattttgcccttctgtttaggccgcgttgggcgtggcggaaatgtgcgttcgccagatgcaaagtgagggactgtcctttgaggaggcgtgtggccaaatttacatgatggacatcgacggactgatcaccacacagcgcaaaaacattgagccaaggtcaattcattggcagagggaactcgatgggtttttcctgggcctggatttttgtacaagaaatccaggttcgggtccgaatttcgaactccgaaaaggaatccaattccatgtttttttcaaatgtcgaactataattggatgggatgtccccatttcctttcacatccctccgattttgttgtatttgcgagccgtcacttttcatttcaccccacaggcatttgccgttcgccaagaatttgcccgactcgcagtctctgcttgaggtcgttctgtcggttcggcccggcgcgctcatccgcgcttcgacggtccgtggcgcattcaccgacgacgtcattcgcacaatggccgagcacaacgcacganccgatcattttcgcgttgtccaacccgaccagcaaaggcggaatgcacggcggaggacgcctaccgagtgaccaatgtcggtggcacatttttttacaatttgaatttggcaatttctctagcccagggggaggtctgtcaaagtgttcggaaacaaatttgaaaaaccgtgtcaatgcaatgcaatttaacatatatttaactcttttgtgtgaagggcaccgcgctgttcgcctccggcagtccgttcaaaaatgtcgaattgggtggcaaagtgtacaaaccgggccagggcaacaacgcgtacattttccccggcattgccctcggcgtcattctgttcaaagtgtccaccattgacaacaaactgttccttatggctgcacgggtgaacattttattcaagaaaatatattcggttttctgtttgtaaagaaagtcgaaggcgttttttggaaatttttcaaaaattgtacccaaaacccaaaaattcttactttcagatggtcgccgagtcggtgaccgaaaagagtttggccgatggtcgcgtgtttccccggctcaaagaaattcgggagatttccatcagaatcgccatgagagttgcggaagagtgttaccgggtgagacattcattaatttgcagccacgacattagcaaactgtccaccaataacagtggagagggatgccacgagatttataaagaaaagtggaaaaacataaaatttggcacattgtttggccccaggcccgtttcgaattatattttgggttaacacatttaatttatgccgggttggcctaacgattgggagcgggtacacttacatttccgtctttatggcattcatatgggaacaggacaatttaaatttatgcaggacggcacggccaagctgtacccggagccgacggacaaggaaatgttcatccgctcacaaatttattcggttgaatatggcgaactgatcaacgaaacctacgattggccatcgcacgacatgaagcacggcttccccgtccccgtggtaggttaagacgaaaaagactcacttaaaaattcaaatgtcttaattgtttaaaaacccatgtacctaattaattattaattaattgtccattgaatgccataaatgcaatttaaggtccgcagagacagcatggacgactga

SEQ ID NO: 76868 - DNA, 934 bp, Heterodera glycines
atgcttggtttagacccggagcagctgcgtctctacaaattgtatcgtccggagcgcttgacgcccagcgtccggggcgtcgacctgctcaaaaacccggggctgaacaaagtgtgtgggaagggggcaggaaaaaagcgcaaaacagacactttctccgttcttttgcccgacgatttaaagggcaacaaaacgccgtttatttgtgtgaaccgctaaaattgtggagcaattccatttgaagactttttggtggcattaatcccccaagagtcacggaaccgggaaaatgtcgaaatcccttcagaaacaaacattttttgaagttgtgatttccagggaatggcattcactttgtacgaacgccaatatttgggtgtccacggccttttgccgcccgcctttatgaccagcgagcagcaggagtaccgagtgatcaccaaactgcgcaaacagccggacgacttggcccgctacattcagctggacggactgcaggtggtcagaggggggggggggggctaaaaacatagtagttttttggcggggagacaaaaaaactttagggttgcatcgtcttttaggatttttcaaattttagtaatgccttagaatttgttaatatcaattggtgtcgtcttggaaatgtttgagaattttctacggaataattgtgtacaacagaaaagggagacggaataaaagtcaatcaaattttaaaaaaattgattaaatgattcccaaatattgcaggatcgaaatgagaagctcttttaccgcgtgctgtgcgaaaacctcaaggaactgatgccaattgtgtgagagttcgggtggaatttactcccaatttaataaaattgcctgtcattttcagttacactccgacggttgggctcgcatgtcaaaagtatgggctcatctacagaaacccaaa

SEQ ID NO: 76869 - DNA, 1061 bp, Heterodera glycines
  unsure (1)..(1061): unsure at all n locations
atggacaacgatgccaacattttggagaccgaattttgccgttccgtcatccgttcgtgtgccaaattggcctacgaacatgcccaagtcggtacaaaaagaaggggggcggtggggacaaccccgagagtctcgaccctctgttttgcttttgagggaagggcgatttcaaaaaccaaaaagttgcctcttcccgtctgtctaaatgtttgattccattccacttacaatgaaataattttccccaggacatcatcgacaatccgaagaaacaattcgccatcgccgaaatgccgcccattcattgtgaccgcaaaattcgtgacatcaaacagggnggtgcgcaatttggacttaattgcgcgcaaattgaagacaaaacggtaggcttaagccaattacttattgctaaatgtggcttatgtacaaaaaataataatttttggctctttcaaatccatttaattgcattttttgcaaaatttattccatttttacaaaaaataggtttggcaaaggagcactgaagttggaattgcccaaactgcgctttgacgtggagaagtcgagcaccggcatttggcaaccgcgcggcattcgactggacgaagttggcacattttttaactcaaattgctttgagggaacaccaatattcattttcgacaatctcaattcccaataatccattcttcattactcatttttcagcgcaaaggtgccaactttctggtggaagagttcatgttgctgtgcgttttataaatgcttttcccctctttttgaatttcgctaaatgccatttcagtgccaatatgtgcgtggcacgtaaaatacacgcctttttcaataaatcggcactgctgcgtcggcatcctccgccgaagaagagggaaatgaagaatttggtagaggaaacctacaaaaagtcggagaacatttgccaatattcgttcaattaaggtggacaaatgcgccctcctcggcatcaaaatcaattcaattagctccaaaacgttggccgactcgttgaaagtgtacgagcaccgggaggagtacag

SEQ ID NO: 76870 - DNA, 752 bp, Heterodera glycines
cagagttcggggtccatcagacaacagtgctcaattacctccatcagctcggcttcatcaacaaaaagggtgccgaagttccccatgcactgacccaacaacaaaagcatcagcgagtggtcacctgcactgaacttctcgcccgtttgagtgctggaatgcagctttcccagctgatcacgtgtgatgagaagtgggtttatctcaacaacaaaacggcacaaaaacaatggctgaagccaaacgaattgggcgagccgacccccaggcgtcttcaacatgcaccgaaggtattgctgtgcgtctggtggtgttcatcagggttggcgcgctatgaacttgttccggctgggcaaaccatcaacgccgacatctaccagcaacaactgcagcgggttcatgaccaaattcgtcgtcctccattttctgcaaaattccgcggcggcgtattccttctccatgacaatgcacgcccacatgttgcgttctcaacgcaacaaaaaattgagcaacttcgatgggcggttcttcctcatccaccatacagcccagacatcagcccgtgtgactactatctgtttcgatctatggagcacttcttgagagggaaagaatttgctgatcaaaacgaggtcgaaaatgcattggatgacttttttggatcgaaaaatgatcagttttataaaaaggggattgaaatttgcccgaacgatgggggaggatcattgatcaaaatgtacatcattgattga

SEQ ID NO: 76871 - DNA, 1895 bp, Heterodera glycines
atgagttgcaactcaaagccatcggccgaatgtttggccgatcggatgaagcgtgtgttgagcaccggcgaagacgcggacgttcagtttttggtcggaaaagacgacaacaaagaggcgagcttattcagctgcaattaattatttgatttaattgggggattaattgttttaaatcaaattttaatgttaattaggtgatttaatgtaagttttgaatttttgtaagcttttgtcagctcataaactgattttgaaaatggcttccgaagtgttcgccgaaatgtttcgctgtgacgacacggaggacgaaagtggtgatgaaaattcaaaataaattttaaatttttactattttaaatttaaatacaacaataattcattttagcggcttgggaagtgattaacagcagcaacccaattgtggtctccgatgttgaggtggtgccattcaaaataatgctcagttacatttacacggaccaatcgcacggaattaacggagacaatgcaattgcggtgcttcacgcgggtcaaactaattaattttttaataatcaattaatttttttttttgaaatttagcaaaaaagtatcgcgtgaatgggttggtcaaactttgcaccaatgttaccatttcggaactgtccgacgtattttttgcgttagctcaagcgaaactcctcgaagatgaggtgctggcctaaaattgagaaaatatttatcttttagtaacattccaatattttagttttgtcaactttccaaatatttcaatattattttagcaatttgccaaaatttaaacattttaatttagcaatttgccactcgctgtttgatttacattgatcacaatgcccacattttattcgaacagtccgaccaatttttgaaaattgaccaaaaattgttgtgcgaaatttttggccgtgatcagctgaaagtcattggagaaatgggcatttggaaaactgtaaaatataataatttattattttttaataataaatagagttgtgcgggaccggaaaattttgccgggaccgggacttgcctggacctgataagccgggaccgggatctcgattttggtcccggaccgggaaccgggaatttttaaaaattcaaaaagaattcaaattctaatttatttcaaataaaaataatacaaaattgatttaataaatcattttttaggctctcctttgggccgatgagaaatgccgtcagaatggcattgactgctcgggagacaatcgtcgtgccgtgcttggccctgctctgttccaaattcgttttccactcatccccaaagaggacttttcggaacaaattggtaagcattttaaatactttcatttaattaattgatttgttttttagtgccttccggcgttttgacaaatgacgaaatgtttgccgttttgctgtaccattcgagtcgcgaaattgcaacagaatgccaagctccgtccgagctcaaatttgccaccattcggcgcaattacatttgcaagcggacttttttggtgaaaattgaacagttttctgcgcttccacgtgcctccgataagaattacgagccaattgacagcgccgtggtggacatcaaagggatccgatggcaattggactattcgttttttttattccaagtgaacaaaaaatccggttactttcgcctttctctcacgtgcaaccaaaatgagaaaggtaatactcagctgagaaatcttaaagtgattaattgcgcaattactaacacaattaagctgccgattggaagtgccattgttggacaatcacacgaacaatggcacaacaaaaaacgggcaaaaaatgcgttgtctgggagagagatgacatttttcgtcgctgcaggccagacttaa

SEQ ID NO: 76872 - DNA, 706 bp, Heterodera glycines
aaaatgctccccattccatggctcaacttttcgcaagcagcaccgaaacgcttacagctgcgccgccaggcgctatgcgccgatttttgaaaagttaacaaaaacaggtaagcatatctcagttcccaaatttttttgttgtctttgccccggttagaaaattgtaacgggagatcagtttccgaaagcaaaaagaaatgggtcgataggtgccgaaattgccaagtgcggggccccatttccgagaaaccccccccccccccccccccccgtttttttatatatagataatagagatttttttaaagaaatcgttataacgttctttttaatatcataaattgaaaaaaaaccatttatagtgccataccattcattttcattatgaaattatttcattttcagtaaatattaggaaaaaattaacttagattgtcctccacaacttgtgccggtgcctggcgaaggcgctataccctacagatattgctctccgtcggcaccaattaacgatggcattcaggtccgagacatattatatttataatagtatttttttaatgtttaacttgtatttttaataaaataatcacatataataatacatatttgaaaaagggatgcggtataaacagacattgccaatactcaacaacactcgaacgctacatttgttacggacttgagagcaatgtccgactaccaa

SEQ ID NO: 76873 - DNA, 400 bp, Heterodera glycines
atgagtaccgagatttctaactcgaaattggttttaatgatcctaatgacccacctgccaactttccagtgaaatttaattacttttaatttgtttttattcgctaattacccatttatccatacttttcagtgaccaaagacacaaacaatcgtctgatgcgttcgctggtgatcattttgttggtcaatgtcggcggctatctgatcaatcggagcgtctatcagttggccttctccttccagcaacagctcggctcttatgtccgcgtttggcaattcactttcatttccggctctctgctgaacatttgctcagccgccaacgcaccgattctttttgtgaacaggtggaaaattagaagaaataatttagcatttttaaaatggcctcaaggtta

SEQ ID NO: 76874 - DNA, 423 bp, Heterodera glycines
atggtactgattgggagagatttgagagtcaatatttcgcctgaaggaatacgctgccgcctttcacttatttttcggcattttctttactgaaaattcaaatttgccttagaaggtgcaaaaaagttccaaaataagaaaaactcataaaaagcatgctaaaatgcttttcaagtcattttaatgccattttgaggtagcagaaaaaacgcatttgacttaaattcccagcactagtaaccatcaaaaaactttagtgaaaattaaaattaatctaatcaattttctgttttccaaatgtcagaaaaagaaaggttggccagcagaaactcgtggagtttcggaaccaaattttgttggtggataaattataaaaaggtcatcggcagatcttcaacaaaattaagtagttttaggaaaaca

SEQ ID NO: 76875 - DNA, 524 bp, Heterodera glycines
atgccattggaaaagaaaaagaagcgaggtaaaaatggaaaaaataaaatataatttaataataaaaaagcaaaaataaaattaattaaacatatatttaataataaaaaagcaaaacaaataattaagaaggtatcaaaaaatgaatacgatacagtcgaatggcagaatggaaaacgtggaatcaagcaaaaaatgtagtaatttggtcgtgatggccaacaaaacggggagcaaaatccgagaaaacaattggaaagaaaaaaactaaccaaatgaattggaattaaattttctagaagattttggcgttggagcgcaaaaaaatgtaaaaaaatatataaataaataatgaatagcgccggggagccaaaaatatttgaaaaaattaaaataattgattttaaggcgcaaaaaagtgcttacatcagagaatggcacgacaaatatttggcggacatggaaaaggtgttgggacagaagcgaactcagccgcgaaatctattgacagagcaaaagtataa

SEQ ID NO: 76876 - DNA, 1772 bp, Heterodera glycines
atgggaaacggaattggaagaaatgaaaagaatggattcaaagttggcaggtacggtatgtttggggtacggtaagtgcgggagggaggggggggcattgatagggacagaacaagtgccgttctcgtactgacctgcttgccgtttcgttaggtcattgtccaagtgccgcgtgttctcttcggcatttttggcacggcaatactccgaaagcacaacaaatgaaagaattaaaagcaaaggacgacggcacatggcaaagaatggagagagagagaaaggcaaagtgagagacggacagacagtgggaggaaagagcgacggaaatgagcacaaaaaggcgaaatggccgaacttgcccaatttattggaaaatgaagtgacgaaagacgagcaaaagaggagataattaagggaggggggaggagggaaccggaagagagagaacaaagggatgggagtggccaagggatgggcaatcggcggcagatcgttccccccccgtcgcatttgatcaacaaacattcctcgcttggccattctcaccccccccctccctcagtccccgcaactcctcccgatcggacgattcactgattcattcgttcattgtccactcccccctacactgtccaattgttgctcatcattcattaatcggtccattcattcattttccggagaaagacaccccgcgggaagaaaaagaaataatgaatgggtaatgagcagaaaagtgcagagaaacaatttggaagggatggaccaaaacaaacataaaaaacagagagaaagacagaaattaagaaaaggaagcaaatcaaagccaacaaaaagcagacaaaaggacccggggacatggacaaatgagcaacaaaatttgatagtttttgtttgagtcttggacctatgattaatattataaccgggttttgtaccaatccccggaaaagacacttaaaatacatttatctcatcaaaatttaaaaacaaaataacaataagtcaacagaaatgtcactgtccatttgacaatttgagatgggcgtccaaagtccgagtgatttgtccaaccaacgcatccatcgtggaagggatttgccgcaaagaccgatcgaacatttgggccatttggccttgcattttaatccgagagtctttgggggacaattcggagacaaaatcgacgggtaaaatgcgactatcgacgacaaaagctaaaaaataaaagttaggacagaaattgaatcagaagtcatctcacaagcagaagctacggaaaaaacaaatttataaatttaaaaagattaaaaatcagaaaaacgaagtttaacttccaacccgaattataaactcaaaaaaagacccaaaataaaaaaggaatttctatttattttataattcctctcagatatataatatttatatagaacatattttatttgtgagttatgtgaccaaaaatggatttgtcgtgaaaatggatttaccgataggctgtatccatgcgtatgcgtcactcgtgttcgccatttggtggatgcaccgctcggggtcctttccgaacaacaaacatgtgcactcgtccaccaacaaaggggtgaccgcactgagctgactctgttcgaataatttgcgcaatatttttgctggctcagcgcaaagttcgactccgttaagtcgaaagctatgaaagggagaaaaaaaagaaaaagttaggaaaattaggacaaaattcaaatctgtttcgacaccataaaaaatttattaaa

SEQ ID NO: 76877 - DNA, 1095 bp, Heterodera glycines
ctcccccctcccttaattatctcctcttttgctcgtctttcgtcacttcattttccaataaattgggcaagttcggccatttcgcctttttgtgctcatttccgtcgctctttcctcccactgtctgtccgtctctcactttgcctttctctctctctccattctttgccatgtgccgtcgtcctttgcttttaattctttcatttgttgtgctttcggagtattgccgtgccaaaaatgccgaagagaacacgcggcacttggacaatgacctaacgaaacggcaagcaggtcagtacgagaacggcacttgttctgtccctatcaatgcccccccctccctcccgcacttaccgtaccccaaacataccgtacctgccaactttgaatccattcttttcatttcttccaattccgtttcccatttttaggattcggtgttccttctgcgtaagctccccccgcccctctccgaattcattttccgttgcttttcagttacggtccgtgtgcccctgcccatggcccagtcggatggtactgaaaatggcaaaaaaaattttggtagtttgtctttaaagtgcgccacccattgctgctttgccgcccccgcctcttgctcccgtgccgcctcctcctccggcgcctgccggacgactgatccctcaggcaatttgtcctctgggcattaaataattcaatgcgtccccatttcattgaaggcattgcctggcgccccttgtgagcccggcgtggaatgcaccggggggagtgtgtgctccatgggcatctgtgagtgcctccatacttttcttcccttatatgccttcccaaggtctgtgtccgcctgaactcgttcaggaaggcaccgtttgcgtgtcgcgcaccatttacggggtcgtcccgccaccgggcggtccgccgccactcccagcggcacccgcctatgctccgccgcctcctgccccggttgtccaattcgcaccagcgccattcccgtcgtccggtgtccccgcctttccaatggcagccgcacctccgccactccccgcatgtccaccgccattccgcgcagcgtgcgtcgccaggcgaagt

SEQ ID NO: 76878 - DNA, 646 bp, Heterodera glycines
cactttgcccaagattgaacagctttgttcagaacttttggttaacgaacagctggagaaaatcagtctgatgtccagggaagttgtgcaacgggaaatgatgcacggtgagttggcaataagaggagagaattgacttggccaaacacagtttcaatttccattttcagaccttcagaacatgtacattctgttgaaacctttgagcaacgccttgccagttttgatgcaagaattcgaaatttatattcaaaagtcggggatgaactgcatggagatgacaatcaacgaacctgccgaatttgtgtccaacattcagttgctgcacgaaaagttcacgcagatgatcagcaccattttcaatggggacaatgaatttgttgccggattggaacgtgccatccaatcggtggtaaaccaccgagacgatccaaaacagccaccaaaaatttcggaaaaattaaaccgctacattgactcgttaatgcgtaccaacagcaaaaggggaaagagtgagcaggaacttgacgcacttttgtcaaaggctattctcatctttcgcttcattgacgacaaggacttgttccagaaattctactcaaaaatgctctcaaatcgtttggtattcgaaattaaattgccatga

SEQ ID NO: 76879 - DNA, 1008 bp, Heterodera glycines
atgaccagaaaaagcaaaaatatgttaatttttatggatttggttctcttacattttttgaccttttgtcatgggttcgggtccgcccgaccggtggttaattattttgatttttttcctaacaataagtattattcacctagcatcttttggtgggtgcaccccaaaattttgccggaacataatttcaccaaagaaatctttttttaaatttattcaaatttcaagaaaaaatctttgagaatttttttttgtataaacttttttagcgattttttgtaaaaaaaatcactgaaaaatttttctaaataggaatttctaagatttttttcttaaaaaatttttaaatctattttttaatatttttgcggcgaaatttcggtggcgaaatttttgtcctgtcccctttttggttatattagttacttttttgttaaaaatttattagttttgagtgtttttgactcaattttttaaattaagagaatttgggagtccgaatgatatcagaccatttccctattgaagtgattttgttgcttacattaatattcgccgaattttatttttaatttttaaacttaaactttcatgaaaaaatcttattgttagaaaaatttttgtgaaaaatttttgtaagaaaattcaatgaaacatttttaaatttacagcgatttaattttatgatgaattagtaagttttttcgttttccaaaaaatgctacaaaattttcattcttgaaatctcttaactttattcctaattgtaagatttttcttattttcaggcttctcctaaactttttaaattttttgtgcttaatgattatttcgctgatattttaaatgcaaattgagtttattttacaacagccaataatgctttttaattgtttctactatgtaaaaatccgttattaaaaaaatcttaatttttggggtcaaaatcttaggtttaacctagtttgaccttattttgaaaaaaaaatttgcatccctgcaaataaa

SEQ ID NO: 76880 - DNA, 1762 bp, Heterodera glycines
ggtcacaaaagcaccaccgttcctcatcgatgttcgatcagaaatgttctcttacatcaaatgccaacggattgccaaattctcataagaaaataaagtaagatttatttgcagggatgcaaatttttttttcaaaataaggtcaaactaggttaaacctaagattttgaccccaaaaattaagatttttttaataacggatttttacatagtagaaacaattaaaaagcattattggctgttgtaaaataaactcaatttgcatttaaaatatcagcgaaataatcattaagcacaaaaaatttaaaaagtttaggagaagcctgaaaataagaaaaatcttacaattaggaataaagttaagagatttcaagaatgaaaattttgtagcattttttggaaaacgaaaaaacttactaattcatcataaaattaaatcgctgtaaatttaaaaatgtttcattgaattttcttacaaaaatttttcacaaaaatttttctaacaataagattttttcatgaaagtttaagtttaaaaattaaaaataaaattcggcgaatattaatgtaagcaacaaaatcacttcaatagggaaatggtctgatatcattcggactcccaaattctcttaatttaaaaaattgagtcaaaaacactcaaaactaataaatttttaacaaaaaagtaactaatataaccaaaaaggggacaggacaaaaatttcgccaccgaaatttcgccgcaaaaatattaaaaaatagatttaaaaattttttaagaaaaaaatcttagaaattcctatttagaaaaatttttcagtgattttttttacaaaaaatcgctaaaaaagtttatacaaaaaaaaattctcaaagattttttcttgaaatttgaataaatttaaaaaaagatttctttggtgaaattatgttccggcaaaattttggggtgcacccaccaaaagatgctaggtgaataatacttattgttaggaaaaaaatcaaaataattaaccaccggtcgggcggacccgaacccatgacaaaaggtcaaaaaatgtaagagaaccaaatccataaaaattaacatatttttgctttttctggtcatttttggcgcggagccaaaaaaaccgaaaattggcaatagcaaatcgactattaagcacaaaaaattctctctcctcctgggctatgaccctcccccgcacagtttcactatatcttttaacatgtgaaaattttgaaacaatatacctagtccaatcctacgtcattggagcctggttttgccgctgatcatggtaaaatttaaagcattgaaaatcattcagttgcgatgttcacccgatacagttcatgcgcaaaacgcattggtcgccggccaaacgccgctgcattgacgccaaattttttgagtccgtgaaaatttaagcactcgctgattgattgttttcgtttaggagcaacaatcgcggtgaatggaatttcaatggtaaccatgccaggcggttgttgtgcggacgtggcaatttcaaactggagaacatgttcaagagggtgagatcgttggtttttcaatcgaatcgctcccaaaatttgtttagtttttctccattgccccgcaatttcatcgagcacaatcggactgtgaggctctgttgcaagtttgcctctcctacggcatggattttgtgaaatttgttgaccgaaattgttcatctttccccgactgcttctacacctcctccaaaaagactca

SEQ ID NO: 76881 - DNA, 396 bp, Heterodera glycines
atgaacaatttcggtcaacaaatttcacaaaatccatgccgtaggagaggcaaacttgcaacagagcctcacagtccgattgtgctcgatgaaattgcggggcaatggagaaaaactaaacaaattttgggagcgattcgattgaaaaaccaacgatctcaccctcttgaacatgttctccagtttgaaattgccacgtccgcacaacaaccgcctggcatggttaccattgaaattccattcaccgcgattgttgctcctaaacgaaaacaatcaatcagcgagtgcttaaattttcacggactcaaaaaatttggcgtcaatgcagcggcgtttggccggcgaccaatgcgttttgcgcatgaactgtatcgggtgaacatcgcaactgaatga

SEQ ID NO: 76882 - DNA, 1036 bp, Heterodera glycines
atgccaacagatggaaatcgctttcctaaaatcacggaaatggcttatatgtcggtgccgcgggtgttgttccttgagggaacggagcaaatgtccgcgcgccatttgtcatcgatgtcgcaagacggcgaagaaagcattgagccggtgcaggtcgttacgaatgtacacgtgcgacagctgaatccgcagcttaatgacaaggagcggttcaagtacgaggaattgcaacggaaagtgccaagtgagtcgtaggttttagcccttccttcagctgtttgttgcccaggcgtgcttctcaaacaatccgatttgacatgcaaatgcactttcgctcaggaatggcccggagtcgtccacctgcttcagactgttccaaaaccagcctgtctggttgcgcacaatggtctcaactttgacttccgaattctgtgccacgagttgcgcaagagcgacctgttccgtacccatccgatcccagaacaggtgacgcttaaaattgattgggttttctggttacaattgttgttcaaccaggtttatttcctcgacacgctttcctgcttttacgaactcgagaaggagtacaaccgcgagatagaattaacgatggaaaatgttgattggactcttggtgggtcactcacacgatggcaccaattttggctttccaattccagttttgtcccaattccaaccgaacagcgaaactgtcgttgcaactgccgagatagaggaaactgtacaacaaaatggcactgcttctgagggaacacaaaattccaatggtcacaaaagcaccactgttcttcatcgattgttcgatcagaaatgttctcttacatcaaatgccaacggattgccaaattctcataagaaaataaagtaagatttatttgcagggatgcaaattttttttttcaaaataaggtcaaactaggttaaacctaagattttgaccccaaaaataagatttttttaataacggatttttacatagtagaaacaattaaaaagcattattggctgttgtaaa

SEQ ID NO: 76883 - DNA, 562 bp, Heterodera glycines
atgcttaatagattatctcttgacgacgattttaccctgcgtttggacgacatttacactgttggcgttgtgcatttcaaaaatttgtttccatcaaatccgtcacctcaagtgatcaccgcgcgacgtattgttgaacgatcgaaagcaatcgtaattaaataaaaattaaaaaacgaaaatttattttaatattgacaacaaattttcagagcactccaacagttgcacaagatttagcatctaccaagaaaatacaacaggtgggaattgcttaatttggcatgagccaaacatggcacgggccaaactcgggcccaattcggcacgagaaaaactcggcacgggccaaacttggaccgggtcaactcggcacaggccaactcggcactagccaaaactcgggatgggtcaactcggaacgggccacactcagacacgggccaaacttggaccgggtcaactcggcacgggccaaacttggcgttggactgcggcgagttgactcgtatcatactattttaaacagaatatttttaaatgtgaatttaaatgaattaaa

SEQ ID NO: 76884 - DNA, 643 bp, Heterodera glycines
atgtcggaacaacacatggccattggcatttatgaagcatggtaataaatagtcaagaaaattattggggtcactcaaaattatgttcagttcttagtgctttttttaaaaaaaatatttactttttctatgtttacaattttagttttttttaaatctagaaaataagtgattcaaggacttgaagccatgaatcatagatttgacaaaattatataggtttttatttcatccggtaaaaacggttatcgtacccggaaaaaacaaatttaaattactcttggtaaaatttatgggtttaaaaaattccatagaaataatttgttgtagagttttttttatgtaaaatggattttgaagggtctccgaattggttcattttcaaaaacgaaaaaatcgcacaaaatcatgaaaaatgtgataataaaaaagggaaataatcaataagacacatccattaatgcaaaataatcaattgatttacaggaaaagttatcgtgatccaaatgcaattgtcctaatggtgtcgaacaaattcagtcgttggcacgaatttatccaaattgacctattaatagaagaaatatcaaaaaagaaaatcaaaatcatttatttgagtctgtttgaatgcgctgaaaagtaa

SEQ ID NO: 76885 - DNA, 360 bp, Heterodera glycines
attctctcatataaaataaaaatgaaaaaaatattatgttcaaatttattaatattaaaaagcttaaaaactaatttggatatgaaaaaaaaacaaaataattatttacagggttggggaattgaactttagaagaagaaaaaagtatggaaggcacaaccaccaggccaccgacgctcacattggctttacattctttgaaaatgatattgaaaaggcaaaaaggaaaagcttcatatctcggccagaagcttcatttagcaaaaataaaaaaaaatttataatacaaaggggggggtaatctacctaccctgaaagtttcattcggaagtcccatggtcacttgggtacctctccttt

SEQ ID NO: 76886 - DNA, 822 bp, Heterodera glycines
ccccccccccccctttgcagccgatttcgacgacacttccagcatggtgtgccaatggatgttttggcttctctcttggcttctccttctgttcactttccccgtctccgtgtgcttttgcattaaagttggaactcaaaatcaaatccaataaatggccttttgttgacatctaatgttctgttttttgccaccgctctttttcggcaccttttaaaacattttcaattccggggattttcggtttaatttccatttgcaaataagcgattaattgacagatagtcaaggagtacgaacgagctgtgatctttcgattggggcgactgatcggcggaggcgccaaagggccgggtaagcaattggaagtgatcggaattggcaaagcgttggatgccaaattaaatgcacggaaattgctgccattgccccaaaggtcttttctgggtgatgccgtgcattgagtcgtttgtacgtgtcgaccttcggaccgtctcattcagtgtcccaccacaagaaattctgacgaggcatcgaccaaaacaatgtttggcatttcgttgtgccattttagggattctgtcactgtttcggtggacgccgtcgtttactaccgaattttgaacgcgacgataaggtaagaagcaattagcggacaaatgaacgaaacggaggcaatttgaacaaacaaattccaaaagtgtggcgaacgttgaaaatgcgcaccattcgacgcgacttttggcacaaacgacgatgagaaatatgctgggcatgagaacactgtccgaaattctatcggacagagacgcaattgcatta

SEQ ID NO: 76887 - DNA, 419 bp, Heterodera glycines
gatgaatgagaacagggagagattctacgagccgggaatgactcaagcggacgtggcgaaggccgcaggtcgccattttaccgttacagaattattatgctgtacagtagcccagaaaaaggaaggcaaaaaccatttattttagtcttaattcttggttccaattcctttataaatcgttttttgggttaacaaatgccatttcgggagggttgcactgggcgtattttcctcaaatagtaaaacattttccaggcgaggaatggcgccgtttgcccgagtcagagaaggccaagtggggacagagatcggcggaggaacgaggacgtcaaggggggcaaggcgagagaagaaaagggcacggatttgggatgattaaaactgtgccattttcagatgtggaggaagaggagcagtaa

SEQ ID NO: 76888 - DNA, 129 bp, Heterodera glycines
cccccgctgaaagaagcacccgagacggattggagttgccatctgtgcgtgaaggaattcggcgccgaagcgtccattgcgaaggcgacaaaaagcacggaagacggcacatcatcaccagccaaatga

SEQ ID NO: 76889 - DNA, 1793 bp, Heterodera glycines
atgcctgaatttcaactccatgggtgagcagaaccaacccacctacaaaaatcaaaaaaaaaatatttttttttgttaccccctccaagacactcttcactaaaaaattgagtgaaatttttctggaaaatccacaaaaaagcaccacaagtccctgttgaagtatggaattttttcaaaaaacttagggcttttacttacataatttggcttctttttcactctccccgtctttttagtggtggtggtcaaccgaattcgtcgtcgaatgtgcctttgcagcagcaatattttgccactttccacccgccacagcagcaaagttacgaggcatggatgagcgcctatcagaattagtgagtttgcagggggtaaattttgcaaaaaaaaaaaaaaaaaattttttttgtttggtggcgatttggccattacgaaacaaaaataatattcgttctttagcatgaaccaaatggcggcggcacagttctaccaacagcagccctatacttctgctgcacatatggcacaacagcagcaacaggtttggcctgggcgacaatccccccacccctcccttttctgatcgtaaccttggtttttcctgatgcatggatttttgtccagcttcaggcctttttcaaaatgtcaaacccttttaaactttcctatttagcaacatttcaatgagcttttgcattcctctttttaggcctacgcattttttggcggacaaatgccaccaaccgtgcagcaccaccaccaccagcaactgtttgccacgccaatggttccaccaccaccgcattttggtcaggcccaacaaaaccacaacaacatgatgatgatggctgtaccgcaccagcaacaccaacatcagcaacagcaacaacgcgctgacgaagcaccggccatggtgcagcaacaacagcagcagcaacgaatggtgggcggcggcggtgttggcgaagcggcggccgcggcaggtgccggtgcggatttgttggacattgtgtacaagtcggtgcgcttcgcactgttggccatggtcctgtacgtgtacgcgtcactggaacggtgagtgtttgctatgcaatacagtagtgctttggtggtaccaacttgatagtagggtgggggaaaacgtttagcccgattttcaaacggccaacgaaaaaaattttcaacgatttcttggacaaatttttcttttaatttcttataaatacggaagaaacggggggggggggctagcgaaatgttcccaagttttgcttcgtcacacatgtctagtcttaactgaacccaagccggtcgtaaaatactcaaaattatgtgccgtattggaaagccaacattatttgttcatggcacatgcctaagactctttcatcacagttaaccccctcttcttctcactcactcccataatttcattccaaaaattttgcagtttcttcctcgtcctcgctgttgtggcgttcttttggtttgtccaccgtcggcggaaccaacagcagcagcgggacaacgccgctgcggcacacgaaaatggtgccattgccaatgtgttgccaccacagcatgcgcttccgcaacaaaatcaacggccaaatgacaacaacacggaagcggacggaccaccggcggcgactgaagcggaggacacaacatcgaccgccagcgccagtgttccgcaccagcccagcgcatggaacgtgttcttcacggttgtgcagtccttcttcacctcgttggtgcccaacccgatgccggcaccgttggacatcaattag

SEQ ID NO: 76890 - DNA, 486 bp, Heterodera glycines
aaatcattgactttaaacttcggtttgtttccactacttgtacacacaaattattgcttatttaaaaacaaaaatttctttatattttttattcctttttttcgttcattaactgcacacagaagagacgcaaataacaaattgtgtatgtgtcagaattatgtataaaacagatggattaaattatcttcaaaaaattttgttaaaaccgatcacaattagtaaatgaatgatgggacagcaattgccgtttgtcaatgtcccgaactctacaaaaccatcgattagtagtaattaacggttaattagggggaattgcttaattcgaaggaaggcaaaaaaagtgtaatttccgcagcgaaaaataacaattatactaccattttgacggatatataaaaatcctccaattatcccatggcgatgtttcacgcgacggccaaacggtcgaactccgtctcctttgccaacatttctttggtccac

SEQ ID NO: 76891 - DNA, 1048 bp, Heterodera glycines
atgatccaccgttttgtacaggaaaagtgtaataatagtataaaaggagtgcagcaaaatttgtgagtttgcgattaacgagtcctaaaataaaattaaaatactgccccccccctaaattagagcctctctcccctgcaataaagccccccccccctccattttttgaaggattgaaaaataaagcccccgagggctctattttaagaaatatacgacatttgtgatggtatttctgacaaattttgtcagttttagtaaatgcattcatttcaatgacttaacggatttcattaatccaatcttaagagataaagacacagtattaatactatccgagcaaaataatgtcgacaattgatggcaccgccgcaacttttcaattgaccattcgttgcgccatgcaatcatttcccgaccacactcttgaatgtccggctgattggaagtaaattcatgtccaaatttttgagtttttttccccacaaaattaggattttcaactttgttcatcatgaataaacctgtttttcactgttcagaacttttaaaaacagacaaaaaaaaatgaaaatctgtgaccaaaaaaagtctttgggaaatgccccggaagataaaacactgtgccaaaattattgatgctaattgatcacaccaatttcagtgtgctccaactgaaaactcatttggccgaggaatgcgtcacaaagcccgacccgtcgcgccaacgtttgatttacgcgggccgttgtttggacaatgagcaaaaggtgcgcgaagtgttggcccaacgccgggacggaattgtgcgcaacgaagttgcggagaaacaggtgacgcattaatcatcattggtttggaaggtctggggaggggagaaatttgaaaatctgccaaaattagttagtttggcatggcaaaccgtgccaaattgggcggggttggagtgtccctcctctttttttggggtttcgcaacaatttaatgggacggcacgtgggggagaattgtgcaacaaacacttttaatttattgagttagaaataaa

SEQ ID NO: 76892 - DNA, 574 bp, Heterodera glycines
atgccatggcattttggaacttggcacactcattccgacaattcctatcctgcattcatcaacattgttggccatgtgctgattgtggagggcatatgtgcgactgtttacgtagacatttacgtgagatgcaatagttgggcatttacggtgatttggttggccattatggtaaatgtttttccttttactaattaattaagcgtgagtttggtaaataggtcatttaaaatgaattcttttttgcatcatggtataatatgcaaatgaccaaaataaaatgtaaaaatatatatattccaaaaagccataaaagtaattgaattttgagttccaatcccgcagcgggatccacaaatttgaaatttccggtctctaatcacaacaaatcaaaaaccgaaaagagagccacagttagcaattagctaattgtaagaccatataatattgaaattttatcattttcttttattttcttaaaaaactcgttctttagggtgtaatcaatgattaatttaatttatttttcagaaattacccatttgatttttggtttgatttacttttaaataaa

SEQ ID NO: 76893 - DNA, 878 bp, Heterodera glycines
atgttcactgtgatttttgctgaaggcctttttggaggtgcctcatatgtcaacacattcgacagaattcacaaaacggtaaaaatatatttaaataaaatatatttttttaattttaattaaaaataaaaattatttttaaacagagacaattaaatatttactaaactatacaaaaaaaaaatcattttaaattagaggaatgactttatattttatggcattatgcgaatttgtataatgtaaattcttaattatttttttatgaatatttttaggcccccaaagaactgcgcgagttcagtctgtcaattgtggcagcgagtgactcattcggtgtgacaattgccggcttttcggccattctgttgcacaatcacatttgcatgctttacggcacccatttatacatagaaaataacacaacttatggcaaaagagattacagaaaataaaaaatgatacggtaacttacatctggcccaagttttcttattgtatgaacggtataatcattatcttaattgttaatattataatattaatcattcattatttaattatgatcaatattaatatttgaacaaaaaatatgtcaaattatattaattttcgataagaaaatcaaatttcattctgtacaattttgatgatatcttcttgggtttctttaaaaattcaaattacatgttcatgctctgtcgccccaagctgaggtcaattgtttaaagtacgcttctttgtcctgattttcttgttgaattcgttcactaattggccttccgaaatttttaaaaaaaattgaaattgaaaattaaaacaatgcttttttatgctcctttgagaaagtcaaatttaaatcagtgaagtaaaataaa

SEQ ID NO: 76894 - DNA, 1401 bp, Heterodera glycines
atgctgagcttgaatttttgcgaaaagcaaaattggcagatgcagggactgcaacagcgggaatttaaaccatcggagtttttaccgaataccttttccgatgacatcggatcaaacaacagtggattttacgaattgaaggtactttttaaacatttgtttttataccgttatacccatttataaatatataaaggtaaatgaaattttaaataattttgggcacttaacatctttttgggagagatgatgggaaaacaaaggtggatcttttacttatagtttcaaaattttttaaaaataatgttcagtttggtgtaagtttttattttgattggtcaatacaattgtcagattcaacaaatataacacgttttatatttaagtgtctgataactcatcagggacgttcaagcaattcgggtcattatgtcgcgtgggttagggttggagatgacgaccaaaaaccgaacactaccaaatgggtggtctgcgatgacaataatatttcgccagtgtctgaggaggaaattctgaaattgtctggcggcggagattggcattgtaatgacatggaactgattgctttctcacattcacacactttaaggtgcttatgttcttatctacggacccaaaaagattccgaagctttgagagccgaaagacgagtaaaatttgatgttgattgacactattcaagaatttcgacagtgtttttaccaagataaatttgtttattttgagtacactgttgtttttaatgtatattgttaattcgctagaatacatttgatgaaatgcttttagttttctttttctttagcattatgacaataatccgtgattttttgtgccgttcgtcgtaccaatcgttggctcatttgtgccgtaatcaaattcgcgtttattctgtagaaagggagggggcgggcacggcttcgggcattgaacacgcgctcaaattcaacaaagcgggagcagtgcacaaaaaagagttgaaggattacaaatgcgtcgaatatcttcaccaaaataattattccttttatgacaaggaggtgggaaaattacaaaaaatataacggtcaaaatatactaacttaagccttcattgaaaaaaaatacatattcgggttcgaaataatttaatgccatattcatgatcagcgctctctaaaacccttaaagcatcacaaaactgctcaaaaccccctttttgtctctttttgtgggaagtaaagccgatgattaccaaaatgacataaattcctttttaagtgtgagctgcagcaatttcgcgtggtgcaaccgacgaacaaattgcctgacaccgaaccgaagttcaaatcatcttaaaccgattgatttcatgaaaaattttgttttttaattaggaaa

SEQ ID NO: 76895 - DNA, 1274 bp, Heterodera glycines
atgacgcagaaggaattgaccgccgaattaattgaacaatgggggagggagccgaacgcccatcagaagttgctttttctgaatgaaatgacacagtcatttccgaatggcactttcccactcattggcattgaccgtaaaaaggtgggtaattcgaccggggggcattcgctggtccgatgtttccgtttataatgcgcttttctttcagttgtttttgtcccatctcttcgacacttgggctttggcctctgagcaaattcgtcttcaacaattacactttcttcggattattttgcgcgacaaaaacactgttgatttggactgttacatttccattttaacacttttaagtcgcctggcaaaactatcggctgattattttgaagaatgcaaaagtgaacctatagaaagtaggctttttatttttgtttcccattcaatttcaattttgagttgtgttggagtctgagaaatgtcttatcaatttgctattcaattctgcaaaggctcgagactttttttgcacacagtgagttttctttcaatttgtaacgaattcgtttattttgtgggtttttgaaaaaattggttccctttttgtggttatttacagaaagaaaccgtttgaccgattgatgtcgcgcattcgttctgtcattgccgttttcgacgggtcgaattcgttgtttgttggtttcgactatttgtccgaatggtcattcgttcaagtggaggaattgctgctttatgatttgaaaatagcgttcataacaacggcattagtccaacaacttcgggtggataattcacattgaatgagcttaattgaggccctttcatttttagaatgaatgcgtaaatgacacagacaaaacggtggtttttctcagtgttatcatttgttcgttggacaaaatgtcaccaccaatggccaccaaatgcgtgaatgaggcactgaatacgttgtttaatgtttaccatgacagcaaagtgttcgaattggtcggttcgtttgttggaaattccggaatgattttttattaaaggaaactgcaaaaaaatgtgccgatgaatgcgcgcgaattgtgaagagtgcacatttggacttgggaacaaagcaaaatgcagtcaatttactctcagttttgacttccgctttgccctcgctgtgtccgaaggtttttattttagtttttttttaatttatttttttaaggtcgacacaaaaggagcgtacgaaggatttgctgcaaaggatggatacgacataa

SEQ ID NO: 76896 - DNA, 425 bp, Heterodera glycines
ctcacccggtcgcttttggttgtcaccacagtgttcattgtcctcaaccttcctaattatgtctatcgcatttccatccaatttttcgttatcagtgaacaggtaaattagtcaaatggcacccaaatgatggaatgtcaaattaccgaggccagcaaatatttcgggactctcgagttcgttaacacttcgtcctttcagatcaacttgagttttgccgcccacgtgctgttgtacacacaccacgccatccttttttacatttacattttcaacagcccacaagtcgttggaatgctaatggtttttgacaatttgtcccaacttttgctcagatgcgcaaaaggcttattccgacggcacttaaactgttggagtgttactgtttgaagccgcggcacctcaacgatttttcggacaatttg

SEQ ID NO: 76897 - DNA, 608 bp, Heterodera glycines
gaaatctctcgaatcggaaccaaagctgatcgaattattacaaaaattctgtaaaagtcagttcggcgtttgtttggacattctccacgaattgcgtgaccaggttgttaacagaaaaaggagttttaacatatttgttcgcttttagtttcatttttcattctttagcttctactcaatatttatttggcacctcacatcaacgtcctttacatttctattcgccaaagtgccatcattcaatattttgactcatatttcacggctgatatcgctcaaatggcagttgaatttaggacgactgcagaacaggcaatatttttataatttgatttgaattttctcctattttttagatggagtcggaattggtcactcttatcgagcgtggtcaactgaaggcaaagattgattcctataacaaagtgcttcatgccaaattctctgacaatcgcaccgatacttatgatcggtgcgcatttttgtcattttttaaattatttatttttttaaggattatggcattgcgcaagcagtttgaccacaggattaatgccatccttctccgtgccgcaattttgaaccataggatttacgaacagaagtga

SEQ ID NO: 76898 - DNA, 1575 bp, Heterodera glycines
atgttaaagcggcaattaaaattgatgcttgtgttctgctgtttgtcggcatgtctgggaatgattcgaaagtcgccgccatgggcaactggcaaaagtaatgctacagtaccagatgatgaaaatacagtagcaacaccgtcgaagaaagtgaagaaacccgaacaaattaaaccatccttttcaaaagtgccagttgaagtcaaaatccgtgtcaatattttttgcaatgaaccaattcatgtctatgtcgcggcgggagattatggtaaaacaaaacaaaaacatactgtagggtaatagacggattttatgcgtcaaaatctgtacaatttgttttatacaacggtaatttcactttccagtaaatttagggtttatgaaacactaaagtcagttaaacgattacgttgtataaaaaataataattaagaattcgatttgcaagtggcacatacacgacgcagaaaattgtaagaaattattaatgataaataaaaatgcaaattctcatcctcggttccaatcaatttttagtaatttttcaaaaatgtttggcccggattttgaggcattacaaaaaatatatatacccccgaagaagcttcaaatttttaaaaaggcacctccaagagatttatttcctttttgttacatccacccaatggggatattcgaaaccgaaaaattcggctagactcaagaccgatacttgacctcgaagtcgatcagaaacaaaaaacccgagacttatcaagtcgagacagagactcgacaagtcattaccccacagccgccgaatgatgttcgatttttttaggcttctcccattttaacctgaagcacattccatttataagaaaatacattaaaaataaattaattttattaaaaaaataaaaattaatttaattaaaaagtcgtcatgacattgacaaaacattggatgcatcagacgaaacgaaggcccaaccgttcaaagacaacggacgactttttgtgacacctgaaaaaatggagaaaatatttttcgaaatgtgtgaacgcttttggtccagcgaaaattatcatgagcaaaaagcaaattgcttggattttgttttcaattttgtgaacacattgtgcgagggaaacgcaccaaaaaagacggtaaatttgcgcaaagggacggacatttcatcaacagggacagcatgtcaatgcaaataaccgagaaaagattagacttggctaatgacgagttgtacggggaaaactttgaaaatttggagataaattctaaggagaaacaaaaaatttgagaaaaattcaaaaatttctgagatatttgagatatgagtggcccacataattttcaaaatttgagtccaaatttttcattacaacattttgttcttttaagttatggcctgataattttattgaatttgataaatttatgtccggaaaatatgaaagaagcgagctttaatttatttgatcccacatttcctcaatcggcgctcgataggaaacccgattaaattgccgaggtaattttttcttttttggttaaatatttgaattttaaataaa

SEQ ID NO: 76899 - DNA, 78 bp, Heterodera glycines
atgacgaattcaatgcaagcaaatacaatcaaatgctggacgcctacttatttatctcggcacaaagatgttaaattt

SEQ ID NO: 76900 - DNA, 208 bp, Heterodera glycines
atgtctcgtatcgctctattggtccttttggtcgcgctgttctgcgcttgcgctttggtcgaccacgcatccgcgcagtattggggcggacgcggcggttggggcggaaggggtggcggatggggcggaaaccgctggggcggtggatggggcggaaaccgctggggcggtggatggggcggacgcggtggcggatggggaggccgag

SEQ ID NO: 76901 - DNA, 502 bp, Heterodera glycines
  unsure (1)..(502): unsure at all n locations
atgtttcctcacactttgttggccattgttcttctgtccgtttcgctcaaatgctctgttgcccaatggtcaatgatgggcaccaatccgatgattggaatgggcggttggggcggtgagttttggctttggttcagttcgacaaataactgctttaaaaaaaactgtgaattttgcattttttatcaaaattttggctcgaaaatgatcgattttcaaattggacgattcattttaaaaattttcattttcaagtttcggggaggtagtcctaatattcacccggttacgactggggttctcctattctgataaaccgaaatgctcactcaatgtacatgaaatatttagttttatcctttatttttcataaaactgcaagatttgggtataatatttattcgaggaaattttttgtaaaaatttttctctcatacattcaaattanacattttatttgtcattcgataggcataaatttgcaaaattttcanaaagctga

SEQ ID NO: 76902 - DNA, 2065 bp, Heterodera glycines
atgtcgccgcgactttttgttttgcaacggcatccgtccgcaactgttccaatgcgagaaggagcaggaagtgttccgggacggcgagtgcaccgccgcgagttccgcttgcgacgtgtgccaaccgggggaaagcaaaaggtcgacagacaaatgcgaagaggtgggagcaaaaggcattgggtgcgaaatgatccgatttctcttactctctatcttttttcttcccccccccctccctcccctcctctctcaaattctctctctctctctctctctctctctctcttggctttgaagctgaatttttgttgtccgcttacctaatcacttggatcagtttttcttctgtgaacgggatgctagcacagggcgattccactggcggcagtacatttgcaccaatggccgagttttcaatccgcaaacgcgcgaatgcgtaccgcacggcacttaccattgcccaacacgaactttggtcctttttgtgttaattatgtaattaccatgctttaatcaccttttgttctttctctcagtgtcgagatggcgattcgtacaggtgatgactgatcagttgatggtcagaacaatttgatcactcactattcatttctcaacagtgtcgaatgtggcgactttttcgtgtgttccaatggtcgatttgtgccgggaaaatgccctgaaatgacccgctgggaaatggcccagcggcgttgtgtgtacgtcgtcattctgcgcttaaaatttcagtccgtccctttgctgctattttagcgcttcgcccgaatgtcgccgtttcaaagatttgccgtcaaaagcatttgtcggaggggccgaatgtctggacggacagacaaagccatcgatcgactgtaaaaagtttgaagagtgcgcggagggcaaatggacgacacggcactgccataactatgccagcagaaaactcaaaagtgtgccaaggatgaggacagaaaagcaaaagagagggaaacggggatatattgaccaattaacgggaaaagtgattaaatgatcagaaatgttggccagtcaaaaaagtgatcaatctcaaaatgatcagtccatccaacgctttcccttttccgttcttcgttaggtccgtgccgtttctgtccccaattgtcgtcctcaattgttggcactgaaattgaagcgaaaaagcaacagcggacggacatttacccgttggaacgccttttgcccgacaatttcaatccgttcgaaggccaaggcgttcgccaccgccgttgtgtggaaggcgaagtgtgcttttgcttcaattttcccggggaattggcattttccagaggattgtgaatcggcacgactgcgcccgcttcatggaatgcgttgacggcgattggttcagcctttcttgcccgcttggccactatttcagtttggaaaacgaaacttcaaaatttaatgaaattgaaaacccaggcccactaatccaaggctgtctgttggccagctcctcaaactcttcctcagcagcgattccaatgtgcaacgagcttctgactgtggcggagaaggccacttcgatcaccaccgaattgaaagacacaaattccaaaagcgattcagtgattatttttgattattttcagcgaatgaaaatgccaacaaaaaacaaacacaatttccctccccccacccgaaaagatgcattttttgccaattctttactcaaatggaggacaatcgccgatcggaccgggcgcggggccattgcctgagttgggggacaaggaaatacggcagaattatgtgggcgattgggaaggggccacggcatcgcaattaatccaagtcaatgacattcactcatcattccattcaggccggcgcattcagcttctgcgacgcgaacgcggccaaaagactgcccaatgcgtacgactgcacgcgtttccgcgagtgcgcgttgacaggggcggatatacgcggaaaagcaatgcgcacccggcacacaattcgacccgacatttgggcggtgcactttcaagtaacgaagtgccaaagcgaatttgaataa

SEQ ID NO: 76903 - DNA, 864 bp, Heterodera glycines
atgttggcttcaaacgacatcctcgtgcatttcgaccttgaaaagcctctctttttggcaacagacgcgtcggattatggcattggagctgttttatttcataaggatgccaagactggaaaagttggagtcatcgcttatgcgtcaaaaacattaagctcatccgagcggaaatatgcgcaaattgaaaaggagggacgtggagtgattttcggcgtagaaaaattcaaccaatatttatacggccgaaagttcacactacagactgaccatgagccgctgaaacggatttttggacctaagggtcaaatgccagtcgttgctgcaaggcgtttacatcgttggagcttaattttgatgaactacgagttcgacatcgaatattgctcaacaactaactttggacacgccgatggattgtcacgactgccaacaccagaagtcgacaaaatttgcaaggagagcttcgacattggcgaaattcagaaggaatgccaaaatgctctgccaataacagcaaatggcatcgcaaaggagctcagaaaggacccaacgcttaaaatagtaaaaaatttcactgagcatgggtggccaacaaacaagcaaatcgatgccgaaattcgcccattttacgtggtgcacgacgaaattgagatccaaaacggatgtttgatgcttgggactcgaacaatcatcccagcaaaattccgtggagaaattttaaaattgatccatgagacacatccgggaatcgtgcgcatgaagtcgctggcgagacaaaaagtctggtggcccggcatcgacaaggacatcgaagcaattcgtaagaatgcaaaatttgccagaaaaatgctgcagaaatga

SEQ ID NO: 76904 - DNA, 2247 bp, Heterodera glycines
atgccaaaaattgaaatggacaaattaggcgaagaatcatttgaaaatgagtttaatgaggaagctgatcagaatgtttcgtctgctgatcacaacgattctgcaaatgaaatggaatcgcaaaaaaaattaggagaaaaaagagagagaatggagaaaagtaaagaaatcaaaatggaactgatcagaaattttgataaaatgagaaaagaaaaaatttatgggtttaattatgacaaaaagaaaagaaataaaattgaaaatgaaattgctattgaaattggaattaatcgaaataaaatttataaattgaagaaggaattgggacaaaaaagagtgaaaacggaggaaagtgaagaaacaaaaatggaactgatcagaaaatttgataaaatgagaaaagaaaaaatttatgggtttaaatacgacaaaaagaaaagacaaaaaattgaaacagaaatagctaatgaattgggaattaatcgaaataaaatttataaattgaagaaggaattgggacaaaaaagagtgaaaacggaggaaagtgaagaaacaaaaatggaactgatcagaaaatttgataaaatgagaaaagaaaaaatttatgggtttaattatgacaaaaagaaaagaaataaaattgaaaatgaaattgctattgaaattggaattaaaagaaagaaaatttacaaatggaagaaggaattggaaattggtaagagatcaatggcatattcgattttttattatttattgtctcattttaaggtataaaaaagaaagtttcaacgcaacaacaaattgaaaaagtaaaagaatttgaaaaagtgaaagaagaatttgcaaaaaatttcaatttggaaccaaattggaaaattaaagaaaaaatagcggaaaaaattggtgctagaatgaacacaatttctgcttggaaaagaaaattggactctatagctagtaacattttattacaaccaatttaagtagttatgttgaaattttagagaaattttcattttcaaatcagcaaaaacagtttaaggtataaaaaagaaattttcaacgcaacaacaaattgaaaaagtaaaagaatttgaaaaagtgaaagaagaatttgcaaaaaatttcaatttggaaccaaattggaaaattaaagaaaaaattgcaataaaattgggcgttgtgttggaaacaatttgtagatggaaaagaaaattcggtttcagcattcgtaaatttttaatttataaaattttaaaaattgcttttttaggagaaaaaaaacgttactcggatgctgaaaaattggaatatgtgaaaagaagtgaggaaataagaaaaagtaatccaatgatgagtgagacgaaaattgctgaagaattggaaatccctaggcaaaacttaagccaatggacgaagaaattgggcaccaaatcgattcattagctttagctgtaatttggaaaattaatgggcttatgtagaaaaacatgtacaagaaatttaaggagtttgccaatgtcaaaaaaaatatgaaattttctcaaaaaatgggtgtcactcaagccgcctaggaatttgttccaaaatatccccggttttaagccatttttctggttctcagaccgctctgaaggagtgttctgattatcgcagcgcaactgacttttctgtttaacataaaaagttactcttacatgaattttttcagattttgtgtggtttctaggaaatttgtgagttatcaaaaaagagtaattggaacacccatttttttttggaaaaattcataatttttttttgtcatttccaatcgccgtaaattttcgtgttcacaacagccttgttttatcgatacaagtgtcgctacagatttactgttgttatattcttcttcatacaaatgaagtttatgcggttatgctttgcgattcaactgctgatattccccctgcgagaattattgtttatccgaaaaccgaataaaaaattaacagatttatacccactagataaatttgtagagccaatgacatatcattactgtatccatgtggtcaaaaaggatatcattttggatactgatgtgccacgaaatatgcatgaacatttaatgaatctaatggaccgcaatggcaattgttaataaaactggaaaacccggtctttttgttacttttacatgcaatcctaatgaccctgatacattaacacaccgtccgaaaaaacgagatgtgtaccaataaa

SEQ ID NO: 76905 - DNA, 417 bp, Heterodera glycines
atgacagatgtgctgctcattggcacgcaatgtttgccagcggtgcgatttggagaaaaagcatttccaattaaaattaacaaaagtgggggaatcgcgtgtaaaagcaaaattaataataataataataaaataatttaaacatttttaaagtaattttattggcttattacgaaagaaagcattacggacggatgaattattgtaagaaagtgaaatttacaaaagaaatttaatattttaaagttcgcgtcttcttccaccccttttatattgtacaaagaatttcgtccttttgttaatcgcactttaaaatgcctaattatttaatagtgcaaattggccaatccaaccaagatttgcttttattttacattttcgagggaattattcgactcggaatgtatttacaataaa

SEQ ID NO: 76906 - DNA, 2286 bp, Heterodera glycines
atgacgagtcacacgccggaatggaaaaacttagcagcaggcggtagccatggaattcgttcatccgttctgactagtctaaacggcacaacgccatcgagaaacccaaactatgtgaaaggaaaggtcaacgagggcgatcgctatttatgtctcagaagtgaggagcaattggaactcgccaatcatttgttgtcctcgcgactgctcgtgagattttctttcaacaatctccagttttatttaatcacatgattaaggataatgagaacaccaacaatttgaatacgtccacttcatgtccgacgagtcccgcttccaaattggaacagcagacgaagaaacaaatgatgagggtcaaatcggacaatgcagtgaattcgttggctgattttgaccgagtttgcgcatttcgtaagggactcgctcctctagcaaaattcggtagattaactaataaagccatgaattttacatccaattcattctctgcaaggccacaaacagcaggtgaatgtgcttttttcttgtgttcagccaacttccagttgtgtgaaacggtctcgtcgttacgtcgcaaaggatcccgagagaatgttggatgcgccagatttattggacgatttttgtaaacaaaagttcacatattacatttttccaactattccagattcgaatttgattgattggagcaagactaattgtgtcgccgttggcttaggatcaaaaatttttcaatggaacgcggggaccggtgccgtggatgtcagttcttttacagttttttccaccaaatcttgtgaatttaaggagataaaagatttctctgaaacgcattcgcatccaactctcgtcaaatggtcttgcgaaggacaatatcttgccgttgggttcaatgacggacaattaaaggtgagccgaacggatagcgaagacataatgagacttcatttcgttttcagttgttggacagcgccaccaaaaaagtgctgagaacaattcacacgaccacagacatgcgattggcatgtgccacatggacacacaaagggcgcatttgctgtggctcgaagaacggtcgaatttaccaccacgatgttcgaataaaaaattcgttgatcaggttcaatatttctaaaaaattagcacacaaaccatctcattttaagcactttggatgctcatacgcacgaagtttgtggcctaaagtggagcccagatgagcattacctcaccagtggaggttctgacgcattagtaaatgtttgggagaatgtgcaattatcgtcaaataatccggttaatacaaatatttatcactttctattaccaatgcttttatgaattactcaagacaccgcttttcaaattgaatgaccacgtgtcgactgtgaaggccattgaatacgttcggtttctttgttcttttgatggctcatttgtgttttaggtgccaacgatgggtttaggcccagccaatctcgtggcaactggtggtggcactcgagaccacaccatacgcttttggaacctaacggatggcagtgctcacttcacattggacacgcacagccaagtgaagtagcattttacaaaagttttaattgcgcgaatttaggtttccgccattctcttcagcaaacctcacggcgaaatgatcaccggccatggggccccaaaggcgggcgttcgcgtttggcaccacgagcccaacaaaatcaaaaagtttgagcagacggcggagttgaaccaggcacatggcggacgcgtgttggcactttgtcaaagtccgtgcggagagtacgtaatcgccgcaaaccaagtgatttttgttgttttgtttcaacaaaccattttcttgctgtgaaattgcaggacgaagtgctcaggatttggcacgtttggaagatggacgaatcgatgcgaaaacagacgcaggaaagtgtaacggcaaatgcgaggaaacagcttcagggcgccgctggaaatatcattcgatgaaagcaccaaaattacctatttattttaaccctttcgttctctgcctcactattttttcaatattttagcatttcattaggattgttttttgtttttacgtattcaacttaacttttatactatctttcatttatttgtgtttttcatgcataaaacaaaaagtgcactgaaaattgttacagtaaaaagcattagaataatttgacaattattcgttgtcagcacttatcaaaattagcaaaacattctcttcccttatctccgttaaaaacaaagaaaaggaaa

SEQ ID NO: 76907 - DNA, 620 bp, Heterodera glycines
caattcgactgatgttggagtgaaagagaacagtgccaaaacaaatgacccaaataaatttgagaaggccggatggctttacaaatggacaaattatgtcaagggctatcggcagcgatggtttgtccttaatgctgaaggaattctgagctattatcggtttggttgttttttatatcaaaggaaatcaaatacttgaaggcacccatcggaagtcaatcgctcttgtagaggcagcataaatttgagcgaagcgaacattcacagcaatcagggcgagtcgagccacagcttggttggtttttaatttattttaaaatttcataaattagccaccgttttaatatgtaataataatttatattttaaaatactgtgaaaatcaaacctattgctagatcatcactactccatcagcccaaacctttcatttaaaggcatcaaatgaggtaatttaaattgtaaaattatttaatttacctaattaggtatgcagaatgatatttttagattgatcgttcacaatggcttaaagcactcgaatatgctaaacacagggcaataatacaggccgtttcacatgaggaagatgaagaggaaagccaacttttgctcaacaa

SEQ ID NO: 76908 - DNA, 183 bp, Heterodera glycines
cttcaaaacatccgcccaagccgacaaattgtaaaagtttttgtttacaaatttctcaaattggacggaattctcgtccttcgactgatcgactcaaacacaggacaaatccatatggctgacattgtccatcagctatggctaagtttcaacgagaaaagctattttaaagaaacaagctga

SEQ ID NO: 76909 - DNA, 1477 bp, Heterodera glycines
atggaaaatgataagaagaacattttggaaagaatcagtgaaatggagaagcagacaaagaaaaaggtgaatgaatgaatggaagagaaaagtaaaataaaatatttacgggaaaaataatttttaatttatttaataaattattatataatattataaaaatatagaattatttactttcaggtgtttttaaaattccaagaaaattgttgggatgccttcgcttgtcacaaggacatccaaatcagtggtgacaaaagtctcattgtccagcataagggaaatacttttggtatttccgtcttcgcaaaatgtccgattttgctgaacaagcatttgtctgactttttttactacgaaatttcagttatgaaaaaaaagaagtaagcgaattttgtataaaaagtgaaatattttaatatatttttttctttattcagttgggtcatcttcggattcgctgttaaacagcagacaaaattggatgaatcaattcaacttgaaaagggcacttatgcatttgacaattatggctttttatggattaacggaaaaggaaaaggagcaaatgccgaatattcctacggtgttggcgataccgttggaattggcgtcaattcggccactcgacagatcattttcaccaaaaatgggcttcgtttgggttagcaaataataaataatataattttacgatttttaaattacaatttggttaattgtctatttatctaatttattttatgtttaaaataatcaaaaatcccttaactttttcacagattcctctgattttttggttgctccatcttttgctgatggttctttttatccattcgtttctttactcttttctggtgacaaaattgaggcgaattttgggcccaatttcaaattcgatttggcgactctctgaaggaaggattaattattcactaatgttttcgatcaatttgctcgtttttatcatttttatgtttttcttcttcaattaaaatttggttttctgtaataatcggaaaattttgtcgtttcccgggtatttaagactaaaagatgaaaatttgcaaaaaaatagggttttttccaattatatgctaagattcataatgatatttataaactcgaaaaaaactaagaaattttttttggcattttaatgatttttgctatgaaaatttgttaaaattttaagattttaattgatatattttaagctgacgaggaaaagcgctcacaactagaaaatgatcagaagaaactcttggaaaaaatcagcgaattggaaaagcagcaaaaagaacagtcaaaaggcgaggggaaattaaatatttaaatatttgcatttaatttacaaactatttaatttttagctgctgcggatcaattttcaaaaattttggaaaaaatcactgaactggagaaagacggaagctgaaaagaaagctaaataagggaaaaaggaaaaacgaataaa

SEQ ID NO: 76910 - DNA, 3176 bp, Heterodera glycines
atgaaagtggctgaactgatgtgcatcaaaacggcactgaacgaattcattgcttaccaacgattggctcaaatggtggccaacggcacacttaatggggtaattaatgtacagtaaaaaggggggaaatgccatcaaaggatgccaaatttgtttaaatttaagcacgtgcgaaaatggtaatttttaattaaaatataatttaataaattttaattgtccggatggcaaccttcgctttgtgcgctttttcaaatgtgtcaaaatgatcggtgaaaaataataaattaattgaatttaatttaaaattccaaattttttctcaggtagccaaatcgaatttttgagcgttatatgcccaaagaagaaaagtgtttttgccaagttaagttgagcatttctaaattatgcaaaaaattaaatttccgaaattttttttttgaaaattcataaatcaaaaaagttaaaattaagactcactctattttttaaaacaaaaattaataatttaaatataaaaatttcgcacattaaaagaaaacacaaataaaaatacatatttattgaattttaaaaaaccgctttattttttgaaaaaacttttaaaagccctttttaaaatgttaataaaaattttccccaaaattttcaggttgcatttcggtcctttgtttccggtatttgtaccagctttttgaccacctgtgttgccggtaaatgatgggactgccaatggcatgcaacaattcggtgccgcacggatgggacgaaaaatgcctcaatttggacacattgtgatcagcaattttaatggtggggatcggcgatgatcaaatgcggagcaacaaagtgagaacagatgaaaaggtgatcaaatttggtgaccaatcaatttgcaattggaattaaagccttgtaaatgtctaatcatcggattaatttaatataattttgattatactttaaatagagcgggattaaatgcccaataaatcaataatgttagacattttgtcagggatttaagaatccgaaatttgcacattttctcttagtttttttttgaataagaggataatgccaaaaatcggcccaaattagctaggatataattaatgacgatttttgtatataatatattttttttttcgatttaacaagaatccattaaattttcagttctatttattgacacaaatgtctcgttttttgaaacggtgtataaaatgccgaaccgtaactcggcaaaagcatttgctttaggtcaatactgtattttgattttaaaaattcacttatttggccaagaaaaatgcaggcaaacgccttgcagaaaattaatttgtgtataaattcgagaaataggtttacgaagatacaatattaaaggtcaaataatttgtgcaattttatttaacaattcaaatgactaatttcaaaaggacaaaaaataaaataaaaatacatccattggacaagtcagtggatcaaacctatcctgtctttggatcaaagttattatgaagagggaaggctcacaaatgaagacaaatcggaaaccaattacaacaaatctacccaaactccatggacacttgaggcctctcttttgttagaaaattaatgttggagccgaggggaatggtgagggtgggatccagggacggtcccaggatttcggcttccgcctgctcaggcggcgacttacctttttttctcttcctctattatgttacccttttctccctcttctctttatttctctctctgtcatattgttttttctgtcctccttctctttctctcttcttcctcttttatttcctttgtcttactgaccaaaatatgtctaaccaattctatttcatttttatttttctcttccctcccatgcatatttttagcattgagaaatcaataccgaaattttgaaaaaatggactgacatgaaacaaaacgaaggaataggtaatggtcatttatttttatttgtcttttttctttttcatttattcaatagtaacatttttattaatgaaaacttaaatttaaatctttttttagagtaccaaaactcaaaaatgtcaatttcgaccaattcaataaattgtggagatgattttacaccagcagaaaacaggggtaaaggaaatgggagaaaaatttaaattttgaatatgaattaattaaattattttaaaattaaagatttaatttatttaaattttagaagtgaatggcgatgcaattagtttggaaaatgatggacaattatttgatggaaacagtgaaacgatcactgatcaacaacaacagcttaaggtgggcggaagaaaagctaacagaagaaagaattgcagaaaaattgaattaatgtgagacaaaagcgattttgttaatttaaattcaggaatttcatgaaaagtttgccaaattggaaacggaattgaaaatggccaaattggaactggaaaatgtgagtttgcataaaaatttgagtaaattataaatgccaaaattttataattatttttagaaggcacttgaacaaaagttaatgcaccaggaattggtaggcgaacagaaggcattgaaggaaaaagtggtcaaaattgaacagaaaaacggtatggtaaatgaaaataaataaagaaaaatatatttttaacaggatcattttttacgaaaagaattataaaaatgtttaaatttagattttaaaattaaaatgtcatcattcacgacttcttcatcggccgacgaattttctcctcttcaacgtaaaaaatttcttaaaatgcataattaaaatacaataataataaacattttaaattaccaccattttacaaattttccgaattatttatcccaaattcgaacccgattcaagaatccagaattggtagaaaccataaaaaagaaataaccataaaataatttgacaactttaaaagctataaccttttataacttgacaacaattttaaaaaattaattgaaaattgcttcaaatttcagtttcgggagatcatttgaaagcaattttggagagaattggtgaattggagaagcagcaacaacagcagacaaaaggcgaggccaatttaacgaaaatgaaatttttgggcttttctttggtaactgcgcaattggacatttttcgaatcctttaa

SEQ ID NO: 76911 - DNA, 1463 bp, Heterodera glycines
atgacgcctcttttccttgctgtccgccatgccaatttgccgctgtgccgtgtgctggtcgcgcgtggtgccaacattgacttgggcacggactttgccacaacgccgctgatgcacgcttgcaaaagatcgcaaacggaaattggtagagagacgaaaatttgaaaaaatgcgtaatttttcccgtcattttttcccccacagtcacatttcttgtcgagaatggtgccaacatcaatctgcagaatggtgatggggcaacagcactgatgtacgcgtgttacacgggaaatgtagggaaaaatttccattggcgaaatgttttccaacatttccatttgaattcaggtggacattgtgcgcttgttgctgtcacatggtgcaaatgtcgagcaaatagatttcgaaggtgggggattactgttacagtacccaaaaataccatgccacaaatgttgtcctaatttcaggattccatttcgcacttaagagcgctgccatgggcggcagtttggaggtgtgccgtctgctggtggaggagtgggccgcagatgtcaaccaacaaaccatccaagagcgatacactccagtgatttgcgctgccagtaaaggacatttggccatcggtgggagagaattgtggcaaagtgccaaaaatgtaatctccctaattttcagtgaatttcctcgtcgaacatggcgccgaccttcaacgtgttgacgtggacggacacaatgctttgatgtgggcagtgaagtttgggaagattgaaatggcacggcatttggtggccatcggcgcggacattaaccaacggaacattgaaggtgagcagcagcggaagtggccaaattgttgtgctagcgagcgttttattcgcccatttcaggcaaacgggcacaggatttcgcggaagagagcggaaatgccgaaatggtggacatttttcgtgcaaccgcgacggacaatgggcgggacgcggcggagggcaccgatgggtaaagaaaaatttgattgtttttgatcaataataattgttttttccattttcagacagcaaaacgatcaacagcagatgtgacagcacagagagagcgaatcaatggccaaaagcggcggatggatttcttcggaagacattaattgatcactaattgtattgtatttattatgctcatcattcccatttgatccgatttgtctgtaatatgttccaaatatctctgattgtacatataatttgtgagtcgttgtataaatgtccaatgaatttgagaaaaactcggaatttttgtaatattaaaattttgggctacaatcggttggaaaaatgaacaagaacctttcagtttattgacggtactcagtcagccctttaataatttattttaagattttctttacataagaccttttttaactcccccaattcctcccctccccacgtgcaattcacaataaa

SEQ ID NO: 76912 - DNA, 1222 bp, Heterodera glycines
  unsure (1)..(1222): unsure at all n locations
atggcaacatccaacaattgcgtgtgctgatcgattcgctggacgccgacgagctgaacactttgctgcggtggacggttgatccagtggagcgcgtcacccgaacaggatcagctctttggtgtgccttctttcgacgacacttcgaaattgttgctctcttggtagtgactgatcattttttctggtttaaatcactaattttgtatggcattttcagttggagaagggtgcagatccgaatgagccgatcattttcgaaacgcacgatcacagaacgagtgagtgttgttgatgaatgttttaccatggattttcgagtgtcactgtgttaacaaatccggcaccatttcgaccaatttcgaattctttttctcgaaaaatgaaatttggatattttggncgaattnttatccaggattcggaattggtcgaaatacggattccggcgatccctatgaacttttaagcgtcccattgaattttcacgcgtcccatgaacttcatcaattaggaattttctttttttagaattaaccaacttttttatctttggtttccatccgaatagcccatgcttgacatagcgtgtccagacatttgcgcctatgtccaaaatcggattcaaactttaattttttttgattctgtttcacgcatcccacgtccattgtacttttctaattgaaagaaagaaaagaaaatattcccaacattaaaaaaatccatgggacgcgtaaaagtcaatgggacgcgtattctgcactagaaccgaaaattgaatgacaaaaaaatctaccccctccccctaattttcagtgaatttcctcatcgaacatggagccgaccttcaacgtgttgacgtggacggacacaatgctttgatgtgggcagtgaagaatgggaagattgaaatggcacggcatttggtggccatcggcgcggacattaaccaacggaacatggaaggtgagcagcagcggaagtggccaaattgttgtgctagcgagcgttttattcgcccatttcaggcaaacgggcacaggattttgcggaagagagcggaaatgccgaaatggtggacatttttcgtgcaaccgcgacggacaatgggcgacacgcggcggagggcaccgatgggtaaagaaaaatttgattgtttttgatcaataataattgtttttccattttcagacagcaaaacgatcaagagcagatgtga

SEQ ID NO: 76913 - DNA, 1539 bp, Heterodera glycines
atgaatagagaatttttgatctatataattattaaaacaaacttaaatttcgttgtacctgaaaaaaagttatgaaggattaatgtggaatattttatggtcatacaaaaatataagcacatttcggtgctgaattatgatttattaatcagcaaataaaatgaaaataatgttttggaactgctcattagcaaaactttaaaataaaatttattttctaaaattaatctttacttttataaaattcagtggcactttggacacattgggccgtcgttatttgtacagcttttattggtcaacactgatgctaaccgcaattggcgaagtgccatggccaataaaaagtgtcgaatttgtcattgtttgtgccgatttgttgtttggcgttttggtttttgcaacaacagtcggcaatgttggcacgtgagttttgaagagactttttttacggcattttgtgttttataataaaatttttccatattttcaaagtctgatcacaaatgctggctcggcgcgattggattttcagacaaacattgacaaagtgaaatcttttatgaagcatcggtcggtcggtaaaaaggtaaccaaatacaatttgaaaaataattaaattaataaatatttaaaattttttgtttttttttgcctatttttgagttggtccaccgaattggcaaatggtttgattatttgtgggagaataaacaggcaatgggtggtcgtgatgatcaggaagtgttgaagcttttgccgacaaaattgcaagcagaaattgcgatgcatgtgcattttgagacgctgcgcaaagtccgactttttcaggtcctaaaaaattaaaattaaaaaataatattaattttatttaaatttaattgttgatttaaattttataattaaataaattttatagtttccataaaaatatatgtccaaataaaaaagagtaattttaaaatactatatgtgtttaaggattgtgaatctggactcttgggtgaattagtgctaaaattggagttacaagtaaaaacaaattaattaattaattaatttaaaaaaagtttgttttttaggtttttagtccaaaagactatgtctgcaggaaaggcgacgttggacgagaaatggtgcgtttattaattttaatacatatatttaagtaaataattatactaataaacacattaatataaaattatatctaattgcttttttaattattcttttttcttttttaattaattttttcagtatattgtcaaaaaaggtcgtcttcaagtggttgctgatgatggagttaaaatttttcacacattagttgaaggagctgttttcggtgaactcagccttctcaatataccaggtaatattttatttaaaaaattaaaagataaattaaaaacacattaaataaattgtattaattttttaaattaatccaaaacaaatgatacttatagaactctaaatttacactttcatatagtaaatacttatataatttaaataattcctttgattaataataaa

SEQ ID NO: 76914 - DNA, 2154 bp, Heterodera glycines
atgagttttccatttccagaggaacagaactgcactctcccggtcgaaacacctccgctaacagtaaaatcgaatttatacatcccaattcgaattccacgagtttttccggcattcaaatgctggaatatcaccacaatcgcatgcacagaatcattccttcgagtcatcacactggaccaccctgataagaaaatcgaaacagaagcatctgtagaggattgtcaggcctcacttcaccatttgccgatgaatcgagtgagcgaaacgagatgggaaagtctgtcaccaattcaaagagaatacggatggtatggcgtaaactgtttcgacaacgtccaaacaatagtcgaagagggaacagcaggaatcttggaaggaaaaaggctgataacatcttggggtgattccttaaaagtcgataagagtcttggtgaagaagggagctggattcggttgccgggcgcaatggaactgcttatgtggcgaataccatctgaagaattttggcattcccacttcgctattggacccgtagtaacggaaatatggccaaataaggcggttgttgtcgatgaacttcagtatacttttccgataagcaaaaatcaggaaaggaaattcccggtgattggagtccccaatgatgctttgaagactgagaacaatgtttatgtacatgttattggtaaagtaaattcgacaaaaataactcgagccagacgggatgccaatccaaagaagtcaaatgtaccaagagccaacccgaccaaaaagccaaacataagaagaaatcaaaacgatggactcccatccaacagttccgtctcgactatggcaattccgaccaccacaattccggtcacaacaaccaaaattccgaccacggcgattccgaccaccacaattccggtcacaacaaccaaaattccgaccacggcgattccgaccaccacaattccggtcacaacaaccaaaattccgaccacggcgattccgaccaccacaattccggccacgacaaccaaaattccgaccacggcgtttccgaccaccacaattccggtcacgacagccaaaattccgaccacggcgattccgaccaccacaattccggccacgacaaccaaaattccgatcacagcgattccgaccaccacaattccggtcacgacaaccaaaattccgaccacggcgattccaaccaccaaaattccgaccaccaaaattccgaccactagaattccggtcaccacaatccgcagtagctcagcattggctacacctcaaagctccactgacaccacaaacaatattccagccactcttaaggaacttaatgagttggcacaacaaattacggatgatgatgtgctcagacacagtgcgcccacgccatttattattcaaaacgagcccagtgaagaaagtccgacaaccgtgatcacaaaaagagaggtgtccgaaagcaacgaagttgggtctgaaaaattctggaaggagaagaatctctaccacgagaattcccgacttagttatttgggatggaagacacaccgagtcaacatacaaaatgcgcgggaaaaatggatttccgattgccatgagcggaataacgctttagcaattgccaaagctcttgctcgccaaatgcctgaagatgcggctcggtcgctgtacaaaagggatgatattaccgccttttggacacagccctcaagggaacagaaatggtcaatcgcactttgcagacagatgaaagcggaagaagttttttgggatcaaaaagttgaaacaaaatgcttccgagaactgcccgtgaaagtcacaagacaaatcctctttgtgaaaccagggacgcgcgatctgacttacatcggtactgaaattagctgcgatgcacaaggaaataatccatgggcagcggagcacagcaacaataactcagaacttaataatgctaatctgggacaccgattcataacggaccaatattcaaacgcacaaaatcctctgattttttttaaccgtggctcaatttttgagtctgagcaggcacgtctggagagaaacttaaaggaattaacggaaagaatcacacgacccgaattggacttcccggaaattgggacaattgatgcaaatcaaacataa

SEQ ID NO: 76915 - DNA, 1165 bp, Heterodera glycines
atgtcatcatccatcgcttcgccagatacatttttgcgttcagaaactgatcaaagtaatggaaaaatttttaaaaaattacgaaaaaagaaaataattattaaaaataaaataaattcaaaatctaacttttatcagcaccagcagcatcagcagcagaagaagtgggcaaatacgaagtgttcagttggcacggaaatttgagtgatcaattgtcagctgaactgttcgtcactgatcagcagctgctgaaggtgggccatttttgaatggacaaatgatcaaaccgcggcgggaggggaggggaggccaaaaacagagaaagatttatggaaaatttagttcaaaatttccattcgtttttaaaggttttccaatgatataaaattaaaaggagaaagggccgacctattcctcgaacaatttgatggcattttgccaaaaccattcaattataaaatgaacacaaattacaaattatttattgggctgtaattatttgttttatttaaggaatgccgagaaaaacttgcgaagtccgaattgaaggaaacgaaattgctgtggaataacggtgaactgaatgctgaaaatgtgagcaaaataaaaattaaatttcagaggacgaagtggctaaaacagagaaaatttcacttttttaaatttagagggctctcaaagcagagttggaaaagcagaaactgatgacggaacacattgaattgaaggcaaaagtcttcaatatggagcaggaaaagcagcaatttgagaaaaaatacggtagggaaaattttaaaaataattataaatttccagtaccgtaccccgagccttactgttaaaataagcatttcaaaaagaattccttaaaaattcatattgtagtttctgtggatgtgttcaattcattggcggaacgcatcaaacgattggaaaatcagcagcaggagaagagagaggaggacagaaatggtaaaattgaaaaaacggaccgtaaatttcaaaatttcttctaaattaacattcagctgaccgtttaccaaaatgcaattaaatttcagtttctgttggccaattgttggagaaatttttggcaggagaaaagcagcaaaaacagcagaaaaaggacaacgctcagcagagattggatggaaaatgttctgtg

SEQ ID NO: 76916 - DNA, 1233 bp, Heterodera glycines
ttttccaatttgaagtcggtcccttccaattccttcgtccgacgactcgccgtttgtttaatcgagaaaatagacggaaattttgtcgatttttgtcgtttatggaccaaatttctacaaattttgcgtcatcattgggagtacaatttgaacttgccaaagtcagtctcgccgattcctcctttatttactttgcttttgagttgtcagttttgacactgatgaaaggccccaattgtcgtgctgtctcctgcaccaaaaactccaaatgattaacttttgcatttcggtgaagaaacgaaagcacaaagaaatggaagcgaacgaaacggagaatttgggcggaagtgccaaagatttgccagcaaatcgaaacactgcgggtaaattcggtgagattagtgggaaaaccgaccgaagacagaccgatttttaattgcatcttgttaaattgggagtgaatttacattatcattttggttcgttgaaattactctcttaagacgacgagtttttcgatgcgattgaatcattcgatcaatttgacgtcgccacttcgtcggagtgccctcgggggagaagccttccactcgattcgaatgaatttttaaagagcaatccaaaccaacgaatttttgttccttttactcaggtggtcattaattgtaagtaaattcgctgaatattaccgcaaaagccctttaggaggagggcccaatgacggaagaccaaattgagcagagagagtcctttctgtgcaatttggaggacgccaatttgaggacgaaggcgcagtccgagctgttgttgtccgacatgcaagcattcaaagtaagccatgtttttgtctaagtttttggttctgtttaaggccgcaaatccgggctgtgaattggtggattttttgagatggcattcgccaagggatctgacggaaggtgagggggaggggaggagaggatatttgacaatgatggatcaaaccgtttaagaaggcgaactctctgatcggatgaaaattgctgggaatttttggcaagagacttgggactcggcccgtgcgattcccgcgacgcagcagcaacgcctcttcaacgagacgcgagaagttgagcaagtacagacaaacatttgaagggtttcgcacccaatcgaattactttttagattcttcaatatttcgcgaacatttgtatcaaagaactcgttgaacttctccttccaattgtctct

SEQ ID NO: 76917 - DNA, 1384 bp, Heterodera glycines
aaaaaaggaccgacaaatcatcagctgttgtcagcggtgccattcggctgcacatcaaagtggacatcaatggcgaggagcggctggcaccgttccatctacagtacacctgtcttcatgagcatttgttcctggtacggtacacacacgcaacaaatgatttaccgttttagagcccccgggggcctattttccaattaattagtagcaatttgagttgaaaaaaactgatataataattctgtatttttttttatttttataaatatgttgacatttttgaaaataaataaattttggattttattttgcatcggactgtatttgaaattctaaaacaaatttaactttcaaaaatttcttcatgttttagccttcaacaaggaaggttatttaattaaatttttttaaaatatatatttattttttaattttattttaaacctaataccctcctacttttaatattttcaaaaaaattttttttttaattaaaatccattttatgatgcattttttgccggttcaacgcaaccaatgaaagctataaaaaaaattttaattttatttctaaacctaatttaaaatattttcaaaattattataataaaaaatttttttttaatttataaccatttttatgatgctttttttatgacgaaattcagtaccagtacaaagatgacgaggtgcgcctcccacagaagcagcagcagcaccaactcaaacagtatcaacagcagatggccggcacgacggatacggtagtgaacacgtacgacacggcatggacactgtattttgacgaaaacggtcaacagattgtggatgagtttgcaatgcgatacggaattgagcaaatttatcaggtggatgggaaagagagagaggggggggggggggaattggcacaatgccaagggaaaaagcgataattttaaaagttgtaaatttgtttttattaaaaatattttaatttatttattaaaaatatttttcattatttatttgaatataaataaaatatcactatttaaaaaatttaatttcttttataatttattttttataagatattttggtttatttattttgaatttaaatttaaaaaaacaaattattaaattaatttttattctcgtaaaataagtaaaaaaaaatatgatttgttttttattaaaatatttcgatattttaattttaaataaattgcttaataataaatggtattccattatttattttatttatttatttttttgtgcaggccatgacccatttcgcctgtttgtgcaccaaatacatgtgcgatggcgtgcccgccgtgttgtccatgcttttggccaatatcaacgcgcactttgcccacgcgacagcaaacgta

SEQ ID NO: 76918 - DNA, 928 bp, Heterodera glycines
  unsure (1)..(928): unsure at all n locations
aaacaactcgtctacagaaagtgccttcaagcactgatctatccgatcagtgccaccacaacaccgcacaatttttgcacaacaaattttcagcaggtgagactggcactggcttaatggtccaacttttttggcatttttttttcttttaattttggcattaaattttttatttgttggcacaatttttcagactccccccatctggtgctatgagtgtgagggccttttgtggggtttggccagacaaggtgggaaatacaattttaaaatttgtataaaatgaatttttaaaacaatgggttgaatgccgtgctgattttttttaatttaaaatttatttcctttttttttttgctttggctttggcattgtgtttttttattttctgacattattgttttttaaataattttttgtttcgaactcatttctcgggttttgttaggtaaaaatcatattcttccacatatatatttcttgaataaatattattatttgtatttggcaaataattaaattcagaaaaaaaaaatcaaaaatacgtaagccttgcacacataaattttatttgaaaaatttggatttttttttgcagtgatccgcgatcgaatgaaggcccaggagcgcaacaagccggaagtgttccgccgcatttcggacgcgttcagcgtggacgacaaaacgcagcagcaggtggggccaataggagggagagtcgatggagtcctggaaagtgtacttgaaattaatattccgaaaataacccaactctggaatctggaaaatcctggagaataagccaatgtttgcctggaaaattgaattngttcatgtgctcggtgttttgggcgaaatttccaaaatttgagggaaaattttatgagctatattaacttttaaagacctcaaaaatctctttaataaa

SEQ ID NO: 76919 - DNA, 1511 bp, Heterodera glycines
attcggtgggtgcatcgttgggcatggacgtctcgccgtttgtgctcttcgaccaaaattatttatgagcaaaacgggaatcccgctgaggtgaatatattcatttatatatgcatcattttgccgtatatcttttattttgtctcaggtcctcaaacttagcaacgaaaaaatcgaccaaaatgccattggagcaaacgaagtttttgtccgatggatggccagtccgataaatccgtcagacatcaatcaaattcaggggggtccgtaacgttccgtcatgtttttcttacgttttaaaccttttttagtgtatccgattaagccacctttgcctgccgttgcgggcaacgaaggctgtgcccgagttgagaaggtttttcataataatcaggcaccaaatattcattcgtcttgccgttttcagattggttccaacgttcgagagttgaaagtgggcgacatcgttcttcctaccaatgccggccttggcacttggtgtacccacggcatttatcagtcgactcaactgttccctattgacagttctttgcaactcgactcaatcgcaacggcaatgctccaagtaaacaaatgcaaaatatttgtctgatttaattcggcctgtttccaaatctttgtttttaggtgaatccgtccaccgcctatcgaatgcttcatgactatgccaaattggtccccggtgacattgtggtacaaaacgggggaaactctgctgtcggacgcttcgttattcaggcaaattgcaattaatttcaaaaccaaaactatgaaaatttaatgcgaaacgtaaccatttgtaattttatcctttttctccttttccctcaacagatgtgtcgaaatttgggctttaaatcgatcagcgtcgtccgtgaccgaccccaaattaacgagatgaaagatgagctcaaacaattgggggcaactgaggtttttacggaggaggaggtaccgaaagaggagggaattcttccaattgcttttttgttcgtttagttcgccaaggcagtgaagtcaaaaattggagcaaaattggcgttgaattgcgtcggtgggaaaagcacgacttaccttaccagagcgttggccaatggcgggtgcatggtcacttacggaggaatgtccaaaaacccggtccaaggtatggaaattgggtctatttccacctaccccgatattaattaccacatttacaccgtttagtgcccacttcctcgttgattttcaatgatatcactttgtacggcttttggatgtcgcgatggtacaattgtggacattcggaggtaaaacagaataaaagatgatgaccgaaacgatggaatcttctcaaggaacgtgcgaatatgtacaaagtctttgacgattggtataaaagtgggaagctttcgacgccgccctttcgaaaatggaaaattgaggaatacaaagaagcggtcgagaatgccatggaaccgatgacgaagttccagcacgtctttgcgtat

SEQ ID NO: 76920 - DNA, 151 bp, Heterodera glycines
atggaattcctccgcggactttgtcccgcttttgtcgtcttcgccgccgctgtgttcgttttgtcggtgcatttcgaacaatgtgccgggcgacagcgctgggccgaggtgacgcaccgggtcgacttcgtcgcgaaagtctatgccctcg

SEQ ID NO: 76921 - DNA, 1613 bp, Heterodera glycines
atgcgaaaaggaaatcagtttggattttacttttcaattgttgacacaaaatgccaaaggtcttgcgatttgtcggcccgttgctgtgacgtttctccgccacctccgccgatggaccgccgacgacggcacagcaacgaattgcggcaatccctggaaaagggagccgaaggacaaggactgcttgcgaagcggacgaacagcattcagcagctgatcagtgcactgtccgagaattcgccaccgtcgccaaaagttagttggccatccatcatttaaatgtgtattttagaatagatttgtgtgatcgatgaatggttgtgccgattgatcacctttttaaatagcaattttattaaattaagcgctgatttgtcttctcatttgactgttttttccgttcagtctttgcgtcgtttcgatgcgttgcgcacttttccctttccatcccttcgcgttccgttccgaaagtggcgaccgcccaaaaaggaattcatttatgagcactcaaaaccgatggagtgagttggggacaatgcgatgggcggggggagagaacgggcggaattgagacggactggaaaagtttttccatcgggcagtgggaacctccccaaaactcctggaccgtcgctgattaccaccccatatttgacaaatagatagagccttcttcaaagcctaatttgtagtatttgatcaactgtaaaatagtcttttggtccgccgatttctcctctcccgcctaaaatgaaaaacattttcagtttcatcacccaattggcccttcagaagcaccgctgcgcgggttgtggcctcaaattggaccacgtttatgtgaagcggacgctctattgccattacttctcgaagttgttctgccagtgctgtcaccaggggacaaaagtgcgaaacatttgacagacaattaaactgtcaaatcaacagtaaattcatttagacgcgaatccctgcgctcattttgcacgagtggaacttcaaggagtacccagtgagcgacattgctctcaaatttctgctggacaacgccgaccagcccgtgttcgatgtccgactggtcaaccccgggctgtaccgtcgtgcaaagaatttgcgcaaatttcggaaattgcgcgtcaaaatctcacatatgtggcccttcgtgcagatgtgcaaattggcagccgaactgatgacggaaaacggaatgtaagtgcactcttctattctggggaagatgaaaagacaaaaaaaaaacggtcccctaattacttctatttttgaaaaatcctcttaattaaacagtcggttcgggcagccgggaggcattatgcgtatccaatttttaaactattttttatttttcgcacttatcatactataactgtttgtgttgcttttccccttttttaaaattttatttttatgccttcaaaaatgataattcgtttagccttaggacaatgttcgcctctgtacccaaacgctttttgtcgttggagtcggtggacgtttactcgctgctcgactttgagcgaattgcgaacaaaaatctgatcgaattggttgaaccgttggctttgaagggcgccgcgcacatcgagaattgtgaa

SEQ ID NO: 76922 - DNA, 569 bp, Heterodera glycines
atgggagccgccattgaagcccgtttggaagtgtgtcgtttgctggtggacgaatgggcagcggatgtcaaccaagaagcaatcgatggcaccacagctctgatacgcgcgagcgatgagggacacgtggacgttggtgagaaaaaaatttttgtgcaaaatttcagaatttttcctcattttccagtgaattttctcatcgaacgtggcgccaaccttcaccacaccgacatggacggatacaactcgttgatgtgcgcagtgagaaacggaaagactgaaatggcacggcatttggtggccatcggcgcgagaactgaccaaattggcactgatggtgagcgaaaatgctaaaagttgccccacttttatgtaacaaattttctcccatttaaggcaaaagggcgcgcgatttggcggaagaaggcgaaattgccgaaatgattgacatttttcgtcccgcggctgagcagcgggagaacgtcgatgggtaaaaaatggtgttttttgatttaaaaaaacatcaaaaattcaggcaacagaacgagcaccaacagcagcggatgtga

SEQ ID NO: 76923 - DNA, 970 bp, Heterodera glycines
  unsure (1)..(970): unsure at all n locations
gactcaaccctccagcattcaatcactgggactcaacncaccaacattccaatcactgggactcaatccaccaacattccaatcaacgggactcaatccaccaacattccaatcactgggactcaatccaccaacattccaatcaacgggactcagccctccagcatttcaatcactgggactcaacccaccaacattccaatcactgggactcaatccaccaacattccaatcaacgggactcaatccaccagcatttcaatcactgggactcaatccaccaacattccattcaacgggactcaaccctccagcatttcaatcactgggactcaatccattctcccgaattcaaatcactggactcaatctcatcaatccttcatcaacacaattaccgggactcagttctccgacatttcaatcaccggaactcaacctcagcaacggaatacagaactatttaaaaggaatccagaaattgaaatataacccataataaatcaaaacactatggtgtataattattgcccccaccccataaattcaaattaaaactgacctgtttaaaactttccacctaaatttgatcccgcaagtggcacgtcaatatcccaattgcatataaatattccactcgagcacaggcaaaacatgagatgtagcatttatattgctttttctatccatcaaaggctttttctttcattgtttattactatcataacatgctttttattcaaaacaaatatcaaaaaccaaatcagattcttttcatattataagcaaggaaaagtacaaaaaacgtttttaagtaacaaacctttttcattcaagcgaattctaatgcatttttttaaccaaacaattctccattatcgtttacataagcaaaacaaaagctttcacatcaaaatcaaatcaattaacaaaaacaaaatttagacaaaaaaataatgataaacaaaca

SEQ ID NO: 76924 - DNA, 218 bp, Heterodera glycines
atgcatcataaaatttcaaaaaaagcccggtaccgattttttaacggtatgcagtgaaaaagagcaaaaaaaaaattcaaaatattcgtaaaaacattttttactattttaaaaagaagccgaaaatttggtcacctttagaataaaaccgtaaattttcagcatcttttatttgtaattaaaaaagaaaattttttcaaaacaaaaattttttcaaa

SEQ ID NO: 76925 - DNA, 483 bp, Heterodera glycines
atgacggtttgttcgcctaatttccatgcgatgacagtgcgcggcgtcggatggacaagcattggcaaaatggcttttcactccgcttcaaaacaatttgccaaagatgttcaactgttcattgcacttgaatgatgggattttgccgtcgaatattgaaccgttcaaagcggtgctttcagttcgtatttctttaatcaattttatcaaatttcaggcttttgcaaatgcttcttcccccgtcaatttcattgtcatttgttttcagttgtctgctgattccgttgtgccatttgatctgatcaacgaattgattgttgacaaggattaacaatagccatcgttttttgcttttcctgaacactgtcaaatcactttttgttcggaatttataatgattagatgtgcatggtgtgacaaattcctttgcttcactcatttctaccaaaattatcacatgtgccaaaattaatgtcgaataaa

SEQ ID NO: 76926 - DNA, 369 bp, Heterodera glycines
atgaacgaacaagaaatccagtggaaatggataggtttgtaatcggattctctgttctggaacctcgaaaaccatttttttttaaatttcagtgtttcaagcattcgctttataaaaaatgtcaaacattccgaaataagagcaaaacatggaaaaaccatggtacacttaaaacccattgcttttttaacgaaaaagaaaccaaaaagcaaaggcttttttccgtacggttaatttcaagaaatcaaccaaaaattttcggcgccgacggaatcagaattccgttatctatgtttttgtataagatttttcattaaattttccagatctattgaattcatgtttcggattgaattagaacaaaataaa

SEQ ID NO: 76927 - DNA, 1534 bp, Heterodera glycines
  unsure (1)..(1534): unsure at all n locations
atgaaatgtcgaccccgtattgaggtaaattcaatttataatttgaaaaaaattccaatacaaaaaattgtttattgttgcctattctttaggcacnccttgaaaaaaattttttattttgaaaaaatttttgttttgaaaaaaattttttcttttttaattacaaataaaagatgctgaaaatttacggttttattctaaaggtgaccaaatttttggcttctttttaaaatagtaaagaatgtttttacgagtattttgaatttttttttttgctctttttcactgcataccgttaaaaaatcggtaccgggctttttttgaaattttatgatgcattagtaaattttattctaaaactcgcgaaaaattttttaagattttcatgaaaaattttttgattttttttcaaaaagattcggcgttgtttgtcccggccaaaattttgtgtagcacccgggagtgggaagctgcagtttaagaacatttttagaaaaaaaaagttagaattttctttactttacaggaggcgatacggttcgcattctcgtcagttagacgagcatatgagcgcagacaattgagcaccttttttgaacaaaacaaaattaatctgtcatttccgccactgagtaccaaacgaagtggaccatcggcatctgccgctgctgcactcgcaattctctcattggcgacgggaagaccagtgcaggcgggcgtttgtgtcactggaaaagtgacaacgattggccacatcagcaaaatcagccaaatgaaagaaaagacgatcgcagctgcagaggcaaatatggtcaaaatggcatttccaagggccaacctaagcgagttcaagaaagtgccttatcgaacccgaaagaatttaaggagaaaaactttgaataaggtggatgatttattttctctttattgatttaattttttttattgtttttccatttaatattttgatttgttatcacttttaccatttatgaaaatttacctttttgaaaaaattgcaaataattaattagggagtcaatgatcggatcaaaatttttaaggtttatgggtttgggccagtagggctgtaatggcggatgacataaagtcggaattcggctccaacaaagtccaacacttttgctgtttaagcactccgagaaaccataggggtaaaggacccttagggttggcaaaaaaaaaattttttttttgggaggtttttggggttattaatataattctgatatcagatttagcaaatctcttcagcaaaatcgaacagaatgtcaaaaatttaagttttccgggttttgatttttgttcaaaatggaattaggctttctaaataggattaaatagatgttatatctgtgattaacgccctagaaaaccccaacgacgttttcacgacgtgccaaagtcccgaaaaaatggccaagttgcgagtgtcaatgagatttggaaaattttttaaattatgattctccggaccgccacacattttcattacttcagaaagtgccgacaa

SEQ ID NO: 76928 - DNA, 1222 bp, Heterodera glycines
atgcatcccctgctcatatatggaaatgtcgaccccgtattgaaggtaaattccaaatttataattggaaaaaaattccaagccaaaaaattgtttattgttgcctattctttaggcaccccttgaaaaaaaattttttattttgaaaaaatttttgttttgaaaaaattttcttttttaattacaaataaaagatgctgaaaatttacggttttattctaaaggtgaccaaattttcggcttctttttaaaatagtaaaaaatgtttttacgaatattttgaatttttttttttgctctttttcactgcataccgttaaaaaatcggtaccgggctttttttgaaattttatgatgcattagtaaattttattctaaaactcgcgaaaaattttttaaaattttcatgaaaaattttttgattttttttcaaaaagattcggcgttgtttgtcccggccaaaattttgtgtagcacccgggagtgggaagctgcagtttaagaacatttttagaaaaaaaaagttagaattttctttactttacaggaggcgatacggttcgcattctcgtcagttagacgagcatatgagcgcagacaattgagcaccttttttgaacaaaacaaaattaatctgtcatttccgccactgagtaccaaacgaagtggaccatcggcatctgccgctgctgcactcgcaattctctcattggcgacgggaagaccagtgcaggcgggcgtttgtgtcactggaaaagtgacaacgatgggccacatcagcaaaatcggccaaatgaaagaaaagacgatcgcagctgcagaggcaaatatggtcaaaatggcatttccaagggccaacctaagcgagttcaagaaagtgccttatcgaacccgaaagaatttaaggagaaaaactttgaataaggtggatgaattattttctctttattgatttaatttttttattgtttttccatttaatattttgatttgttatcacttttaccatttatgaaaatttacctttttgaaaaaatttgcttttaaacatgttttgttatgaattacctattcatcaaaacaaaaaatgtaaattaggtaatgcttaagaaattaatcatttgattaaagcaattggcaatttaagcgcttaataggccgttaaaatgcaaaataagcactagcgcatttcatacgcaatttaatgttttgacaaaataaa

SEQ ID NO: 76929 - DNA, 416 bp, Heterodera glycines
atgcgttcttttttcttcgccagcctcgctttggtgctcatctgtgcctccaccactgtttctaagccccacgcgacggtattgtggttatttccgataaaaggcatttaaatgtaaaacattcatattttttaagcctgcccatctgtcaagaccaatgaaaaaggttgctatcaagtgtgctttgtcgttgtgtgcatcaacatttgccctaaggccaaggttggcatttttttgtttataaaactttgggttcagaatttatgtgctaaaataattcaatttaattgccaagaacgatgaaaatggtgctgctgtgaaatggcttaacatttccgtgccaatccccgacgccatttccctgccttcctttaacatgacaaacattacccaaggcgaggagcaggaagaataaa

SEQ ID NO: 76930 - DNA, 762 bp, Heterodera glycines
atgagatttacggcgccgactggcactcctataattaatgctcaaaaattaaatctcgaacaccttttgttttccttatgtccaaacgaaattcttttcaaaggtaataacgaacgactgaatggaattcttagaaacttttgaattttgctgagttcataaatttttaaggctgggcagcgacgggatattgtaaggaaaagttagatggatgttaaagcaagtaaagcggtggtttttacgaggcggatttgcctcaaaacgcattggccgagttgccaaaggactgaatttccacccctggcttaacatttagcctatttgttcattaaatggaggaatgcataagataaaataaaactttttggccctgaatcattaattctgcgccgcaaatgtcattttgacttgaagcagcaaatgtcagtgccgcaaaatgtaagcgccgcaaatgtcggctaatcatcccagtcgctcgcaaatgcatttttggggttttctcatttttatgaattttagatttttgaataaagcaaaggccaaaataaaaaataaattaattgtaaatagtttcagtgttttattatttcaattttttctcacccttggccaaatttgcgtgggcacagttgactctgcttgctgctgctgctacttagcaacttgtttttcaaaaatgttgctcaaaacccatctaaaaattaccaatcaacaattattcgaactaattaattttcattctttttgcaaaaattcaaaaaa

SEQ ID NO: 76931 - DNA, 1329 bp, Heterodera glycines
atgattggtgtagatgaacatgctttaactcttataacggtcagtaatgttcattaaaataaattgaaagcggatttagctaaattcatttttgcctttactattttttgttatttgatgttttttttatactttactctgtttattaaattgggcccttggggcttattcaacccatcattaaaaggtactttatcagacttatataaaggactattaagaaatatgatatgcgatttccattttcaaaaacaataataaataaatattgggaaaaattaaagtgttttaatttccagcaagaactagaaccagaaaccttacaagaggccagattttttgctgataccgtgaaaaacggtgccaacaagttgcgaaatgattgcaacaaaatgtttgagcttcaagctttaaaaaaacatgatagcagtttttcgagtgatctgaaaaccattcatgctcaggtaataaataatttttcgagctccctttaatatttataaacgaattaaggcctttaatgaatgcaacaaggttttaattgaaacccttgatgaattttgcaattaaaatggacaatctcgtcaaaaaaaccactgatcggcaaatgaatgttttgtatgaattttgtctgctggtttgtccagatacaaatgtgaattgatcctcaaaaattatgcaagttttatttaaatattatttaatttaatccaagtttataaaaaacggaaatttttggatttagaattattttgttgtttttctttaattgcatttttgcagactattaaaaaatatttaataaatttttcaaagtttgtacatgaaaaaataacaaaatttgcataaaaatctcccccttattttaagtattgattccaacaaaacaacgttgtatacgatcaagcaaaccgggtttagtggccattcatgttgtgaaactggaaattggcatgaacgacgaacttttcttggcaaaaatggaaataacaaaaaacaagctaccagcattgcagaagaggtattcgtattaatattaaaaattttgtaccaaatgtttgatttcataaattaacaaacttagtttcatatgattttttaatattaaggtgatcaaagcagcagaaaatgcaagtgcatagaactcacagaatgtgaagcaaaaaacaaagatgaaattaactttttgttaaattattggtcaccattttgctcaaagcaaatttatatatggattattatcaccatatataaaagtttcgacttagttcgacccccagacagaagaaaattattttaatacgtaattctatgaaaatttcaaataaa

SEQ ID NO: 76932 - DNA, 413 bp, Heterodera glycines
atgtcggaagctgattcggaaagcaaatatggagcagttgttagcgctagtggaaatttgtttaaacattgttatctcgcgttttcgattgaccacacggcagaaaaagcgactaatgccatatgcagattttgttcggcgcttgagcagagcgagaagtgaactccgacggcttcatcgaggacagttggctgtctccgcccgctgcttcatcctccaatgcgtatcgggtaaaataattaaataattttattttaaaaatcaaaaatatacagcgcaagcaagtctcgaaggggagaaaggcgaccgaacagcaaatgccgaacaaaaacgaaatggatggacttccgaccaagaaaaagaagcccattccagcccatggtacattaaaaattctttttgaatatttttaa

SEQ ID NO: 76933 - DNA, 890 bp, Heterodera glycines
atggtgatgccttctttggtgatcatcgtgtccacttccacctcggttcccttgcaggaacggcatcggccggcctcatcaaaagggaggaagcgaggggatgagagacgggggccactaattgtgataccgcttgtggtaatagtgatgtcggcttcgccgagaatttggtggagaagccctttcttgtcttgcatgtttatcgccatttgatgattgtgttgggaaagaccaaaactacagcctatttataggggcaacgcagttcgggtgtggagaaatagtgcaggtgtttgatgatagccagagaaaaagagcgaagagatatagtactggtgtagaagagggtgtcaaactaaacatctgtcaccccgcacatctagctccatgccctactcccaattaattaattagtaccaattagtcatcacgaattaccaccccacccccatctgtcggcaagttcaaagggctgcacccctcccataggcttgggtttgaccaattagcacattagcacccctaattacaccacctgtcacttctaattagcgtcaacctccaacggtcccgggggggggggggttactactaatatcaggtaatttctgcaatgaaccaaaatcaccaattttttaaaatttttcatctttttaaaaatatttttatattacttaaagttaaaaatttaggtatcaattttataaaatatttaaatgtaaaaaagtatttttttatgcattgcttttaatttctagaataaactatatttaattttgtagttatttttttaaattttttttatatttatcaatttcagcaaaaaattgtgttcacttactttatacattttttactgacgaattatcaactgcgcaaataataaatta

SEQ ID NO: 76934 - DNA, 447 bp, Heterodera glycines
atggcgataaacatgcaagacaagaaagggcttctccaccaaattctcggcgaagccgacatcactattaccacaagcggtatcacaattagtggcccccgtctctcatcccctcgcttcctcccttttgatgaggccggccgatgccgttcctgcaagggaaccgaggtggaagtggacacgatgatcaccaaagaaggcatcaccatttggtgtacacggttcgacaaagttcaatttgtaccgttcgacatcatctatgatctacccggacactgctttttccgcgtgaagaacaaggcgcgcgtgttcaacatcccctacggagaactgcctgccatcacattcccaaaacaccaagaacaacagcagcagcagcagcagcagcaaaagaacgacttgcgacaaaaggccaacgctgctctggacttgatggagagggactga

SEQ ID NO: 76935 - DNA, 264 bp, Heterodera glycines
atggaaggacaagtatggtccgaaggaactatttctctgtaagttttgcgatttgtaattttttcaattaatcaaccaataaaatataaaacactctaatgtcaaaaactattttttaaattctagaatcaaagttgaaaaaaatgatttaaataacaaaaaaataacaggagaaacaaggagatctattaactattcaaaagaaattacagcgacattaaattatggttaaaaaattaacagtcatacttagataagaataaa

SEQ ID NO: 76936 - DNA, 1973 bp, Heterodera glycines
atgagtgacaatccagaagaaaacgacaaagaagaagtgatgagaacgttcagaaaaagcttgacattcaaagaaggaagatatgaatgtggcctaccatggaacgaaagagtaaaggatttgccgacaaattttcaacaagcgagggcaagactttgtggcacagtgaagaaattgcgagaattgaatttggtggaagaataccaaaaaattttcaatgagtgggagaggaacgggataatcgaaagagttccggatccaacacaatcaactggaccggtacattatctccaacatcggcccgtgataaaaatagacaaggccacgacaaaaataagaattgtgatggatgcatccgcgaagccagcgaaccgcaaaggagccccatcgttgaacgaatgcttgcacacagggccgttattgttaaacgaattgaccgggatccttctgagatggagaagaatgaaggatctgatcctggcggacatcgaaaaagccttcctccaattatcagtaagagaggaggacagagacgcgaccagatttctgtggctggaggatccacaaaagacagaaatttcaagcccaacatatgtgagaaccgttgtgtttcggttctgtcgggtctcatttggattgacaacttcaccatttcttttaaatgcaaccatccgcgaacatctttcattctacgacacggttctaccgcaaaccataatggagaatttgtacgtggacaacatactgatcaatgtgaagaagaatgaagacatggcgcaaatttgccacgaatcgatcgagctgttccgtcaagggggaatgaagctgcaggaatttttctgcagtaagccgatcgccatacgaagccttcctgtggaattattggccaaaaaccaaagggagataaaagttctcggaattccgtggacgaatgaggatgatgaaatttgcttccgatttaaaaaatttgccggaaagcacacgaagaggaacatcttggcacacattgcaaaaatttatgaccctttggggttagtggcgcctgcagtgctcccagcaaagcattttttgcaaaaacgttttgaagccaaaaacggctgggatgaaggattggaagaagaattgattcatgaatggaatcaaattatggagacttggcaaacgagagaggggacagaggtccaaattcgattcgcacgaagagtcgacaacgaagacgaagtggacaaggaaatgcattgcttcgcagatgcgagcggaaaaggcttaggcgttgccatttacatccgggaatcgacagaaaaaatgagcgcaaatttggtgtttgccaagagcctggtgaagccctccaacatatcagatgttgcggcaacaattccaaaaatggaattacaatcgataacgctgggagtgaagttgttaaagtacgtgctccaacatcttaaattcaaaccgtcacagacaacaatttggactgacagcttgtgttccgttgaacgaattaaggagcataagaaatgcgatcgatttgtttcaaatcgattagcaaaaatacgtggacagtttgaaatcaaacatttggtcagtgcagataatcccgcggacgtggcatcacgcggcacaacaccaagagagttgagcagaaatttgctatggaagcatggcccaaaatggttatcggaagaaaaggccctgtggccaaaaccagcaaaagtttatcacccggatgaagagaagctcaggggaagtgcagaagatgaagaaataaaaacagccgcagtcatgaatggggtgccgttccagccaactattgatatgaaccggtactccagctggaaaaaggccaaaaccgtgggtgcctatgtcttacgctggatacattcggtggcaaaaaacaaatacaatggaaatttgttgccaattctgagcaaaatgggcccaaaaaagcactggaatcaagacaagggcgtact

SEQ ID NO: 76937 - DNA, 633 bp, Heterodera glycines
atgatggtgtccaacccgtccaaatggctcgaccctctgcacaaagcaggcatcgatcaattcactttccattgggaggcactcggagaggacgaagcggtggacacactcatcgaccgagtcaaatccaagggaatacgatgtggactgtccatcaaaccaatgacgccggtaattcatgggatagaagacaatcaatgggacgaaagttcagctggacaaactgatgaagttttgcgaaaagatcgacacagcactcataatgtattgtaaagggagtcgaagaatgaccgtgcgaaatgaaatttgcctttaggacggtcgaaccgggattcggcggacaaaagtttatgcaggaccaaatggaaaaggtgcgccaactgcgaaaagcgtacccaaacttggacatccaagtggacggcggggtcggactggacaacatcgaacactgtgcgaacgcaggtgtcccccggagtggaatcattagtttgcacgaaaaataatgggattttaggggccaatatgatcgtttctgggactggaatcgttcggtcggctgacccgcgtcagacaatgcaaaagatgagggaaactgtcgaaattgcttcctcaaaagaaacactcggcgtttaa

SEQ ID NO: 76938 - DNA, 1020 bp, Heterodera glycines
atgtccttgaatggtaaggacgctcttggaaaatctaatatatttatggacagagggacatatttgtccttggatgccaaggacgcccttgaaattttaacaaaatatttaaggatagggctcgccttggatgccaaggacgcccttgaaatcttaacaaatcagatatgtttaaggacagggattatatttgtccattgggtgcgaataaaaattttgaaataaactgtaaacgaaaatccaacagaaaataatttgtttattattttgaaaaagtaataacctaattaatgaaaagcatttcaatcgttaattaaaaaatcaaatacaaaatttaaaattatgtttaatacattttgctaaacgatttacggcttatttttttaaaatttatttattaatttttctgaatttattcaccccatttcctgtgttattcagaattgcactgttggtgatgttcagcccataaaaagccttgtggtcaacagaagcatgaagtcgaaaaagcacttttacatcagcagaaacggcatttaaagaatcgcttaaattattaaattaattaaaaaaataatttataattatattaaacattttataaatattttcaccacctttgtgtcctactgtattcaatgcccaaaaagattggtcgtccattgctgttcaacgacacactttgtggaagaacaccatccaaaattggcacacgaaaacgctcagtttggcatactgttggaatcttgaaatttttttattttttaaaatttgacaaaaaaaaatatttaccgttgaattaccgtcgcaaatcacaaaaaatgtgcgcgtttcaaaatctccgatcagctgatgatgattacggacattgataaactgtgggcaaatgtgaatattatttacaaaatgatgattgaagaaattatataaatatttttatttaaaatcaatcaatttttatgtaaaataatcaaaaaactttaaaaatcaatttgatttgaatgaatttctttaaataaa

SEQ ID NO: 76939 - DNA, 1520 bp, Heterodera glycines
attccaacagtatgccaaactgagcgttttcgtgtgccaattttggatggtgttcttccacaaagtgtgtcgttgaacagcaatggacgaccaatctttttgggcattgaatacagtaggacacaaaggtggtgaaaatatttataaaatgtttaatataattataaattatttttttaattaatttaataatttaagcgattctttaaatgccgtttctgctgatgtaaaagtgctttttcgacttcatgcttctgttgaccacaaggctttttatgggctgaacatcaccaacagtgcaattctgaataacacaggaaatggggtgaataaattcagaaaaattaataaataaattttaaaaaaataagccgtaaatcgtttagcaaaatgtattaaacataattttaaattttgtatttgattttttaattaacgattgaaatgcttttcattaattaggttattactttttcaaaataataaacaaattattttctgttggattttcgtttacagtttatttcaaaatttttattcgcacccaatggacaaatataatccctgtccttaaacatatctgatttgttaagatttcaagggcgtccttggcatccaaggcgagccctatccttaaatattttgttaaaatttcaagggcgtccttggcatccaaggacaaatatgtccctctgtccataaatatattagattttccaagagcgtccttaccattcaaggacatgtgagaaccactgtccttaaatatattttattgttcaaaaccaatttgcagattaaagcgtcacaaatccgtgaccgtttcgcgttgcacaatgtcagtgttgagggcaaccagggcttggctggcttactggtccaagacggtgccgccgatgtttggctcaatgacacatcattcagctggaattggggcgacggtgccaatttcatttatttaaattaataaaaaattttttattttttatttaattttctttttccaatttactgacattccttcataatattattatgcatttaattcaaaatttatttatacaataaatttattttttaaataattttttttaaattcatttataatttaataaatgcggaagcattcgaaaaataattttaatttttaaatcgtatttttttatttttaataaatattatttttctattcaatttatcatttttacaaatgcagaagcatttgataaaaattatttttattttttttgttttttattaaatctatttttactcattatttaaaatttacttttctattttaataaattactattttttcaaattaaaatacaaaaaatctaattttgcttacagttaactccgattggccttctgtgtctttgtttgctggcctgtcttcctttgccaaagtgttgatcaattgggtggaattttcggacaatatttatcatcctcatgtggaagttttcgcatgccaaagtgcaaatcagcgacttatgcatgtcgatcttagcgga

SEQ ID NO: 76940 - DNA, 462 bp, Heterodera glycines
atgttcaccatggacgaccttctccaactcgccaatggccgcttattggcggacatcgaagcaattgtcaggattttcactgcccatatcaccgaagagtgcgaaatatgtcggggaaatgctttcttctgcgaactgtgcacagataatcaggttaatggtgttggcttgaggaattagtacaataatttataagttccacagaaattactccgcgccacttttcagcgcatctatccgttcagcgaaaacgtggccatttgcaagagttgctgtgctgtctatcaccgcccgtgctttgaccgtgccagcaaacggtgtccgcgatgtttacgcagaaaggcgagaagaaaagcggtgatggaagagaatgagggggacgaggaggaagaagaggacggacaacaaccgtaggacagcaaacttttttatttttgcataaatcgggtcacaatagtcaaa

SEQ ID NO: 76941 - DNA, 1699 bp, Heterodera glycines
atgttctgctattttctcattgcttttcttttgctcgttttggcaaagggattcgaaggtaaaaaatggaagaattttgatgaattaattaacatactttcaggctacactttcagttgtttggacgggtgcgaatgtgacactgatgacgaggtaattaattaattaattaattataattattaattaattataattagttattaattatttacgtaataccccttttcttaattgattatcaaatacaaactcaatcttttttatgtcaattaattaacagttatcaccaaataattacttttttataaaatattaatcgattaaaaatcaattacttaattaccttttttctattaattaattaataatcaattacactctcaccttaattatgtcaattaattaccatccatccgttcacttccttgttttggctttccctttccaaattccgctctcccttattaggccatccattgtcacaatcgtcccgatcggcactttgtccaattgcccccgtcgcgtctccgcggtttcactgtgctcgcgctcacccgcaataacatcgatgtgctgcccagcgaagaagtactgctcgagaaactgcccgacctgaaggtctttcctttaaatttcattttattattaaatttgatgacagtttcaattttaattggtaatattccatcagaactcggcagtttttccgttaaggccgttgacgtcgaagggaatgaacatttcgactgttccacgctcgaccattaccggacattgatggtgatgagcgattgcggaaagactcccgaacaattggaggccgaccgggccaaactgccgacggacacacagccaaatgaggtaatttggaggacagatttggccacaaaaagccattcgaatttcgaaggattgcgacttcgaatgcgtggcgaaccgacgcagtcgcgagttgcgcgagtacgtcaaacacttgtgggagatggtcaaagagaaggtgagccgactggccaagaagcacggattggacaaagtggtggacgacgtgggcaatttcttcaacgacgtgggcgaacgcatctccaacatcaaactgaagaagaagaaatgagacggacggacggaaggaacaaaagagaaaaacaccaaaaaaaattggaaaggaaattgaaagattgccatttaaatcgacgagttcagaacttcctgtccattttgcttcgttatctctaaatcattaacacaaatctcccccatccaatcccatcataacgagttcatttctttttttcttgccttaactttttatataaatctcttgcattttaatttgtgatttcaatttcatatgcattcataatcctgtaaaatatgcataatgtgtcattcgagctcaaataaattctttcttttttatgcgtcggtgcctttcaaaccatacgctttttcccgttttatgcttacgttattttcttaatacctaattatttgtcagctgatcagtgtgatattttcgtttgttatgagtccgattgaccctgacaaaatggcattgctaaagcgccttttccccgtcctcggcaaacaccttcgcaagggcgactgtggcaaaatcggagtgatcggcggttcgcccgactacaccggtggcatattgcagagaaatgaatgcatttttatggcttttccccgttag

SEQ ID NO: 76942 - DNA, 658 bp, Heterodera glycines
cgaagattgaccgtgttttggtggcgaatcggggcgaaattgcacttcgaattatgcgcaccagcaagcagatgggaattaaggtcattaactaagtatttttgagatttaagtgtaataataaatagatttttgttaaaaaacccgttaaaattggaatgaatttttaattgagtaaaatttgagtggatttatttttaaaccaccgtttttccctcgttagacaattgcggtttactccgatgcggactccaaatcgctgcacgttcaatttgctgacgaagcgtgccgaattggggaggcgagtgcactgagaagttacctttgcgctgaccgaattgttcaggtgaatttattcgaaatttggatagtcttcgaaaatgacttaaatttgcctttgaaaggcggctctgtctgctggtgccgatgccattcaccctggctacggatttttgagcgaaaatgccaacttcgcggaacaatgcgcagctaacggactcattttcatggggccctcggcggaggcaattcgcgtaatgggaatgaaaaacacggcaaaaaatatcatgacagaggtaaaaacaatgccaattgtatcttatttgaaccataaaattaaacatcaacacggcattttttgccattttagcggaccggg

SEQ ID NO: 76943 - DNA, 2336 bp, Heterodera glycines
  unsure (1)..(2336): unsure at all n locations
cctcgggaattggcgcaggactttgctaatttttgtctgattttcncactttctccatcccaaaggtggaacatccgatcactgaggcgatcaccggattagatttggtccaatggcaatttctggtggcccagggcgaccgtcttccgttaacgcagcagcaaatcgcactgaacggacatgccatggaggtaaaagtgcaaaagggtcggcaataattcactagtttctcggcttttgtacgtcaaattcaatttttaggcgcgaatttatgcggaggacagtgaggcgggatttatgccaaccgcgggtcattgaatggccaaaaagaaaattaaatgaattttcatgtgcgccccgtttaggccatctcgagcaccttttcttcccttcatcgatgccgcatttgcgtgtcgattcgggcgtccgcgagggcgacgagatcagtgtccattatgacccgatggtggccaaagtgatcgcgtggggcgcagaccgatcggaagccatccgacgattggacgaaggactcaggtgaaaggtgccagtgtttaggcacaaattaggacgattattggaatagcttagcccatcgtcgcttttttgctgtgccattccctctcattttgccagacaaactcgcatcggcggactgcgcaacaatgtccgcttcgtccgcgcctgtctcgcccacgagcgcttccgtcttggcgatgtgtacacggactttgtcgcagaacacatcgaccagctgttggcccactgcaaatcgccgactgcggtggcgcgtgggcgggaaagtgttggtggattgcttgttgaggccgcactcgctcaattgttgctgtccagggttcgttgtttatttggatgtttttaaaaaaattgtgtgggagcaacgaggctctattgcagtgcacccgacaaaaaaggacacgaccataaaatatgtcggcaatttttaatgcatcattattttttccagaaacatccaatcttggtatcattcgaatagctctacgaattcttcattagactgcaaaacatcgaaaattttactttgtttcaagaaagttatgaccagaaatttcaaaaattatttttctgaacctttgatcataaatctttaatcttggtgattttttttcaaccttttcgtagaattaatcgaggccccagcatggattagtaaaggattatcaaatggcatggtatttgaggggggcgggaagaaatgacaattaattcataagtgaacataataattggttaatgaaccaacccaacaattagcggttttctcatagcgtggtaattttttgagaattctcctggctatgtctgtcaacaccgccggaccccctcccctaacattttaagaattttgcccaaaaagcgagtgccgatttgcttttcaaattttatttcggcattctttcagttccgttctctctgtgccgccgccccttcgtatccgtttgcgcaccaaagtccgttctacgcctcgcccgcctttttccgcatgaatcattttgcgcgtcgtacactccgattggacgctgaacaaagtgccgaggtggaaattcaacgggacggactctaccgtatcaatttgagggtatcgtagtcagttgaaattgggtatatttcacaaatttgaagtttgctgatgataaccaacaaatgcacaatgtccgagtcggcaccgtacaatatgaaaaaacggcgaccacagggaagccaatggtccgattttcattggaaatggacgaaagaaagcgatgggaatgcaccgccgttttgctcgagagagaactggcggtaatgattatgggacgaggatttagtgcttattttttaactcttgacattttttgtaattaatcgaaaaaagtcccaaaaaagtcctttcgactttttcatactcacctgaaatctttttctttttttccccccagattttcggactggacgagcaccagtggccgaacccgttccttcagcaaactgacgatggcatttccggcgccgtgccattgttggacggagttgccgatgggaaggcacggagtccaattcccgggctggtcgagaaagtttttgtgaaggcggacgacccggtggtcaagggccaacccctcgtggcgatgagttccatgaaaatggaattcatcatccggtaatgggatgggaattgagaacttttcattaaacgactgtcaaaatgggatgcctttagggctccgttcgatggcactgccatttccgtcttttgtacgcccgggcaaaatgtggcaaaggatgtcgtgcttttgctgcttaatgtcgccaaaact

SEQ ID NO: 76944 - DNA, 2061 bp, Heterodera glycines
atgaaaagcaattctaaaactgctgacattggtgatttttacgagatattgggcgttcctcgtaatgcaagtgagcaggaaatcaaaaacgcttaccgaaaattggcactaacttatcatccaggtcggttctattttaatattttctgtaaaattcagataggtatatttattcagacagaaaccctgggaatgagcaaggtattcaaaccacactaatcattttactgaaaaaatacaattaaagcgcaagaacagttcaaaaaagttagcatagcctattctgttctctccgacccaaataaaaggcggcaatacgatgtgtccggaccatcgatggcaatgaatgattttgaaggactcgacatatccgaacttggcggagttggtgagataagctcaatctcactctgttcttaaaaatttatttaggtcgcttttttggcgcaatggttcgctataagtgctaatatacccttttaattgttttcgccagtttaccaaattgggaataccaattcctacccaaattggaccgaaagtgcttgctcaagctcgtgatctctctcgtggcaatgtcacaaacggtcaacaggctaagtaccaaagagagcatttaaaaaaattctttttatgtgttaaggcctctcgagccaggtctggtgctgtccgaaacagtgaacaatcaggaggcaaatttctacgcgtttcagatgactcccgaattccaacaacacggaggtcctttcattattttacactgtagccaatgttttgttcagtgatcattcgatgcaaatcattggcaatgagcaaattcaaattggtccttttcgatcaggaaggtattccgttattttattattacccccttatgaaattgtttaattttgtttttaaggcgcagtccgtcacattcgcgagagtcagaagaaaaagaaatacacttccgctgaacttttctttgtgccgttccaacgaataaacatttccgaattcattccaattcggtaacttaaattttttaatgtgattgaaattttaaatgactactttagtttttacatggaggacaaagacactccgctgccatttcactttctggacactttagaaacccatggttacacattagcctattaaaacaacataaaatttgtctgtttttaggtgctaatgtgatggagcttcagccaggaaagcacatcctttgtgtatacggcgacaatttcttgagaatggtaaattattgggtgtctttttgtagaaatgccatcaaatcagtcaatttgttcctttcattttgcatttgttaggtcagttacgaagtcactttcctcccgctgaatcattacgccagcgcagcaattaacaaaatcaacgcattggagcccgtgttggcatcgaagaaatcggaaatgcaagaattccagaaagagtatatggacttaaagaggaagtgagccaattcggcaatgttaaagaattgtggtccctaatttcttttttattctgggctcagattcagtttcctggggttttcgagggtgctgattacgaatatgaactcggatttgcccaatttcgaaccccggacccgaattcgaacaaaaaattagaaaaaaattttttccaaaaaaaaaagttaaaaccggtcaaattttggcgcaacttgtgtattttacttaattaaacaatttaagcattattttacatcaaaataaatagtgttaaatgaattagaagcttttatccacgaaaaatgtagaccacaattctttagcattgccgccaattcggacaaagattcgtatttcaattgttcttttcttcaggtgggaagcagcgaaagaaaaactgaaaaaagaggaggaagacatcagcagttgcctgaaggcaagggaaaaggcatatgacgagtgagtcccttaaatcatccaatcagctgtaaccgacaaatcattcctactttaaaggttatatgacgcctgttcgaaaccttatcaaagccaggcattaactgcgaaacctagtggattcttatcttcattatttggctag

SEQ ID NO: 76945 - DNA, 789 bp, Heterodera glycines
atgcaagacaatttgtcacacataacggaagcaagacaggcggtgaacgcattgcgcgatgagaacgaacgtcagcgacgggaaatgctaagagcggagcacgacagaagacagagtcaattgagacacaaaatggaacacatgcgacaaatgaaacacgtgattatatcatataaaaattaagggttttgaatccaaaaactaaaatgtgttaaaaagaattaatataggaaatgttgctgaatgagcgtcagctagcaattcaacgtttccaaaataatgaacgccaaattatgcagcagcgaatgctggtacaacaaccgcaacaaattcatcagtaccaaatgccacctatggtttcgccctaccctcatcaacagcattatcagcaaattccgaattccatgccaccaaacactgctgttacaatgaatgccattccatctttgccacaaaacatcaccacgcctatgccaccaaatgtaaatgcaataacgtctcaaaatttttgtggccttatcactttaggaaatgttgacgaatgtaaatcttgtgggaattcgagcttttcaaagcaacgaacaccagattatgcaacaacaaatgatgggacagcaaccgcaaatgcatcaataccaaatgccgcatttggcgtcgccctaccctcatcaacagcaaccgcattatcagcaaattccgaattccatgccaccaaacgctatcactgctgatgagcaaaaaaatcaaatgaccggcgtacaggaggacttgttaatcaccttcgattga

SEQ ID NO: 76946 - DNA, 1160 bp, Heterodera glycines
atgccacacaaccaaaatcaacagcaatttgttgctgctgcgaatccgagatttggcaacttccgagaccgacttttccaggcgatgttggtgagtgggccgtggcgaaagtgcggaagtgtccgctcccttttcaggtccgtctttccctcccttaccatcaaaatgtgccgcgcactgtccgccgtttcttcgaatttatcactttattcaacgtaactttttcgcattggtctgatcaatctgctgaatttgtcctgttgccaggctttcgctttactcgccgtgctcatttatacgcatttccttctcaactctttccccgcccggtgtttggactccgtttacagcgattggccaaggaaaggcatcattcgcttggaggttccgcacatttgggctcatacaatttaggccaaatttttgttacatccatctaatgaatggatctgaattgtgttggttttgggggataatattaattttgtcgaaatgaatgttcgaaattgtgaggcctaactgtaaaagagtccacatttgttaaataattaaccatttttgtgcaggtgattcaaaatttggaggaataccgcgagagattatcgagaaaagaaagcggtgagtgaattccttggcccaattttcatttgccatcattttgtaatggttcattgtatttgttacatccacagaatcggcccattcgtcgcattgtcttttggacatcgccgacattttgagaaacggcggacttccggcggtcctccgcattcagctcggaagtgtgccctcgtcctcatcgcctccgccttcttccgtttcgccgtctctgaaagtgtccaatgacagcaaagccaacggcaacaacattcagcagagccgtgctaggttcggtcgacccttgccgactttgttcgacctgttcctttggttggtcgaccagttcaaccagcagcaatgggaatttgccaagggaacggacggcggagaaacggcgcaatgggcggacgacaaaggtaaaaaaagggtggacgaacgaatgtaaaagcatttcgcttaaatgacaatttttagcacaaaacgaagcggacgattcttccgacggagaagacactcaccagggacagaaactcaaatgttgtcaatttgcaaacaaatga

SEQ ID NO: 76947 - DNA, 1565 bp, Heterodera glycines
atgaagaaaagcggaggaaaaagaaggtcaaacttctgttccacgacattcaaacgcttgacgtcagtacgagcgatgtgtacgtttgggtgttcgacccgactccgttgtggaagaaatgtgttggcattctgatcgtcctcggcaccatcggaggctgtctgttcccgctgtggtcattgctaacgaatgtcttttcaattgatcgctttatatgcatttttaggcctgattggttacggcttggcatttattacctttctgtgattgggattgccctctttggacttttgctcggtgtcgcatttggtaatatttccatcattctgatggttaaattctgacttttttcttacattcttccattttagctcgtacaattctttttggcctcgtttggttgttcactctgggccgtcatcgcctttggcttctcccaaatttgctggaggagtgcggctttttcgaaagtttccaaccggcgtacacttatgtaaagcggaatgaaacagtttccttctgattacaatcaattgtttttaaggaatacgtccccggtggagttttcgcgaaaaaggagccgaaaaataaaaagaaaaaaggagtcgaagcgaagaaagacggtcaaaagaaaggcgaggagggacagcaacaacagcagaaggacaacgaaagccgaggggaaaaaacgaccgaagggaagaacgaggacgaaaagacaccgttcttagagcaggaaaagagcgaagagggtgagaaactgaaccaagggctggccatgagataccatggggaaaattgcgtttagccggtccatttcatcaggtcttaagcaccgatttttctgtcacttctttcatttccattctattaatttaaaaaacccttttaagactcagaattcgtttcaccacctccgactgttcctttggctccgttgcccaaagaagaaaataaaactgatgaaacagtccaaatggcagaaaaagcacaaaatgaaggcgaacgcaactgcagcagcagaagtgaaagtcgaagctcatcgaaaaaagacgggacaagcggaagtgaaggagacgacgccgaagaagggacacaaacggggacggacgacagcaactcgtgggaaaaactgtcagaaaacagtcaccggtcgggcgacggtggcaagaagacattgtagaatattgactagggcacgtacagcgtagcggaaaattgtgatcggtgcgaaaacttggcatttataagtaattcaaatttacatattccgaaattcacaactgtcgttatccacataacaattatatctattttcttttattttcgcctgtggcttttgtgttcttccccatgtattaccactaaatgctttgtattttcttttatttcctgtgtttattctattgacctttcctattatggcgcttcaaactgttcaaaattgggtgtgaggaatgcataaattatgtgcttgggtattggaagcgatgacaactcgtacataggcctaaacttgggcttgcttgtgcctatgcaggtgttacttatggcatccgaataaa

SEQ ID NO: 76948 - DNA, 1301 bp, Heterodera glycines
atgaccatctttaaagggaaattccttaacgaaaaagagcttgccatcgtgcctgaaggcggttacgagcggaacgatagggctagcgtcttcgccatcaaatatttggactggcgctccaagcgagacggtgttcgcatacaacacgctggaaatggtctcgaaaagagatggcggcagttcaaacttgatgggtggattgcggagcagaacaagtgcatagaagttctcggctgctactggcacggatgtgagagctgcttcaaacctgacgacgaactggttgacggaaaaacatgccgagaactcaacgatgctaccaaactgcgtttgctaaaactacaggagcctgttccagctgaggatgcttgcggcgaagcagatgaagagggccttgacgtggaagagatttgggagtgtcagatccgtgaacagctcaaaagagatgatgaaatgcgagattttttcgacgacttggggaccgaccgggggcccatcgacccacgtcaaacattctacggaggcagaactgggccgcttcagctgattgcagagccaaaggaggatgagaagatttctgtcttcgatatcgtcagcctctacccgtgggtcaactatgccaccgactacccgaccggaatacccgctgtcatccaccccaccattgaggagatgatcgtcgactggactcgacctgagcatttacaataccaaggaatttatcgtgtgcgggttattcctccaaaagggctcagaattccggttcttccactaaaaatcgacgaacgcctcctgttctgctgctgccatcgttgtgctgccaaatttcggaagttgaacacacgacgagtgcacaagtgcacacacacggatgagcagcgggcttttacaggaaactttacgcatattgagttggcaagagccttggaaactggctaccgagtggacagattctggagagcttggcactacgatgaatggtatgagtttgttagggaatcttaatatttttgaaatttaggagtgacggaatattcaaggactatgtacgtctattgatcaaattaaaggtctgaatatattttttaaagttaaataaagtccaaattgcaggtggaggccagcggttttcctgatggtgccaacactgtggaacaacagcagcagttcgcggacgagtacagaagaatctacagtgtaaacttggagctggaaaatgtgcggagaaatcctgggttgcgcttcatctctaaactgatgctgaacagtctttggttggtatcaaaaatttttatgaaaga

SEQ ID NO: 76949 - DNA, 785 bp, Heterodera glycines
cctcatcatggatcataaaattgtaagccaaatttgtaaatgaatttcaattttgtacattgtttaggaagtgtcggctgtcatccctttgtctgacaccgccgtccgtgtcatgtacaagagcaaaaagaatttcgtcagcgaacacacgtctagcaacattgtgataagtctgtggacgaccagccgtgctcgcctcaaactactcgattttatgacacaaatcgatcgaacagagggagccaaactgttatatacggtaaaatgctctaatattgtcaagtacattgacccaacctttaggacaccgacagcgttgctgtgctccataaacgtgacatcgtgcccatccagacaggagaatacttggggcagatgagcgaggagtatctcgactacgagatcaaaacctttgtctgcggaggtaaaaaatttttttttttaatttttgttctaaaagttcaggcgcaaaacaatatggctttcgaatgctgaacaaaaggacaggagaagtggaatacgtacaaaagatccgtggcattacattcgacgtcaacaacagtaaggcgctgcagtttgaacacttcctgcaaaaggtaaaaaattacggacggaacactggtgacgacaacgatgatgcacctgccgtgttttcctacgacaaaataatgccaacacgagacagccgagtcatcacacgtgaactacgcaaaaaatacatgccaatatgtcaaaaaggaataatcaacgagcaatacgaagtctacccatttggatatgaataa

SEQ ID NO: 76950 - DNA, 612 bp, Heterodera glycines
atgttatccgaagaagaagtacgagggaatagtgtggtaagttttcggaataaaaaaatattaatattttcatttgttttttttaaggagcgaacctctatatgtggaactgaaggacttgaagatttgcccgggagactcgccgctgtgtctgtcacgccattgcgaacaaccgaacagcagcagcatgaacctgatcgtggacgaactggatctgatcaattattggagcgacgacgaacgcgaaaacgagactacaacctggtgagagtgctgtgccggttcaacaactgtggcccataccgactgacgaagcaactacagaaacgacggactgagaaccttgcctatctgagccaattggacattgagactgtccatcttagaaaaaatattaagattattcccgatgctttgtgccccatcggtgcaaatcaggtgtttgcataccgtggattcctaggaatcacggttcagcaacacctttacactcgccatcgtgtcatgttaaagtacccaacccttccatgtgttgttcagtttggtggtggtcatcaccgcgatatttttcccattgaattgttacgtgtctccaaaacagaaaccctttaa

SEQ ID NO: 76951 - DNA, 2067 bp, Heterodera glycines
gctgggctcatctacgagttgaacgccatccaatgctttgcgttcggctcaatgatttcggcggttgacccactgatcactttggccatcttccaagcactcaaagtggaggtgcagctgtacatgctcgcctttggcgagtccatgctcaacggttagaattttttttcaattccgagcaactcgaaaactgcataaaaccctcatttgtattggggttttctggaggtcggagcattcaaaaaatataggtgtacgacgttccccctccctcatatcgttcgttaccttcgaaaattaaaaaaagcaaatgagaggtatttcaaaaaatagaaaaaacacttatatgaaaatttcaataataacaatttttaaaattgaataaattgttaggaaaatggggaaggggcgggaactagctattcccaaaaatataccatggaagagaaaaattccatgaccgaatttatatcataactaaaaatagcacggagaatagctgtattccaccgtcccccgctttcgaaaatttaaaaattggaatttaaaaataataaattttgagacatttctaaacacttcatagggtaatacggttgctctcttttggattaagaattcccggtatttcaccatttttaaaggtatcccatttcagacgccgtttccattgttttggccaccactgcgcaagagctgtcctcgcccgacgttgccacgatgagttcgtttgccatggttcagttcgcttttctccgcttcctggtcatgtttttcgcatccgccgccctcggcgcactgatcggactcatttcggcgttggtaatgcataatttttaagtaatatactgaaagtgccttttcccaattccaaacggcattatgtgtattttcactaaattgcttttccatgtttagctgttcaagcacatcgatttacgtcgaacacctcagttggagttggcccttctgttggtgtttgcctatttgccctatggactggcggaggcaatttcgttgtcaggttggcaactttggaatggaaaccatcgattcccagtattcaaaaatggaccacaaactcaaggtggacaagggagtgggctcaatttcgtaaatcgtacggggctccgaggcaatctcgtaaaaaaaattggcctctgagaggggagggcggtattttatctttcgtaaagacaaattccagactctccccaccccttgtccatgtatgcatgccacaaaccctgttcattgcaaaaatcatgttaaacaccatttatttttggtccattttccttataaactctccttggtaattttttttttttgcgatttcctaattcaattcctatgaaattcaacacatccccccttttttcaggcattatggccattctgttctgtgcaattgtcatgtctcagtacacccatttcaacatttcgccaatcacccaaatcacattccaacaaacatttcgcaccatttcatttgttgcaggtcagtgataagatttaaatgatttttttaaatctttgcccttttgtttgtttctatttttttatttggtattttgtattttatttgttcgaaatttggggttttcctctttttgattccgttttttgcactgttttcggaacacataacaattgaatacaataaatactgttttgaatatcctatcacatccattttctgtcctttttttcaattcccaccaaattttcgttcgattttttaaaaaggtttaataattccacaattttttattacaaacacatttggtcaacctttttccccgttctttagagacgtgcacttttgcctatttgggcctctctctgttcgccatcaaattggtgttccatccgatgttcctcattttcagcattgtatttattaccacccacaaaagatgacttttttcaaaaataatcattttctaaggttcttctctttgcaagccgtgcggccagcgttttcccactgtccgacctcgtcaatcggttcagcaagacgaaaatttcgatgaaaaatcagatcatcatttggttcagcggtga

SEQ ID NO: 76952 - DNA, 292 bp, Heterodera glycines
atgtgctgtttgctgaagggtggcggaggtaaaatgagaattttttttgattaaaaaaaatgctgagaaatcgattgaaaattaaataatatttattaatcagcaatttatttttgggatggacgagaaattatatactaaaaatatcatatgaattttgcagcaatcgaaaaatatttgttggaaaatgataattcaaaaaatggtcaattaacgaatataaaataaagaattttggggattatgggtgaactataaaatgaaagccccgctttgaaaagggttaaataaa

SEQ ID NO: 76953 - DNA, 58 bp, Heterodera glycines
tcaacctctttttgattttgtatggcttcgtaaaaatcatgtaatgtctgtaatagtt

SEQ ID NO: 76954 - DNA, 1075 bp, Heterodera glycines
atggcagttttaagaaacgcgccagcacggtttttattctgtgccgtcgtaactatgactcatcgcaggtgacaatcaacagttgagcacatgtttccttcggaaaatatgggtgaaaaatagcgtcgaaaatttatacttgacaaatccttcacccaaatgattgtcagagtatatagcaattaaattcatttaattgctttgtttaattttgagcaatttccagtcgcggcttttctttttcataatgacttataattaattttaccttgtcatattacactcataataaagttaattattgttgaatgcacatgctaattagtaatgttgaagtaaactcataaaaagtaaatttcagctgctttaataaacagcttgggcaattaattatctggttggtattttcacaaagaaataattgaatacaatttgaaaagttcgttcctcctctgagaattggttgccattttgtctctttgccatgatgaatttgacaaattatacggatgtgacggatttaatgcggacaaaatccactggaacaacggacaaacattgtgaacggatacattttgatcacactttttttcatttttgaggttttatataaccggagcatttgggatgggtatgaaataattgtttaatatttatttattattttgaaaattaaagctttgtggtttgcggaaacaagtgacgaattgttgctggcaattaacagttgcatggattgttgagatcggaacgattgtgccaacttttgccatgccatttctcgctttttgtggagcaatggcaataattcggtgtcaaacgggcaaaatgccatggcatggatggcaccaaattatgccggaaacaatgccaacatcagaaacaataacaatgtgcaacagcaatgaagaacagcaaaatgcgattatctttacatttaatgtttctcttttgaaaatggcaccacatttggggacataacgacttttggggatccgaaatttggtgaactgacttttagtaacccgacatttcgggattttaatgatacaggcactaaaaataggcaaataaa

SEQ ID NO: 76955 - DNA, 564 bp, Heterodera glycines
atgcataaatcacttattctgactactgttcagaataaaagtatcgtagatgaagtgagaaaagaagtggacgaaatcacaggattagcaagataaaaatgcgaataaaataaaatcaggtttaaagtaaaactgcggtagacggcataaaataaaaatattttcacgtaattcatattttagaaaataggggtgggtgtattatttctcccgaaatccaggacaatttatcagaagctgaagctcaaaaaactcgatgtttccgaagctcgaagccgaagtttcgtccatccctgatccccctacgccctcctcgattttggcgtcttcagtgcagaatctgatcagaaagaattctttaattgctttgtttaaattttgagcaatttccagtcgcggcgttactttttctaatgacatttaacaaatattacattgccgaaggcatttaattattgtttaatgcacatttgaatgccaatgttgacgtaaacacataataattatgttttcagctgatttaataagtacccaggggaattgtttggtaggaattttgtccaa

SEQ ID NO: 76956 - DNA, 283 bp, Heterodera glycines
atgaatgcgttggaaaccgggattcttggcatcattggtgccgtttattgtgattatccattgctgatttatacaaccggatcaatgggtctttgtatgtttattttttattaaacagtatttttttaaattattattttaaattttggttcagccttatggtttgctgaaacagctgccgaatttttgctggcaattaaccggtgcttggaattgctgaaaccagaactggcatacgtcattttcaatggtattttctcattgcattattaattagtgaaaa

SEQ ID NO: 76957 - DNA, 96 bp, Heterodera glycines
atggccatgttcacgaagccaattctgttcagtgggctaaatttggcatggtttttcaacccatatgttggctacacggacgattttggaaaaatt

SEQ ID NO: 76958 - DNA, 91 bp, Heterodera glycines
aacccgtgcggaaatatacgtgcaaggaagtcttctgctcgcctttgcagcctctgtacggcactggggccaacactttatgtgtcgttaa

SEQ ID NO: 76959 - DNA, 86 bp, Heterodera glycines
aacccgtgcggaaatataaaagcaaggaagtcttctgctcgcctttgcagcctctgtacggcactggggccaacactttatgtgtc

SEQ ID NO: 76960 - DNA, 211 bp, Heterodera glycines
  unsure (1)..(211): unsure at all n locations
aacccgtgcggaaatatacgtgcaaggaagtcttctgctcacctttgcagcctctgtacggcactggggccaacactttatgtgtcgttcattttatgctaattctggctcttttctaagaacccgtgcggaaatatacagtgcaggaagtcttctgctcgcctttgcagcctctgtaccgcactgnggccaacactttatgtgtcgttaa

SEQ ID NO: 76961 - DNA, 206 bp, Heterodera glycines
ggggagaaggacaaaagtagaggatgaagatgagaagagatggatgagctacagattctaaagtgcaaaattgggtaacaaatttaggcgaataaaactgatttgtgagtggctttagaggagggaggaaaggctcttttaaggggaaaaaggaacacaaaaaaaaaacagaggggagagaaacatggaaaaaagaaagagaaaag

SEQ ID NO: 76962 - DNA, 2105 bp, Heterodera glycines
atggaggaactgttggaaatgtacggagtgcggaagagtggcgaaacggtggcggaagagggagtgccatcggtgaaaaactcatgggcatcgacgtatttgcgggaacggaaggcaaatgcacaacaacagcagcaaaagacagggacaaataatgagaaaggagggaaaagccgaacagcccaaaattgggaggagggcaaagagagggaaaagcaggagacgaacacgggcaacgaggacaagcagttcagagaggtgagagggacatagacaaacccatgggacgagcagagggcatgaagaaaaggcaattgccctttttaggcccccggaattgcttttccgactttttagggctttgacttcttctggtgatgaccccaactaattagaaaaaatcccttcgatttcagcgccttctgaacgcacatcaaacggtggacgaactgctgaagaaacgcggcattggcgacttaaagaaggagagggaaatgctgctgagacagtacgaggcactgctggcagcagcggacgaagaattggagacggaatgggcacggatgagaaagaggggcggaggagcggcggggaacggacggagagactcatccgactcgggactttctgaggattattcagaacgagaaaaggcaccgacggaagggaaaatggaagaggaggaaaagatagatgaggaggaggaggaagagcaagagaaagaagaggaagaggaggaggaggaggatgagaacgagaaggaagaggaagaagtgaaggaagaagagaaagaagaggaggaaagggaagaggaagaggtgagaattgaagaaaaattgcacaaaaaagaagaaacagaaaaagtgaagagacaagtgaagtgccaccagagaataaaagaaaagtgtgagcagaagatcaaagagagtgaagagagaaaggtggaagtaacgctgaaattgagagagaaaaaagaaaaggaagcgaaagcagagaaaatagtaacagagaagagaagaatgaggaaagaacacagcataaagaatgagggaaaagaagaggcaaagataaaagatgaagagaaaaaaagagaggaagagaagaaaagagaggaagaagtgaggaaaaaggaagatgaagagaggaagaggaaggaagaagaaaagaagagaaaagaagaagaggcaaagagaaaggaagagaatagaaaggtagaagagagaaagaggaaggaagagaaagaaaagaaagaaaagaaagaagaagaaaagaagagaaaagaagaagaggcaaagagaaaggaagagaacagaagggtagaagagagaaaaagagatgaagagaagaaaagagaggaagagcacaaaagagaggaagaagtgatgaaaaaggaagatgaagagagaaagaggaaggaagagaaagaagggaaggaagaagaaaagcaaagaggcgatgaagagagaaagaggaaggaagaagaggcaaagacaaaggaagagaaaaagccaaaagaaaaagctcaatcaagcagaaaaatggcaaatgtgtcgcttcagcattgcagtttctcattaggaaaagaaagtggagaaaaagagaaaggacagaaggagggagaaaagagtgtgagagcacattttcgactgacaatgccaacggaagagaaaaaaacaactaaaaagacaatacaagtgaggaagcaaaagagtggggcagagagaacgatgaaagagaggaaaggaagagaaagggaggaaaagaaaatggaagagaataaggaagaaagagagacggacagagaagaaaagggagtcaaagaaagggaggaagagaatgaggaaggcagagagacggacagagaagaaaagcaagtcaaagagaaggtgaaggaacagctgacacggaaaaagccggccaaagaagcacaagaagttcgagagctgcttcaaagtttgcggggaaatctgcgacgaacggaaaagcctaagagacaattcccagtagagaagcagagcaagacgacgagagagaaggggaaaaggacacagagggagagagagacaatggagaagggtgtgcaagcagagaagcagaggacgaga

SEQ ID NO: 76963 - DNA, 372 bp, Heterodera glycines
atgactagggatggtaaaaatatggatataaaatcgcaaaatatggccataaaatatggactaaaatcgcgaaatatggacataaatggtaaaaatctcaaaatatggatataaattttcaaaagtgagtgtaacatttcttcaaatttattggttgaaattgcatttaaattttcaaaattccttctaattcgctaaaatattgtaaaacttacaaaaaaatggctaaatatggtattaaaaccattttagaagaaaaaaacatgatacaactaaaatttactcacttttagcgaaaaatcaacccaaaaagcgaaattttggcttttttgcttatttttgacataaacttaccaatttttgaaaaataaa

SEQ ID NO: 76964 - DNA, 275 bp, Heterodera glycines
atggcgacaaataacactgcaaaaatcaaaaaatttggaaaaaacgaccggattcgttgtttcaatattgctatttggcgtgatgtctgtgagaatataatgatgcgaggcctcagaaaaaaattcggacaacagggaatgctcaagcaaatgctcataaaaactggttcaaaaactttggttgaaagttccccgcatgatgtattttgggttagccgacatttgcggaccgacatttgcggaccactatttctcgatagaactgtctaaataaa

SEQ ID NO: 76965 - DNA, 532 bp, Heterodera glycines
atgaggtttgttgcttgccaaataacgtttttcaaattttaatctggctgccctgtttaaaaccctaattataatttagagaaagtttcaattacggctacaacgacttacaatctattttcggcaaaatccaacagaaaatcccaaacataattggccctcaacgctttttcaatgccatgtttatccataatcaaaacttttggaccagcgagtgtacgattcaacttggggttgcctatattccaatcggatcaatgccgccattcaatttcgtggagttttatttttccgacccacaaccctggttttttaatttccgctatcgtctgtatcttattctatgtatgctttgttttgtttaattttgttaaattttttctttagaacttggcgtcaagcaattatgaggaacgaaagtggaaaaagacgaatgctttggtcccgattttttcctatgttaaagaaaaaagatatattttggtccgtccagagtttttaattttcgtatgttaaagaaaacattcactga

SEQ ID NO: 76966 - DNA, 1846 bp, Heterodera glycines
atgttgcgtcccgcccatgccaacaatgagcagcaacaatcgctttgtgcccaactgcccaccaatgtttggtgcactccgtccgccatcggtcgcatggccaccattttgcgccaaatgcacgcggtggtcagcgaggaaatgggccgggaattgatgggacggcaacggttgatggaccatctgtgcctggtccatggctacttcttcatgttgcgcggcgattttgcctccgcacttgagcacatcctcttgtaagacaaggcatcaaaaaaaaaaatttaatttgaaaaaaaaaaatttttttttttaggttcacctcgaaaacattaaacaaaaatttttttttgtaaattaaaaaaattatgtaccccacaccagtgatgccaacccgaggtttttctcaacccgaaacccgaacccgaaattttttgagtgcccgacccgaaacccgaaatttttctcaacccgcggcatcactgccccacacagctataatgtgctttttcaagcaaacaaattctgtttttcaatgcctttttctttgagttatacgggtgctaaacaattttttcaccgtcaaaagcacggactctccgatggcttaatttttttttgtttgaaaaaaattttccaaattttttaaaattaattttaactgttaaaggaaatttgtttcctcgaaaaaagcaaatatcatattattgataaaattcttaaaatgttgatttgggcaacacattaatccaagatttaaaattcattttttttttgcagtatcaaaaccgccaaaacgaccgcaaccaaaaagtgtgccacgccattttcgtcgcgcaaaaatgtgtcccattcgacaaaaattgcggaaaaatgtgtgaacgacgcgttggcaatgtgctcaccgcccgcaaatgtggcgaatctgatgcacttgttgtgcggcgtcaaactgaccaaacgcgagcaaatgaagtgcaaaattttctccgaaaaattcatgctcaaaagtcgacttcgggaaggccaacgaaacggtaagtttttgaaaaacaaccttttaagttaattttctggaaaaaacgcttctatgaagccaaaagtgttttaaaaatacctaacatgaaataaaattcaaaaaaattttttttttttgttttgacaaatttaaaaacctaacgaacaatttgttttactaggaatttagggggttgagcggttttttttctttaattattatttttgccttatttcaacagaattccaagcggttgctgaatttttctccaccaatgcgctccgggcgtacaagcgcgtgttcggctttgtgtccaacctgcagttgcagcgggctcagttggactacacgggacagaatttgttacgcgttgtgcgccagcggttggccacacggagcggtgcgttttggtgcacagtccccctccccctcgaatcaaaaaaaaaatttttttttttaaatctgagattttttgaaacttttgtagaaaaacatagatagttttgtcaccatgaaattttgaaaaaatcgctaacaaattttcaatttaaatttttctaggtttttatttgaaaagtactaattgtaaatttgatttaaaaaaacttcggggggggggaggtcgtccggcgcgtagtggagaaggacaggaataaaatttttataaagcaaactggcatattttaactaaattttttatttgttacagaatatcgttcatctttctactcgatgctcatcattttgcagaaagtccgaatgtttctcaaccgattggcccattatgtgtttgaagaggtacaaacaaattcaaattaattaaacaataaa

SEQ ID NO: 76967 - DNA, 581 bp, Heterodera glycines
atggaagagaaaacggcagcgaaggaaaatggagagaaaagaaaagacgaaatagaaagagaaggaaatggtggaagagaagcagagaatgtgaagagaagaaactgttgtctgttctgatgatgctcaaaggaagttggcaccggtccaagtcccctcatcagtgctttgagaaaacacacacagagagcgataaaacataaattaacgtgggtgggcgagaaggacagtgatggtgaaggggccattattggagaagccggtcataagaagacgaaaggggggctaattatttggaggggagggggcggacgaagcatggaaaagcaaagcaaagacatgcgaaaagagtgtttttcccgttttgaaggcgcaccccattttaaaaaatcattttgttaagaaatagtccaaaagtgaaaatatataatatgtatacagtcattttctgcaaaaataattatgttctctggaagaaataaaatgctctacaatatgcaaaagattacaagtctctacgacttatacccgctgaggtatgggcacttcaatttcgtgaaaatttattgaaaaatattaaa

SEQ ID NO: 76968 - DNA, 574 bp, Heterodera glycines
atgaaactgtgcatattattctttttaattgcatttttaattgctctaattgaaattggagcggaaaagaaaaagtttgagcaaaacacatttgacgaaatatttggagaaaaatgggaagaaaaagaagaaaagggaaatgatcaaaatgaaaatgatcaaaaaaagagagaaattattgaaaaattcaataaaattaaggagaaaatcaaacaaaaaggaagaaaatattcgagaaaagaatggaagagaaattatgccgaaattgtgaagaaaattagagttggccaagtagtaattaagagatggaagaaacaatttggaatgggtgaaggaatgacggagaaagaaaaaatggaaaaagtgaaaatttatttgcaaatgaaaggacaaaacccaaaaatgagtgacgagaaaattgcaaaatattgaaaattaatcaacgaaccgtttttatttggaagaaacaatttggagaagtaattaagaagaactgaaaattaaagagatattctttgatcgcctttttcttacgatatttgttgatttgctttttgtactttttgaaaataaa

SEQ ID NO: 76969 - DNA, 1935 bp, Heterodera glycines
atggcttcatgcaaatcacccattagccttctcagcgtgcttctgatcatgctgctgatcgatccatgcttcaactactatttctttaatcccgcttgttcgtttttttaaattaaatttttataacggttcacaaattaattttgcacaaaatttcagcggatgattgtgttgtggccattcgtaatcgtactcagattccacctggggtcagtcagtctgtttaagtttagtgccatttcatgccctaggtttttggtgttttgtcgttactcaaagccatcaaaatgggcgttacctcataaatcaaccaaaaaaaaaaaaaaattatttattacgtggctcaaaagtaaacaaatttttttcccgagactcgatcccgagaccgaaaaacccgagactcgagacccaaaaaactcgagacccaagacttctttttaaaaattttcttattagcttaaaaaccgtttaaaatttttgacaagtgcaatttgtgcacatagcagattgattgaaggctcataaaaatttcttaatctgaaatccaaacgtctaaaaataaattttctaaaacagtatttgctcctaaacaatacacattaatagcttttgtataaacaattgagtatgcttttaccttggcaacaattcgtgccaaaaattaaaagtaaattgtcttccaacacattgtgccataacatgttgttttgaagcacttggcaaatttttcaattcagcttgattcgtacgtggatcttgctgtgcgctatgatcagcgtgaagcagcccaaaaggcgaacgttttccgcaacacttttacagctgattgtgtgcccgggggcgaattgggccatatttggggcggcttttatggttgcctgacattcacttgcactgacggtcagcaaatttgcttctctattcctatattaaagttttgtttaaatcttgagtttttttaattgaaaattacagtttttgaaaattcaatgcaaaatttggaatttatgataaaattttcaattaaattaaaaaatagctaggaggatcagaatttggtgggggtgggggtcaaaaagattatcgggtttaaatatcctgattttgccgttaaaaaattatgaccctgtcatcccattccagtacccaactcaggcatgatcctgagaaaatccgggcaatatcctgagaaatttcatttatttttccgaataaaaaatttgaatgccatattttccaattgcttggattgtgccggtgctgaaaaacaatataaaattaactttttcatcttatttacagagcatggtaaagacctttttcgcattaatggatgcgctacagaaaatgacaagcagtgcccgaaatttttcaacacattctgccgtgaatcgggtgggaattcgtcggactgtcgccattgtgacgagttggtcgacggcaaagtgtgcaacagctttgatcagttgatcaaccttgatcagtctgaggagcagatgaacagcaatttgaagtcgcacagtcatcacagtaacagctccagcaaagccgagaagcttggcccggcttccgccttcacttggatcagcagcaatttgttgctgctttttggtaatggggaaaaaatgaaatatttcgtaaacccaaattacctaaagtacgaaaataaaaaaattaaggtgttttcaatttagaaagtagtaaattaggtgtaaaaaagcgaaaaaaggaattaattgtacactaaatattaaaattataaaaataattaaatatatatattcaattgttgctgcttttggcaataataaaaaatgaaacatttcgtaaaaaaaggatagaattttcaggaattgaaattattattaccaaggcactaattaaatagtgttttcattcacttttttaaatttggactttttgcatgcgaataaa

SEQ ID NO: 76970 - DNA, 99 bp, Heterodera glycines
agtcaacatccaccgatattgagcttcaacatcatcgccatgtggcagtgcccgcctccaaattgacgccgtccccgtcgaccaccaccgcaacggcaa

SEQ ID NO: 76971 - DNA, 538 bp, Heterodera glycines
gttcttcttcagcagtccgttcactacggggcagagacaatgcgtcacttccgcctgcttttgttgctgttggtgccaatgacaataatgttcagcgtcattctgctgataattgtgattttttaaatataaattgatttcgattttgtggggataaattttggttattatcaaacaatttttttaacttttcattttttaaaaatttatatacaaaaaaagaataataccaaaattttcaaaataataacatttttaaatttaagcttctcaaaggcaacccaaagctgacagttgtccgcccgcaattccttcttccaataacccaaatgggcggcctccgaagaaatgaatgaattaaaaatttgcctgcagcattatgttttgaaatgtaaattttttaaaattttcttttcatcgaatgtcatataacacacttacacatcatattggtattcttctcgttttgttgttttgtttttaaaaaatttttatgtacatgcccaaaaattggtgttctaaaactttcacttttttt

SEQ ID NO: 76972 - DNA, 1342 bp, Heterodera glycines
caagttgccctctgtaatcggtgtgtgacgggtgtgctgaagccggacattgtgttcttcggcgaggatttgggtggcgcgtttcatgaccaaatgggcgccgaccacactcaattggacttgttggtcgtcatcggctcgtccatgcaggtaaacaaagcaaattggaaagatgttcttgtgaaattaaattaaactttaaaaaaattcggagacggtgacaccaacaaataatattttcatgaatttcaaatatttagaaaataattttaccttgctggaattgaacctggaccgaaattttctgtaaatcgaattgcgtttgctaatcaaatttaacgctcttaccatcccaaagaaaattttaaggttttcatacggtttttaaaatttacgcaaaaaagagatattctcctcgtcgattcgattttcggaatcaaaaaattgctttaggtgcgtcccgtctcactgattccgttcaacattgccggcgatgtgccacaaattttgataaatcgccaaatgttgcgcaactatactgccgacatcaaactgttgggcagctgtgacccgattttggtgcaaattgcgctggcaatgggcggacaaatgcgccaaaaaatgcttgacggtacgacgttccattggcacgttggggggagggcattttttggttacatattttgttgtttaaataatttgaaaaaaagtatattccaaaaattgagaaatagagagatggaaatttgttacattaccgggtgtatgaaaccttcgaataattaaagataattcttttatatttttggattttgaattttggcccgtaaacatttaatttgtaagaatcaacccatttggtccagtttccagaactacaattgcgacggggtgtgaagcattcgggcggagtgccgccgttgccaagcgatctgttggcacgtgctgaccaacttttgttgtctcgaaaaacgtcaactgcggcagtggcacaaataagcaattcaaacggtgccaaaatggaggaaaatggtgaagaagaaacggcggcgacggagaaggcttcatcctttccacgccaaatgacggtggaccaattcaagcagtacatcaacaccacggataacaacacgggagaccaaggggatgacatggaggagttgacggaaacggcacgaaagcggtgcaaaatgatgccgatacgggaggatgaggaggagggcacagtgcctgaaatggaaactcaaactattgttcggcaacaaagcaaacgccaacaaagcctttggcagtccaattacgcacgcgtcgacgcgcatttgccgtccactgacacactgct

SEQ ID NO: 76973 - DNA, 64 bp, Heterodera glycines
atgtctggacgtggaaagggtggcaaagcgaagaccggaggaaaggccaagtcgcgctcttccc

SEQ ID NO: 76974 - DNA, 572 bp, Heterodera glycines
atggcgccagacccaggggtagtggaagagacccattcaaagcacgcagtgccagggcaagacatcacacgggcaacaaaagaaaggaggccgcagggactgctgcaaacgtgggtttttattctgcagctgtgctaggcgtccctcaattgttttttcgtttcactttttggcacttttccagacagagcgaaggcagaaatttcatttctccccttttcaggtgcaagctgccaacaggcgccccatttgtctgatctgcttgaagaaaatgacccaagtccgtcaggtgcgcaccatctgtgaccacgtgttccactacgtctgcctccaccgttggctcaaatatcgcctgttttgccccgtctgtctgctcaactttcgcacggaattgtatcattcgggaaacgccgtgtttgagggcgcgtacaacgatggacacgttgtgctcatacctgatggtgaacaaagcaacagtggctaagtgatcggcactaatctccaattgtgatcggaccaaaatggattatttaattgtgtcttgtacataaataggttattaggacaataaa

SEQ ID NO: 76975 - DNA, 709 bp, Heterodera glycines
atggatgacggcaaagacttgtaccattggagggcctccatcaaaggaccgcccgagtcgccgtacgaaggaggcacctttcatttggacatcgttttgcgccgcgactacccatgcactccgccaattgtcaaattcgtcacagacatttaccatccgaacgttggagaaaggggcgacatttgtttggacattctgaagcagatgtgggctccggcgttgaccatttcgaaaggtgaaagagtggacaaaacgccgacaaaatatcgacaaaacaaaacaaccgccataaccagactttttggaaaagtgtcgatattttgtcgtgtgaaatgggatttttcaaattcggtagtgccgttttaatctttacccccccccccccccatttcagtgctgctctccatctcttcgcttctctgtgacccgaatccggactgtgcgctgcggcaggacattgcgactatgtaccgcgacaaccgagaggagtacaaccgaaatgcccgtgaatggacgaggaagtacgcgatgacatgacacgacaaacgaccgatggatgggagaggatgcagaagacaaccgccgaagaggaaggaggaggaggacacattcagcttaccctattcccattcactattatcaatgtgttgtatctctgtgttatcatttcaaacgatttgtgattaattgttgcgcctaatgtgtgtaa

SEQ ID NO: 76976 - DNA, 372 bp, Heterodera glycines
atgctgccagcggcaccgcttgacaacaacaacggcacgtcgtcccaaacgattggcgaccgcattggtcttgatgatgccatcatgcgtttggccgaagcggagaagaacgatggactcgaatggtgcgcgacaccattctgccgaccgactcccgcattgacaaagcgttcgatgcgttcgaaaatgccatcggcggacttcggcatgccgtcactgactgatgtgctgacgggcacatttgagtttgtgcagaaaacatcggaacggcacagtatcgcccttcgatgcatccagcaacagattgaggaccagcagaagcagttggacagcgaaaaagccaatgattcaattgccgtaaaaatgaattaa

SEQ ID NO: 76977 - DNA, 414 bp, Heterodera glycines
atgaacagtctctccaaaacgccattaaacaattccatttttattaaatttccacaatggcacactctgctcgctccaaccgaatgtcggctcgaagacgacgtgttagcagcagcagcaccagcagtgccgctcgtcgaacgatggcgaccagtccagtccaccgccgacctcgtgctgctccgtcgtcgcgcagttgtgccaacccgcatcgctgccccaacaccatggcccgcgccggcaggctggcggatcggaccgcgaccaacagtaacagggccaacacccgtgccggaacacgaagaacagcagaagctgcggcacacggtaaccaccctgctgatgatggtcatggtccagcaattgccaaacgagccaaaacagatgcaagaagcacatgagttgtgccactga

SEQ ID NO: 76978 - DNA, 752 bp, Heterodera glycines
atgccgagaggagtcgattggtatctattttgtcgcaattcatgcgttttcagtaattggacggttcagtcccaaaggcatatggccatttcagtcccgggtcggtaactcttcagagattggttgccgcaaaaaaattctttcggataaatcctgaattatgggggtgtattttacaaaatttttcgttcattctttgcggtaattagcacacttttcccttcttccaattgaatggtgtcactaccgggccgcccggtaaaacggactttttagaaattccttcaaaaaaatttataaaatttttattcaaagaaaatttcaagaaaaataaaataaaaagattttctgggaaaatttaaaaaataatcataagctttctaaaaaatcgatgaaagctttttaaaaatttttctagaaataaaaaaaaattgtttttttttaatttcggcgggggcgggaacaaactgttgcttccaaataaatccatcgaggagagttgaagaaacagagcccccggtgaagttaatttgaaattgatttgaaatgtttaagttttctctgattttataaaaggcattaaaaattgtttaaaaattttaattttaaaatatttttgctgcttttttcagcaaataatttgtctaatcattcgtattaagtgatcagcaacttttctgctgcgattgggacactaaaaatggaaatgagataaatattttaaaaatcaaaaatgtagtcaagtaaataaa

SEQ ID NO: 76979 - DNA, 1415 bp, Heterodera glycines
atggcattgctttcttatcgttttgatgttttggtggacaaatattttggtggaaaaagcgaattgacaatttggaatgcgatgacaattttcgactgcattggatctctggaagtatatgtacggattgatggcaaatttgtgcattttccgttgccgggccgtcccctgcccaataaaattcgttttcgttcccttcactttgggtaatttgaaagtttgtatatattagcattttcatatttcttcaggtacattgaccattccgtgatcacttttttccgttccaacaaacaaatttttgacagaattggcatcgaattggaattgtttattaattttattaaaaatgtccagccaatttgggatgtttttgtgtgtgaaatttggccaatttttgcaacaaacattcgccatttgcgccttggccgtagttataatttggacaatttgcgtcgccgcacttcgccgacaatcttcactgatcttgatcaattgaatccaatcgattccgttgatctgttacccgatgtgttcgctgatgatgggccaaatgcaactgctggccaagcgttggccaaatggttgcacactccaagcactgatggtcagtcgaagcgcttgttatgccgtaattattcattaaatttcgaatggctcaacaatttcatagaggtgatccgccatattttcgttaatttgtttttctcaattttgttcagacatttctccgtgccaccacttctgtcagttacaaaattcgaaatgatatgtcttcgtcaacaaggccaattgagccatttgaattggtgaacgaacggaccaaagagaagttgacactgacgaacgatggatttggttggctgttgaaacggtgcccaattattgtggagatggcggcgcagaaatatgaaatttttggctattggaaccgagtcatcttccgtctgtgaaaattacattgggtgagcagaaggatgcttttgtatagagcacggacagggggacagtatcccctgtacagtactttcccagaatcttggtcctcttgtacgttttggaaacgacaaggaatccagttaaaacaggacttcagtccttgtcttgtccctcctgtcctgctggtccatcggaaaccatggtcttggttccagttttttccaaaattctccaggctctatttttacaaaaagattgttcatccaattcaaattgtgcttaatttaggcctttgtctccgccaacagaccaaagcgacgaaaaagtgttctcttttcccgggcccagtgatcagcggaagaagaagtgatcatttgacaaatgaccgatcatttttgcgttatgatttggaatttggataaatattgtttatctgacgtctcaaaatttcataactaattcttaccccaattcaa

SEQ ID NO: 76980 - DNA, 491 bp, Heterodera glycines
atgtccctcttctcctctcagttatgccgaggggcactgtgccagctccgttctcagctggcccagcttggttatctgatcgatttgacaaccgaagaaatttattttttggctggagatgcagccaccgttgggccctcatcgactggtgccggtacaacactttaatcccgacatatgccgtgccaagtgcacaaaagcgtgtttttggcactatcacaaccactgacgctgaagttgcagcaatggcggcacaacaacaaaaaggcgaaaaacctccagcggcacgttgcgcattgtgccggttcctgctatacaaccagaaaaacaacagctcgttgctgctgatcaataaggccgccgtgccattggcgcaatgctccgaccactggtcaaattggtatgaaattggctgtggttggataataaatgtccaaatggatttgaatgattcccatacaaaaaatggtgcttggtcattcattccataa

SEQ ID NO: 76981 - DNA, 1290 bp, Heterodera glycines
atgtcagacaaccgaaaagaaggagaagaaaaaatggcaaaagccatgtaaaagctaaaatttcaattttaaattttatttttcctttttcagcttaatctctgccgattgtttgttcaaagtgttcaatttgcttccgcctactcaacttggcctcggaattgcactgattagccaccgatttgactgtggacgaacatttcaaatcgcgcaaatgggcgctaaaatttattcgaattctaagcgaaattggacagaatggcgcaaaaaaagggaatggaaattgtcaatcgctttgacaatttcgcaagcgacgccaagacgctatctgttcgtccaggcgctacgcgcgatttccgaaaagttcgaaaaaaagttagcatatctcagcgcaaaggtgatgcaatttaagatgcaaagacaaaaagttcttaaacgagatcagttgtcgaccaaaaaaaaaaatttcctcgccatcaaacaatatatttcaaatttggtgcagttcattcttttttaaaattgtttctaaattcatttttaatttattatagtctttatagaccatatggttgaagtgtaaataaaaattaattaattaagcaataaagtaaaaaattaattacttaataattagttacatagtagttaataatttgttttttttatctttttcgcatttttaatgtgatcagtaaaattgaaattttaattaataaggaaaaatttattttatcattattttacttaataacaatattttattcatggataagatttattcacaaatgtagaatttctttgttgctataaacaaaacctagaaaataggcactaactaataggtaactcgaaaatagctcaaaaacaaccaaaaaacatgtttttcgtgcgtttcatgtcactgggagagctcggtattttgaaaaaacctggacctggatttcctggacaaaaaccaggaaaatccaagtccagctaaaacccaggtagccaaaaaatgaaatggacctggacccaggaaaaattcaatcataaatccaggtccaggccaagctctagttattaacaacggcgccgaactggacggttccccagaaggtgcccaaagagcttttttttactcaagggtcaaaaaattattttttttctctattaatatttttcaaattgcagagctggggcgaaaaagcaggaatttgtacaggtcttacgcaaaaaaataaccattttatgcataatcccccatgggggataattagagaaaacaccgctaaacacccgatgtaa

SEQ ID NO: 76982 - DNA, 785 bp, Heterodera glycines
atgagctttcacttcccaatctttgtatttttttctgccattatgtggttttgttttgaatgctcaaatggtagtggaattggcgatgtgaaaatggccgaggcttcttcaaatagcaacatgaacaccacgaaacgcaaacaagcaaatcctgatgaggaaaagcataacaaaaaggccaaaactgaaattaggaaaacggtatgttattggtgggcggtcctattttgagtaattaaaaaagctattatgatgatccaaacctgagacgacccacactgacaaatactctaaaaaataacaaataaaaacaattattattactaattttttggctactgctggattacattcctgagattgaattgaacctgttcaaatacttttttaaataatttttttctttcatcgagtttattggattttcaaaaaatcccgtccaggtcttgaaaaaaccgggttctggacccggcctgatacccggacccggccaatcctaataaaactattatttaaaataaattaaattatttaaggaaaatcactgggatgccaccgcttgtgatacacgcctccgaatcattgatggtttgactgtcattcactcggcaaaacaatctggtatttaattttttctattaaataattgaatatttcatcaaaaggttctttccgcccagtcttcgctaaacattcaatttcgcccaaaaatgaatcgtccggcattttttactttgaaattacagtacaaaaaatctattggtaagcgtaatgatttaaataaa

SEQ ID NO: 76983 - DNA, 2713 bp, Heterodera glycines
atgcatcgcgaagtccgcgaactaatgcatatgcaactgcacagatgcagtgatagttggtgtggtccacgtgaccccaactttgggcggtgtaaaaagggcttcccagccccgtactcgaaatgtacgatactacacccggacaggcccgcattgtattaccggcctagcccaaccgacggtggtgcccaaattgaggtgaacggcttaatatacgacaactcgcaagtcgtgccgtacaacccatacattttgctgcgttaccgagtacaccacaacgtgttattcgcatacggtaacaaagcgaacatcaaatatgcactcaaataccctttcaaagggcctggacattgttatgtcgagtgcaaagaggagtccggcagcaaaatcggtatcgatgagccggctcaatatgccaaaatgaacttccgtggtgctacggaagcttttgcagttgtgcattcaatgccatttgcaaaactctcgcatcacgttgttcatttgtccattcatttgccaaaccagcagcccgttgtctacagggcattccaactggtgagcaaagctgaggaaattcagcgaggcgaactcccagagacgccatgctctgcttattggaagcaatggcaaaatgaatggcagcatgttccttcgcttaaggacatgctttttgaaaaagtcccagagcaatttcgctgggcaaaggaccgatgggtcttttataaaaagaagcctatcaaaaggcccccaatcggtcgtgttgtacctgtccctccaacggaccgggaaagatttgcgctctatgcgttaatgcgtcactttcccggtgatccggaccacttaaaactggtcaatgggcagcagtacaacaccttcacagaggccgctttacagcatgggcttcttgaagatgaccaaatttggcacaaaacgctcggcgaggcagccttgcatcgctggccagaccagatgagatggctcttcgtgagcatcctcgtctttgggcagccgagcaatgccctagaactgtggaacaagtacaaagaccaaatgtataatccacagggcatcaccagtgcggctatacgccaagcacgcgagcaggaagcgctagccgacattgattggcgattgcacttctttaactcaagctgcatgcactgtggcctcccagatccaccaaattcaaaagccaaaaatatcaatttggcagttgaagaagctttctttggtgatgatgatcttaatatgccgcctggccagccaaatcctaggcagcagcaaaacgctccacctccactcaacagcgaccagcaaaaggtctttgatgctgttgtgagggctattcaatcggatccgaaggatccgactgtgcctcgccgtttctttattttcggcgatggaggtacaggaaaaacattcctgtttggccaaattatcaagcgcttgcgcaagcccccatacacctacaaagtgcttgccacggcatccactgggtgtgcggctattttgctgccttatgggaaaacagcccattccactttccgtctgggtagagaagtgtcattagacaaactcccaagcattcccttggagagcttctttgctcgacggatacgtgaggcccaactcatcatcattgatgagatcaccatgcttcacaacacggtgattgcggtaatcgaccgagtgtgcaaagaaatggcaattcgccagcacaaggacctcctcttcggaggaaaaacggtcatttttagcggtgacttcaaacagtcactgccggtcgtgcctcacgaaggcctaactgcacaagttgcggcctgcttccaaacctctccactgttttgtcaattcctgactatgaaattgacaataaaccagaggttgggccaagggcagcaagcttacttgcaaatgtgccgccaaatcgggcttggagagaccggagaacacttctggattcctccgcagttcctcgtaaagagcagggatgagttgatagactttgtctatcccgacttccagaaactccttggaaatgacaaggaactgctaaatcgtctgatcctcgcacctcacattgacacatgcgatgagatcaacgaaatcatgatggcgaatgtgcctggtcaagtgcgcgaatatttgtcctcggacaaaccgcttgacgagcggccactggatattgatgaaatcgagtccgaagtggcagcgttgaatcgacgcacagactctgggatgcctccccaccgtctgcgactcaaggtcggaagcgtcgttgttctccttatcaataaaagtgataaggaaggactgatcaacggcacgcgcatcgttcttgaagaacttggcgacgatcgtctggtcggtcgtgtcattaacagcaacgctgttggtggccaggttaagttcttcatcgaaagaacacgaaatgtctacgaggacaaaacgcctggcggcataaaatatgagcgtttgcagtttcccatcaaacctgccttcgccatgaccattctcaaaggtcaaggccaaacaatcagcacggtcggaattgacctcgaaagggatgtattttcccacggtcaattgtacactgcattttcaagagcaacggacgggaacaacgtccgagttacgctcccagaagggagaccgacgacccagacagagtcaaagtgctgaatgttgttgcaacgaaaatgctcaatttgca

SEQ ID NO: 76984 - DNA, 77 bp, Heterodera glycines
atgatcataattattattttcccagaatatttgggaatccacctcaatgtccagaaaaaagttaagagtcgcaagct

SEQ ID NO: 76985 - DNA, 1487 bp, Heterodera glycines
cagaagccattccaatcagagctcgagaaaaagctgatggaacaaattgtgacagttcaatcgaaggttgacaaaatgggaatggcacatcaacagcaaaagggtaaaatggacaatgattaccgtataacattattaactatactgtcaaataggtattactttaccagggatgggccaaattgaaaaataaaaagcgaaatttgcgaaactgaaaaatgcgaaatgaaaaaaaagcgaaatgcgaaaagctaaaatatgcgaaaggcgaaatgcgaaatgcgaaattttttctacaactttttaatagttaaaagcataaagcaaaaatcattttttaaaattttattccaaatttaaaaatcaatagaactctttctgaggcgcgctttttccaaaaaaactttttgggaagagggggcaggcggcgccggcaggtgccgccaggaaaatttttgaaaatttgattaaaatttgttgacagattttcactaaaaaatgatcaaattttgtgatttttatcatttttctaatgagtaataagagttttggggcgccgctgagaacagtttttcatcaaattaattagccaatttataggtcaaatttttaaaaattttatgggaatttaatccaattcttagggctgtaaaagtcgcgtttcgcgccaaaaagcgaaatgcgaaacaccaaaaaatgcgaataatgcgaaaggtgaaatgcgaaacctaggcacatccctggtggtcaccgccctttgtaagcgcgccgcaaaaaaatggaatgatcgccggggcggtaccccgtccaagcctaaatcttaggaccgtcctcgactcaagccctttaaaaattgcaattaattccccaagggttggccatgccccgctattgcctcttcggtgacacggtgaacaccgcgtctcggatggaaagttcttcaagcggtcgaaaagcaaatggcattttaatttattttattatttaaatttcagccaacaaaattcacatctccaaagaaacgtgcattttgttgcacgaaaactctgaaggaggcgcttacttaacggaaagcagaggcgaagtgatcattaaggtgaacacaaattagacaaagtcttcaaaatcagagagagcactaatcaatagaattaagaggaatatttgttattttttaaagctttatctcttggcaaaaatttgcctaattttgtccaaaaaaagcacaaggttcttagtgctgctgattatcattataaataatcgaattgcttctaaattggctttttcttgactaactcaaattcattttttgcttttaaaatgcatattttaaaaattattttagggcaaaggcgtaatggaaaccttttggctgttgggaaacgcaaaaattagcggtggcacaattggcacaaatcattcgcaagcagcggaaagacaaatggcaatggaaagtgacaaatcggagaaggaaatgtacaaaa

SEQ ID NO: 76986 - DNA, 106 bp, Heterodera glycines
actttgtgctttcgaatgatgccaaaaaatatagggtttgttcaaacatgaacaaagttattgtataaaaaccaggcattgtcaattgattggactcataaagtgc

SEQ ID NO: 76987 - DNA, 2295 bp, Heterodera glycines
atgaaattttgtggttcagtgctgctcaagctgttcaagtcggctcaggtcgtcgaattgggtttctgtgccgattttggttattgtcaggtgactcgtttgtctgtctattcggttgtttgaatgtgtttttagggtatgaaaaatggtggcgaaaaatgcacaaatgcagtgaacacctccctctgctcgttttgccctttccacacccaacaacgcgcccgccaactctcaatggcccgcggcgctttgaaccgatcgtacaatttaccgccaaagaaaatgcgctctttggaagagcattcgaattcctttgacacaccaactcaaattggcgtaaaaaccatcgcaaggactcaaatatcagacggaaagatgtacgctttaacaagggaatttgtgggtaaaattactcttaaaaatattcagtttcacaaagccattgtccgtcgttcagcaaaggctcgaaagtaaaacggcggaaatgaaggaaaaacgaatggacgaattgaaaaagctcgtcacggaaaaggtaaatgaaaatgaaggaatattttcattaattattatgggaaaggaaaacattctgttggttttagccgtttggctttggtgcgaagaatttgttgctgaagcagcagagggacaaagagaaccaaagcccgcgggcggaagcgtcggcaccgttgcagtcgcccagtcaaaagtcgcttcagtccatgcgcgaattcatccgctcgcgagtattacaacaattttttttttaaattcaataatttaatagaatttgtgcggctcccggtaaattggacaccagaaaattggacactgttgtaaataaaaatgaaaataaacaaaataaattactaaacaaaaattttggtttggcctaaaagatctttatcttaatctgccatatgttgtttataagcgtaaataatatggaaatgaatttgttattatttttgtaacttcaggagaagaaaaacatcatatcattcataaagaaataagttttattactcatttctggtggattttttggcccattgatcaatcatccctcatttaacccatttattctactcaaatttattttcacctagttcttgattttttttaaaaaggaaatcttagtgtccaattttcctttagtgtccaaaattccggcggtgtccatttttccgcttggtgtccaattttccggtccccatttaggctccctatatttacactgtatataccattattatttttgcctcaaaatgcgtcgtcgcctctcacgcaaatggaatcaatggaaaacacccaagcgcaaaatgttgaccaactcacagcgaaagaacgagcgaaaatcgtaaatgaatttagcaaaacaacaattcaaacaagtacggccattttccttttgcagaaacgcgccgcagaaattttgaaaaatgctcccgccaaacggcacaaacgtaaatttaaatttatatgacctttctggcaatgttccatttttgagccaatgacagtaaagcacaaaaagaaaatggaagtaaaagcgacgacggagaaacaaattttgggggaagttttagcgacgaacaaattcgaacacttttggagaaaacgtctaaccacgacaaagaggcgaaaagggtaagaaaagggcaaaggaatggacagcgaaacaatgcaattttcaggcggaattgaaccaacaaaacgtttatttcgaccggcgccaaatcgaagaacaaattgaaacgaatgcaacttcactaatggaattgaagaactgcaaagtcgttacctgctcaattgtgagtacagaaattgaaataatttctttaaaaaagtttgcttagatcgcaaaagccattgaaaaatagtattttttttgctgaaaatttcggttttctccgtcagacccctcttgttcctaaaattttctttaaattgtctgacgtacgtttgttcacagtgcgcttgcacgagtcgccatcaaagtgtttattgtaagacgtcgggacacgaagtgaagcggcattttgcggacaaacgcttcttcaagtgcaaaaagtgtcagcagcggacattttgctacgaccgaatgcccacgagggcgtgcattgtgagaatgaatgcttttgaccacttttggcattgaatgattttgtttttaagtcgtgcggagcaaaggaattttgccgagtggcgatgaaagacgagagaaaagtgctgacggagagggaaagactgaagctcaaggaggaggagaagaacttttcatcactcaaagcgtag

SEQ ID NO: 76988 - DNA, 62 bp, Heterodera glycines
gctgattattttggtttgtaactttcttgaaatgttaaaattatcttgttttctcgtatatt

SEQ ID NO: 76989 - DNA, 592 bp, Heterodera glycines
atggttttgagtgatttgtcgaatgccgtcaacaatggggcaacactgagtttgcaagaactgcggcggcgccgtaggacggccattgtgtttctggcgcccgacttggcggcccgacagcgacagttatggcgagaacgccaccgcagctcgaatgcagttgaacagcaagatgttattgtattggattagaagatgacggcggaaaaaggccaatttggatgctttttttgttaattttttgttcgaattaatggtaattaattgtgcttgaatctttataataaaaagttgaattttttattttttgtaaaattaaaattcatttaattatttgcaatttttgcatttctttttaattctttggcattttgttttttaagcaagcaattttatccactttttttgccgtccatgacagaatttcacacatttatccgtaaacaattgaatagtttttttatggatcaaaacaggaaatgcattgaaatccgtttgctgacttacagacattttttggtcggagtttgctctttcttggtggagcaaaaagatgggatttgaactgattgacggaggagcagttgaatga

SEQ ID NO: 76990 - DNA, 920 bp, Heterodera glycines
atgggtgggtcttcaaatgaagttgggaaagtgctcattgtttaatcgaaattctccttttagtttttactcaaaaatttttctacttattaagcaatagaaattttgcatcggaattaaatataaatctctataaaaatggctacaataacatttcactatgattttgaaaactgctgcaaatgctgcaaagttaattcaattgattgcccaaattgttgggtaaaactgagaacattaatttgtgacttttatagcttttctacaacaacaaactattaacaggaactcatttaaactgaactttttgtatcaaaatttaaagaaaattaaaaaattatttattaattacaaatgtctttattttgttttttcctttactatttcccattttgtcatatttggtatttgttaaaccctacaatgggatttaaattttccattttgacgggatgatttaaggggtttagaatttgttccaaacatcaatttaaaacaaaatataaaaaggagcattttaaaagactttcacttcctttaagttatttctttacttatcctataagtattgtttacggttttgtaaaaatttgtctacaacacatttttttaaattaataacatgtcccgttggactactttttcattttacagacattttgctcaacattttgatggttgacgttggcacaacttttgtcaaattttctgactgcaccaactcggcattaaacacaaattgcggacgaattccatccacaatttgacggcagaaagtgttcaacaacggcgacaccagcaatggtcattcattttttatataatttttaatttacataatttaatcgcactgaaataactaaaaataattaaatataattaaataattactgcatcatatgattcaattaactaataaa

SEQ ID NO: 76991 - DNA, 512 bp, Heterodera glycines
atggctgttcgccgaagagtagcacaccacgaagccgggcacattatggcaaatcacctaaataaggatggggctgagtgcttagcagtaaaattttgaattgaaaaattaaaaattcattaattttagtcagatatagtggaagatcagtttatgtgcgaacagttcaaaaaaagagaagtcaaggaagcaataaagcaggtatctcttttagagcaattcaaaaattcaagaattaagcttgccaacgcgttgcttcaacgaaatgtattgcagtgcaacgacataaaacggttagagatattttccaatgacaaataatcatttttatagaattattgggcacattaaacgatcgtaacgttcattctactgacagggatggagctcgtctgaaaaaggaaacataattatattagcaaagcattagtgtgattaatttctttggaaaaaaaaatgcttatttcattattttttataaagaggaattccactccgattttgtattttaa

SEQ ID NO: 76992 - DNA, 752 bp, Heterodera glycines
atgggtggcaaagatttagattttggcaatggcattggtgaagaatggcacagtacgaataccatttttaatgaaaacccggtaatttttggtgaaagcccggaaataagctcaatgaataatgacgatgataacaacaacaactatcatccttattactactacaataattatggttatggtaacgacagtaattttcctggaaataataattggtataacgcaaacgcatacactgataactggtatagcgtaaatgatggtgatgatgacacgagtggttacggtagtactacaagtggaaactacggttttgagacgaacagttacagtagcagtacactgggtggcaattacgattacggtaacagtagtgagtcatcatcagcaccagcgttgacaaaaaagaaaaaagaattgcagcaaatattcagaggaaacattcaaatccgagaaactgacagtgatggtttagtgagttatcggccggccaaaaagaacgaagtggtaatcaaattgaataaataaaataatgcaaaatataaaaggtttcaaattcagcttaaattatactaatattttattttaaaaaattcaaaaatgcatataattttttcttttagtgttttgaagtttattgcggcactagtaatctaactgacggcatttttactgatcactatggcaattttgaagaaactttgcataaggaacaagaagaagcgctgaaaaaaatgcaaatttggaattaa

SEQ ID NO: 76993 - DNA, 1053 bp, Heterodera glycines
atggacagagagagaaaacgggagaaagaaaagagacagaaggagcgagagagatggagagagagagaaaacgggagaaagaaaagagacagaaggagcgagagagatggagagagagagaaaacgggagaaagaaaagagacagaaggagcgagagagatggagagagagagaaaacgggagaaagaaaagagacagaaggagcgagagagatggagagagagagaaaacgggagaaagaaaagagacagaaggagcgagagagatggagagagagagaaaacgggagaaagaaaagagacagaaggagcgagagagatggagagagagagaaaacgggagaaagaaaagagacagaaggagcgagagagatggagagagagagaaaacgggagaaagaaaagagacagaaggagcgagagagatggagagagagggtgagagagaagaaagtgcaaatgacaagttgtgatctgaagaaatgacagagcaaaacgtactgattagagacaggatttttagttgctaaaatgccgaaaggttactaaaataggtgctaaaaagtgcaataatgtttccaaaaatgcccaaaacgccaccaaaataattgcaaaaataggtgctaaaaattggaaaaatccttcaactttatacataaaaattccaaaatgacttatttatttttatcaatttggcccgcacaattgcaaattgtcaagaaaataaataaataaatttggagtcgaaatttttgggaaagttttcatttcttaacgaattgccaaaatcttaaggagtgaatttaatcggttttctcatataataatgccaaattaagtgcggttttaaaattgaattttctttttataaaattaatcactaaattaaccatgattctcgagcggcacgaaattggatcaaataaaaattaaaattatattaaaaataattttttaaattaacagaatttttaaatgttattatttaaaccaacaatgtgctattccaccacacattcagcggttgctcaacaaaacgcatagtctcacataa

SEQ ID NO: 76994 - DNA, 1177 bp, Heterodera glycines
atgagcgatcataaaggccctaccgcatttgtaaaaattgccaaaataaatttccaattttggaaactcgtcgacgaccatttgcggaataaaaaatggcttcttgattatttggagattgatgaagaagaacaaatggatggaacgacagaaatggttatttatgacggaaccggaaaaatattgccaattccgcaaaatccattgcccaccaaaattagcggcttccaaacgatttggatcacgtaaattaaccgattatagtaaatattatattttttgttaactttctagttacctggatgcaaatgtgatcgcttttctccacctttttcaacatcttttcacttcgtgtgaaattactttgaccattgaaatgaccaatggtcaatttttgttcagtttggcccaaaatatttggccactgatcaaaaacaacgttaaacgcttttcaatgccgaccaactttgaacattttcggcatcacttcccttcaattctcagcagcgaccaatggccatctcttcaattcttttattgtgaaaatgttttgccagatttcccagccgatgattgtgccaacgcgtcggatggacaagtgctgtccaagtggctgttttcggcacattttggtgatttgccaccgaaagtggctcaatgtgaatgttcaacggacctgcaagggatcacgtcaaaaatggcattggtcaaatcggtagtccaattttaacttatttaattgcagaaattaataaataaatttaattattaaaggaaaaagaatatttttgtatattaatattttatcttatatataaagaaaagatataaatattttaattcttatgtacgtttttatttatttttttacatttaggcatttgtcaatgcgtcttctcgtgccaattttatcgtgtacatttggtttaatgcctcttcttcggatcatgtgacagacattccgacttttaaattgtccaacaattcaactggcgagcacatgacattgaaacggattcgtgataagtatgctaatattacagttgggttggtgggactgcggcaggtcaaagaaatttaaatttgaactgttataattctctaaaactaatttgttttgtttttctatcaaaattgattttggattatcatttagcaatattgcttggttttaaaa

SEQ ID NO: 76995 - DNA, 790 bp, Heterodera glycines
atgccaatcacaaaatgcgccattcattcgggtggaaacataatggcctatgcgatcggttatgattggagcaaggtaataattgaaggggcgcagagagcggacaaattgaaagagaattgccaagccaaaaagacaccataaaatgagaaatttggtttttagggcttcgaatacagcacggcgaataatgtgacgaaaatctttctgcacgggtgtgacgaggagatgaaaccaaagccgaagaagtgatctccgtgagtgaccgttttttaatgttctctcaattgtttttttataaattttttacacttcgttttgcattgctttaaaacggcctctcctccccttctcccctccgttattcactctcaaattcatttttacaaaattccctggccaacttaacaaaaaaagaaccctttgccgttcccaggctctttatttttattacatttctcactataattctcttcaatagcccggaaattggcttcggcggatggcagacaaaaattgagaaaggaaaagccgtgcccattggacagaggcaaagaaaagggggagggaatgttccgggaagggaagggaagccaattcaatgtttattcacttctccttttatgtccttagaaaatttggatgctttgacaaaaaaaggaaaagccttcgcacaaattctatttgccggaaattttacacgggaaggaaaaagtagaaaatgctttaattttaatattgatcaaaaatggagaataatcaaaaggaacataaaacaaaatacaaatca

SEQ ID NO: 76996 - DNA, 65 bp, Heterodera glycines
cattatgtttccacccgaatgaatggcgcattttgtgattggcattggcaaggcatcggaaccct

SEQ ID NO: 76997 - DNA, 794 bp, Heterodera glycines
atgggcttgaaaggctccaagccgaaactgtccaaggaggacctggagttcctgaagaagaacaccaacttcacggaggaacagatcaaagagtggtacaaaggcttcgtggtcagtccgtacactttgcgaggcctccgtccgttcaccgctttttgtccccgtttagcaagactgtcccaagggccatctgaccaaagagcagttcatcaaagtgtacaaggtcagtgccatgccgatttaatcggtcggggactgactttagccctactcatgccccgcttcttttcaggactttttcccctccggctccgcggaaggcttctgcgaacacgtgttccggaccttcgacacggacaacagcgggttcatcgacttcaaggagttcttgctggccatcaacgtcacttcctccggcacacccgagcagaaactcgaatgggcattccgggtttttgaatttcgaattcaaaacgatgccattgcctttgtcccgttcagatgtacgacatcgacgggaatgggacgatagacgagaaggagatgatcaaaatcatcgaagtacacacaaatgggggcttgacatttccaacattttgccgtttttaggcaatttacgaaatgttgggccccgaagtgaccaaatcggcggacgattcgccaagaaaacgggcgaaaatgattttcgagaaaatggacgtaaataatgacaaagagctgacactgaaggaatttgttgacgggtgccttgcggacaaggagcttttccaggcaaattttgtctcagaaataaa

SEQ ID NO: 76998 - DNA, 791 bp, Heterodera glycines
atgtcaaggtgagtacagtcgattcgattcaaagtcaggaagccgagcttgtccttgtcatcacgactcgctccgcggctggacgatcattggaagctgacactggcaaggaattctgggcggattgcgcgagaacaaccgtggctctctcccgtcccaaatttggattggtcatcatcggagatttgtcgttgatttggcacaaagggactgtgtggagacgtttcattgacgaaacattaaaaatgacggttgcggtaaccccggagtatttaaaccttatttccaatccgtttccgtcccgggtgggaaaatttattgcaaaaagggatggcacaattccgatggcatttgaattttatgccgaaagggacagtactttaagacacgatagtttggcgtatcagccaccaataaataatttcgtaaataatttttccccttccccatttttcacaggtggtttcaggccattcacagctcaggcaaatgtgtttccaccgatcagttcgggtcatgctcaaccgccggctttctcacacggaatgatgatcattgacacctctgtgcgccctcctccaattaacatgatcgccggtcacacaatgccaatgccttcaaattgccctggtccaagtacgcgaatggcgccgtatccgccacaatatttgccgtcatacgccgaagccgcccaacaagccccgtcaaactcgaacagcaaccgaagaatcgatgtgaagtgctatagatgcggaaaaatcggacacttttcaaaacgatgtcgcacctga

SEQ ID NO: 76999 - DNA, 1652 bp, Heterodera glycines
atgaggcgaaatgtggacaatgatagtggtgcaaacaatggcgcgaacatcagcagcgacccgaaaattgctcatgctgtggacactggaaatggcgcaaatgacgcgcttggcgacggaatggacattgggcactgcccaaactgctcgtggcattgcaatgtgtgcagtaagcgaatttttctgttctgcattcaatttcgttcaaacatttctttgattcagtctgtcattaccgcctaatttgtttaatttactatcaaaaccacaaaacggtcaaatttttatttttttattttttttccctgttatcaatttaatcaatgtttttgggctgattttccactaactaattcaatttgctaccaaacaacaaaataatggtcaattttttttctcttctctattttttttcgtcaaaaaaaaacattgccgccaaaagttcaattccctattgaaactaatacagtacaacaatgcgcgatgcggagaacattgcactttgaacgctaatatcatacttatcttttactgtaatcgccgatgagcctggacaattccatttttcgatttccacgatagggatgggctcttaaatgttacaacagctaatgggaaaagcgtcgctattaacaatctccacttttcactaaaaagcatttcccactcattcatcaattcattcttcatccaaagcacatagtgctctcatctcaatcgacaaacactctgcaattcacagccttaagcttaagcaagcaaccgcgcgaaccctaccgcctattccctcatttgtttccaaatttaattgttacatctaattattctaattttgtttccccgtttcattttgcttattatttgcgctcatatttgaattgttttaactcgcgctctcatttcaatcaatagaatagtcgtaagactaagagcagaccaaatttttttttttttttttttctcttttcaaattgtccaccccaattttcaattgaactatcctttggatagaaagaaacgaaacaatggaagaccaacaagttacaataacgagtgtagacaggacattatttcaaaatctcagtcaccctcctaattccggtgctcccttttcattggtagaaaaagtataccaaggcactgtacgtcttgaggatgccgctaatcggagtctaagagtgattaatcgcagagctgtacaaaatacagacgccattaaccaagtatctgttactgttaatgctaacatggacactctctccacaagacttgaccaagtggtagataaagttgaaactttggaaagccaagtggagaattgggataatcctaacactgataacttatcacaaaacggggatgccactgtagtactaaggagccgagtgggtttacttgaggaagaggacgatgaagacgaatttttaaacgttttgacaactgtggacccatttgctagtcaacttccggcatgcaaggatgaaaatcttacctctttcgataactgggcccaaaaatttagagaccttttggattatgctggcacaacatggtcagaaaaagaaaaattaggccgactcaaattttctcttgaagggcaaatcagaatggggtcttcccaaattcaatggatgctcctctattgcagttaa

SEQ ID NO: 77000 - DNA, 435 bp, Heterodera glycines
atgccggcgggaccggaaggggcggaggccagcgccaaaccgacaggacagagcgcagcacctggtggaacttcagcagctggtggaacttccgcggtgggacagcagccagccgacgcctccaagaaatcattggctccagcggggaccgcatcggccggtgagaggagagggacgggcgggcggggaagcgtttttggttcactctaatactttcattcccatttttagcagttccttcgacgtacgcggcgcccggcacggggacgactttgagcaccgcatcgcagaagtcagcagcgcctgctggaggagcctcggcactgagcaccgcgtcgcagaagtcagccgctggaggagccatgtcgcagaagtcagcagcgcctgctggaggagcctcggcactgagcaccgcgtcgcagaagtcagccgccg

SEQ ID NO: 77001 - DNA, 250 bp, Heterodera glycines
aaaattccctcaaaaataaaaggtctattgcgcaccgccctccctatcatgctcgagagcatttgtatgtgtataaaatttatcaaaaaaagagatagccatttttctgggataacctctaaatataaaaatcctctgtgaaataaaatggcgattgtgcaccgccctccgtctcatacgcaagcgcttttgtgaggcataaaatttctccaaaaaagagatagccatttttctgggatagagtataaat

SEQ ID NO: 77002 - DNA, 233 bp, Heterodera glycines
atgaaggggttatcgaataatatgaagaattaaaatttaattgcttttgaacaattttttgttgaaaattttcagaccggaaggatcggaactccctcgggaattttacgggattggtgatcccactctgggaaaatttcggattcccgatcccgcttcctacaattttctcaccatatgcgggagtaaaatatactggtaagaattcgatttttcggcaaaatattaataaa

SEQ ID NO: 77003 - DNA, 2060 bp, Heterodera glycines
atgttttactcaattgctattccattaattcaaataatttttgtaaatttatgctttggcaacgacgaaagcccaaatgatggccaaaaaactcaaataaatttattaaaagaagctggaaaaaagccgggaaatgagttgaatttgaatgaagaaggcaattcaaatggcaatcaatcagctgataatgaagaaaatgaattgatggtattaagcagacaaattcaaaacaaagtaaaagtttaaattggcaaaattattattattaaaatttttaactaactttagggcaaagaaaaggaaaaagattcacttgaaaaggagagtcatttaataacaaaaacgaaagagcaacaaaatatatttggtaaaatcattttaaataaaaaattttgaccaaaagcgatgctattatgctggccgcaaaaaatgtttaaatattcgttattttctaacaaatttttgtccaaaaataaaaaatattcgaggaatttagtatatttaaaaaaagagtatttttacgaataaattggcgccgctgaaaatttccaaaaaatataacaaattaaaaagaaaaaacccaatttttctctcatgcaaaatttaaaattgctaaccattgaactataaggaaaattatgatgaaacttaaacatttgaaatctctaagacttaaagattttgatttaaacactttattacagcttttagaaataattttcactcttgaactctgtttaatgacaattttcttttgcttttctttttcaaattaattttagaattgccaacggaactgaacgaatttgaacaagatttattaccattaccatgggcattcgacaacgatttgttgcttttaagtgaacaaatccaaaaacaaagtgaaatgctgcaattagcgaaaagtaatgaaaaagtacaaaaaacaccggcggtggaaaagcgacaggaaaatgggaaagcaaaggcggcatgggtggattacggtaggataatacaacaataaacggctttacaggttttagtacagtataccataagccttgtcggtttttgtcagattaagtcaaataatttacaaatgacaaccaaaaaataagtgaaggattgatgaattttttaaaattatcatctgatagagtcaatttctgctgcactattttacgtttttaaatgaattgcctcattaagaaacggttgcccaaaagcgatcacgcctttcccttgctcaaacttctggcacttctaagcccaattggccgaataaaattgcttcattggtagatatttttttggaaaaaagtaacaaacgatggcaaagcgtgaattgcaagtgtttaaaatgttatacgaagaatgcaatgcaaaacaaaaattgctgatccaaatgagcggatttggagtgggaaaaacactttttacttttttaaaatcaaaaaagcgaaaaattaaagtgactgtgactgcaatgggactgtaaaatgtaaataatgaaatgcaatgtgtaaaattttgcatgaatgaatggtatgtgtggaaaatagggagagatgacgacgacaaaagataaaacatcgatttcattggatgcgttgtaatttatttaatgcttttttaatgtgcatttttaagagaatgcgacgtattcattcatattcacatgaaaatcggggaattcgtggcaatgaaaagagagagaaagagagccacggtcttagctcctttatttaagttttcaccagtttcaaagtgtaattttaggctttgaatttaggcattaaataggcacaaaaataggcaaaaaaaattttaggtagcaaaatactagagaccggattttccaaaagtgccggaccggaccggtctgatattttcagaagcaaccgatttccgggcccggcctctcaaaaaccggtcaaaccggaaaaccggattttcaaattgccgggcccggaaccggtttggtaaaaatttaaattttcacatgtatttcacccaaaattgaccataaatcgtgccagatgtaaaatttcggatctatttcacttcaggcgtca

SEQ ID NO: 77004 - DNA, 1199 bp, Heterodera glycines
atgccggcgggaccggaaggggcggaggccagcgccaaaccgacaggacagagcgcagcacctggtggaacttcagcagctggtggaacttccgcggtgggacagcagccagccgacgcctccaagaaatcattggctccagcggggaccgcatcggccggtgagaggagagggacgggcgggcggggaagcgtttttggttcactctaatactttcattcccatttttagcagttccttcgacgtacgcggcgcccggcacggggacgactttgtgcaccgcatcgcagaagacggcaccggctggaggaacatcgacactgggcaccgcatcgcagaagacggcaccggctggaggaacatcgacactgggcaccgcatcgcagacaccggctggaggaacatcgacactgggcaccgcatcgcagaagacggcaccggctggaggaacatcgacactgggcaccgcatcgcagaagacggcaccggctggaggaacatcggcactgggcaccgcatcgcagaagaccgcagcggcaccggctggaggaacatcggcactgggcaccgcatcgcagaagtcggcagcagcaccggctggaggaacatcggcactgggcaccgcatcgcagaagaccgcagcggcaccagctggaggaacatcggcactgggcaccgcatcgcagaagtcggccgccggaggaaccaccctgaagtcggcaccggttggaggagcgtcggcactgggcactgcatcgcagaagtcggcagctggaggagccgcgtcgcagaaggcctgaacaaccaccggacagcacaagaacaagatgctctacaacccgcttcaatgatgttcatcgacagtgatcagaaatgattttaaatgatcccatattgttcccccatatgtgcctaatgtgctctattgtctgtgatcacttgtcattgtaaaaccgttgtgtgatcattatttgtgtatatgtatatatatatattgtatgtatgtataattggctaatcaccggatatcgataaacgtgataattcaagtgtaaatttctaaaaattaatttttgaaaaaacatctaactttgccaattttggactttttgtgcttaatgcctatttttatgcctatttcgccttttttgcgcctttttctgaattttcggaaaaatccttaagaaaaatgcaataaa

SEQ ID NO: 77005 - DNA, 595 bp, Heterodera glycines
atgaatcccttttaacacaatatcaaaatgacaattctttgcttcaatttgttgaggaagaaattcgaaaagaattttttggagcagaaattgagggatttgcagaagatttgcaagaaataaaattcataggaaatgaaatgaaagaaaaaataatggtaaaatttatttattttattaatttaatttaatttttaaatttagttgtcatatttgaaaaagaataaatttacagaaaacaatgacaattttaataaagcactgaacgaattgcaacaaataattgaagaatgggtaaggcacaagaaaaaatgttttcaaaaaaagttaatttatttattattctaaattaaaaataaaaaaatattaataataattaactaaaaaataaaatgccgtaaaatatttgcagtcagatgaagctcgacttcaagtaacgggcgcgctcatgataaaatatgaaaatgaaagcttcagcccaatttgccttttgcctggcgaatttaatcgggcaaaaatttttggcaatttaatttgtgactttaaaaagagaacattgtgccaagatgaatcactttattgcattttttgtaag

SEQ ID NO: 77006 - DNA, 2337 bp, Heterodera glycines
atgtttcattggtgcaaaagtttgagagagatccgcttttatctgtgccaacactgaaaataaatttaatgagtgtgcaaattaacatacaatttgttgccgtgccaaatttaaaacatttgccaattggaaatttcaatggcacacaatttagaagaatttcaaaaatatttgttgaaaatataaaaaatttattgaaaaatgataattttgatgagtgtcaacataattttgagctaaaaaagctaaacgaagaaaagtataaactgacgaaacaattgtcgaaagcatgtaatattttaaattttaaatcatttcaaacaaaaaaataataataatttatattttaagcggaagaaaaagcggacgaaattagggaaaaaattaaaaacacaaaaaaattagaagatttgttgacaaaattctgccaaaatgctttaaaggaccgagaaaaagtgaacgaaatgaaaacaatgcttgcaattttaatgggtaattaatagggctgacaattttatgtaaatacatattttttcctggcttctccatgctctaaatagtaggaaaaacactttttttgtttgtgttttcgaataaaagttgggacttttatttacatatttttacataatttagaggtttttatatatttttttttgttattttggactttttagcattttttctaatttttttttgagaatttttgaaatttataaaatttcttgatttaaatttttttgaaagtgtacccctaaaaaaccgggttttttcttaaaaggagataccaaaaattaattttaaatatacaaaaatgtgcttctaagactatataagttatttttatggtattttgtagagcccggaattttgaaagtaccgggaccgggcccgggaccgggcttagccatttgaccgggaccgggccgcccgttcaaaaaaagcccgttttaccgggcgtcccgggcccggtccaaaattttgaccgggcgcccgtacgggaccgggcttttttcaaaatttttggaattttgaattaaagacatttcgccaaaaataattattaaattttcaaattttgagcagtttcgctggtgaaatttaagcccgttttagcccggtcaaattgaccgggtccgggaacgggaccgggcttagccatttgaccgggaccgggccgcccggtaaaagcccgccgggcccccgggcccgtccgggctctagtattttgtgcctttcaccatttacgaagaattttttccaaaattagaatttggaaatgacattaaagtgttggaaaacatttggccatcaaatgaagaaatttataaagaaaaagttgtcgaaattaaaaaaagaagcgatttgaaagtgtttgtccaatcattggcttatttggaaaagtgggcaatcggtagggatttattatattttatgttttaaaataaatatttaaatttgcttttatttagacaactatattttcaattccgaattgggctatttggactcgaacattctgaaaataatgctatcaaaaataattgcaatttatccgaactcatcggcaccttttataatccacaaattctttttgactttctcactttggtatgtgaataggtgcagattgtgagccgttataaaagccatcaaatgaaaattatcaaaaaaaaaaactttaactataaaaacctggtccctggagtacttttggccataactttgttcaaacttgacgaaattcctttgaattttccaggttaatagagaattgttagggttatcggatgatattaagaattaaaaatttccgttgggcttgagcaaagttatagtcagttttttgttgagaattttcatttgatggttttttatagaacgatatagcaccagcgaaaacggaataaatttaaaactaaaattaatttatgcagcaacaataaaatattctttataaatattttatatattataaataatttttaaatttaattatgtttttttccaaattttaggcattggcctttgcccgtacagctcgaacagctcacttatgagcaaagtggcgaactgctgctgatgtggtcaccggggagagaatgggtgctcaaaaagcaaaatgtgaagtcgaaaagtctgagaaaacggcaccagcgaattctgacaatgccaatcattgggccaatgtttccgcaacaaaatttgggccacaaaatcaattcattgactgcaaaagtcattcagcgcaaaatgcaggaaggttaaatttgcattgtctgaaaaatttgtaaataatcattagaaggattacaataattacagtaaatttgatta

SEQ ID NO: 77007 - DNA, 1675 bp, Heterodera glycines
atggaccgtgtcaaccctctgaatgttgtcctacccgatgccctgcttatgaaggatggcgaaaacacattgttgtatgacagccgagtgcgtcgccaaggagaatcggatgtggtcttggtctttgcacacccacagttaagttcattaatttctatgttcaatttttcgcttttattttcagctgttggacgttttgaagcgggcgaggaaaatttcggttgatggaacattcaaagtggcaccagccgcatggacgcagtgtttcgtgatcggcgcttttgtcaaccggcggctcgcattatgtgtgcatgctttgttgcctggaaagcaacgaaaatactacgaagaggcactcaatgcggtcaaagcggtgattgcacccaacaccccagcacatagtaagtgatcatttcttctaactttatttcatcccaaaatttaagtcatcagtgactttgaaacagcaacgattcgggccatgcgagaaacgtttccggcggcccaattgacgggatgtctattccacatgagccaggcagttttcagaaaatggcgtgaaatgggcttggcggaattgtatgccaacgacgaagaacaaggagaagtcgcgcggaacagtttcaggtgagtgttggagtgagtgaaaaaggcaaaaaaaagttcactcctaggaagctgcttgctctagcattgatccccggacaacatgttcgtcgtggttttgccgtcatagtaaaccatgcacccgaaggtttggctgcatttttcggttacttcgcgagggtatatgttggactgaccgcacacgaacaagaagccggcgccgtggcgtttgttccgggcactgatcaaagccgacgcagttcaatcagcaccaatgccactgaggatgccgaatacagtcgccggaattcatttggtagtggtgagtatttttgttttttgaattcgttcttattttctttattttagtgaatttggaccatgtttatggtaacaatttcatccaatttggcatcccttcacctgttccatcaacgccaacaacccaatcgtcaacaattgtttccgtcgtgccgcgctgggagctgccaattgtgcgtccaccactgtaccctgtgcacttctggaatgtccacgaccgtgcgaagtcagcagtggagaaaacgaacaatgctatggaggcatcacacctccaattttcggttgtgcgatttttagtgcgagtttaatttggtttttaaaacttaagcgtggtctagtccatcacccatctttgtcagactttctagcagctattctggatgatgttgacaagcaggtggacatcgcaagatctgcccgagtgttcccgcacaaacgccgcatcaaatacattttgaaggagcaattgatcggagatgcattggacgaggcggagtacaacaccgacgaagacgtcatgaacatcctttcactgctgagtctgcagatgcaaggatatgtgggtggcctgcgtgcacgaggggctcaacacgaacatgaggaccgtgaatgattgatcgctttataccattggcaaaaacccttgtcttattccgcacaagtgattggatttttaaacctcaatttccgtgattttcaacattttcatttgatttgaactattatttttgatgtttattataataaa

SEQ ID NO: 77008 - DNA, 953 bp, Heterodera glycines
atggacggaacggaggcacgcagcattttggagttggaccgaatggcacgaccgctggatctccaaaagtgccacccggtcggaatgtcgcgcttcatcctcggcatggactcaaacgcaattttggcccgaatttacgacggcgaagtgaatccggaggtgaattaatgcaaaaaagagaaaacaaaatgaacacagcttcaatcacttaaattcaaaaagaataatagtcatagttttaagccgtcagtcaaaatgatcggctgtggtcagtgagtggctctgttcagagtgatgagcagcgagtatttgatcagattgactagcaagaatattaattagagtgaccaacattgattatttgatcagagtgatcaacaataaatattgatcatgattagcagtaagctttatgatcccaatgatcagtacttagtattttgatcagagtaattggcagtgactgatcaatgtaaccaaaagcgagtgttttgacccgagtaatcagcagagtgattaatatcagtgtggtcagcagtgagtgactctgatcagagtaatgagctgagtcaatgtgatcagcagtgagttgataaatgatcagcaattttattagtaattagtgccggatgatcgttcataattgtctttctctttagagcaactacaaatcggtgctgatttctcggcgaacgtgctgtgccgaagtgctccaaatgctgtgccaaatgagtcgtccgtcgtttgtctccgccgactgccgccttcggcccgcgcgtgacgccccctcaaaagcgcagtactgccagcagcttggcctggatgccatctccgaactgcgactgttcgtggacagtcctcgcggcgccgagtcggcactgatccccgcgaaatgcccattggccggggtatacacggcactgatgccggggcaacgaattgcactccgccga

SEQ ID NO: 77009 - DNA, 836 bp, Heterodera glycines
atgaaaaaaaaaatcaacaaaaaggaagaagaacggcgaaagcggtaccgaccaggggagaagtaatttgtttttcttttttatttatggtaaattaaataatgtttgggtttcatgtaccttaactttttttttcctaaaccacaaatggagagctcttttcatttggattgacaaaaatcacaaatagccaaaatcatcggccctttagacatttttaaaaaataaaaaagaaataacaatcaaaatgacttggcttattttttaaatttaaatctttaaaaaaaatgagaggacaaacacgacatcaatcaaacttaatcttttagggcacttaaagagattcggaggtaccaaaaatccacagacaatttgatgccccggcagccgttccgtcgcttgatccgggaagtgataagcgaaataacatggaactctcaccggttggagacccaagcggccactgctcttcaggaggtgggttatttattggtcaatttacaagacatcctttttggtctttagaacccgaacatgaatttaacaaaaattttcgcattttttcgtctaaaaatagcttaaatgaaactattaccgaagtttcttgaatttacaggccgctgaaacttttctcacaaccttttttgaagccgctaacagatgtgccgtacacgcaaatcgagtcactattatgccgtccgattttgtccttattcgctggatccttcacacttttggcaataatattgtttgactaaaaactcacatttcttttttcattccatttgctgtataaaattgcgactttttgagcctattttttctatttgaataaa

SEQ ID NO: 77010 - DNA, 1393 bp, Heterodera glycines
atgaaaatgctgccaaaggagcagaagcaaacgccccaaacggacaccagcagtgccaaactattccttctccatttgttcacaattagcacaattattttacacattttgccaacaacggaatgccgtccatcttttgccaaagaaaatggcgacgacgacggacaaaatgccattctgatcaacgacgaaacgacaaaaacatcagcggcacttccgacagactttgagaaggtaaggaaaagtgtacaagtcagggtggacagagctttttatatttcataagttgtctttcttttctatatgccaagtttgccaaacccaataaatatttttggcatttggccaattcgactagcgaattcggtcttttgtctctcattaatattttttaaatttgaccagtccatccgtccgaccgtcgtttttggcattttgccaaatcccagcggctatttgttttctgtttccccctgaatattttggccctttggtattatactcaagcatctttcagttgttccaacttgacgcagacggtacaacagaacagcggcaaagtccgcagcacgtccaccaccaccggcaccaccaccgtcgtcatcgttctcactacgaccattttgtgctcggacattcggcccaacgacgtcggcatcaccggcgcagtttgaaaaacgccgacggtgtcatcgacggagcgaccgcgcatgaaaaacgcgtgcccaccggcgccgtccgcaaattgaccagcggcggcacaagcggccgaaagcaccgccgcagcggcggtggcagtcgattaatgctgaccaagccgtattggccttggccctgaaagcgatgaacgaggaatggcatggccattaggctagaatggtgccagaaatgatctcagcaattagccttccggttaatttttcatttcgtttcactattttttgacaattacttttcctctcaaaatgctttttgttttcccagcaaattctcacccattaaaaataatgatctgcaatatcgaacatatcattttcattgtgtaaataaaacagcgtttattaaacgtgagaatgaatcggtctcaactttttgaaacaaaatttaaaagtgaatatcgtcataattggggccaaaatcaaaacatttggcatttttaaaaggctctctgaaaaaatcggagttaagtaaagtttaaattttgctttaagaataaatgggacaataaaaagaaaagaacaaagaaaactattgaaataaaaacatgggatttttgataaattatccgtctcaactcggccatcacaaaagtcaaattaaaaattttaaaaaggcaagaaataacatataatatttaaagacacaaatcattcgtcaaaatgttcctgcttaa

SEQ ID NO: 77011 - DNA, 375 bp, Heterodera glycines
atgaagcgtgttatggctgatcaaaataaaaaatacaaaaaaggcatttaccagtgtaagtgcatatactttgtttttgcgtgtgttggcgttttgttttacgccaattattttttggcaatttttttcgttttttaccgtccatggaattaaagtagagtgattatgatttaatgcaccaaaaacgacgttatatatttcatgactatcgccagacaaattttaccattcaaatccggaagagaatttacaattccgtcgattgggttggccggcggcagcgaattggtcgaaatttgaacgtgggattcgtgatgatgggcatggttatggttacggccatccatctgacagaaaatcaaaaaaataaataaa

SEQ ID NO: 77012 - DNA, 782 bp, Heterodera glycines
atgggactcaacccaccaacattccaatcaacaggactcaaccctccagcattcaatcactgggactcaacccaccaacattccaatcaacaggactcaatccaccatcatttaatcaatgggactcaacccaccaacattccaatcaacgggattcaatccaccagcatttcaatcagtgggactcaattcttctgcatttcaatcactgggactctattctcctgcattcttggcattttcatcatctcttcttgtttcttgtggcatttccttatggcacaacattcttggcattttcatcatctccttgttttttggcatttccttatggcacaacatgacacaaattagtgtctcacacgaaagtcacagaacaaaccactaatgtttttcaaaagcatgacacacattagtgtctcacacgaaagtcacagaacaaaccactaatgtttttcaaaagcatgacacacattagtgtctcacacgaaagtcacagaacaaaccactaatgtttttcaaaagcatgacacacattagtgtctcacactaaagtcacagaacaaaccactaatgtttttcaaaagcatgacacacattagtgtctcacactaaagtcacagaacaaaccactaatgcttttcaaaagcatgacacacattagtgtctcacactaaagtcacagaacaaaccaaagatatgcatttatatttcattaaagttcaaataacattaagcataagcataattatttcacgtaaagaacacaaaaacaaaataaa

SEQ ID NO: 77013 - DNA, 658 bp, Heterodera glycines
atgatgatttggatcattgtcgtagtgggaatcatcgctttagctttgctcagctgcgtcttgagccgagcttgtcaccgctcttcgaccagttcggcttcggctggtgccaatgacatcgaaatggcgccaacttcaagtgccagcacgagcaacagattgccaggctttaactacagtagtgatgtgaggagtgttcaccactatttaccacgagttcatgatcggcggtgagaaagatcgctggaaaaagaacacaagcagcaggaagagcaattccaaattctgtctttaccatatcgctacagtaaccaactggggctcctctctttttcttctttacaaaattattaaaaaaatcatttaaatattcttttaaatcgtaaaatgtagcattttatgtatcttcattttagtattctcatttttcctttaaattgtgagaataaattctttcttattttatttgttatttctttttgtaaaatattctaacggtaatacaataattagagttcaaaattttgaaaaaagcgtgtgcctggaccagggttccttgttggatcttgatctgcatttccaggacaaaaatcaggaaaattcaggcccaggaaaaaccaggcttgtcgagacttgcatttttgaaatttaaaataaa

SEQ ID NO: 77014 - DNA, 511 bp, Heterodera glycines
atgttgctggcaattgtcttttttgtgtgttccattgcttttccccaaccaattttttccgtgataaaatcaaagccccaaaatttggtattgatcgaccgccaaatttatgagcaaaaattggcagaaaatgatggcactggggaattgcgcgagtttatccaaaaattggaggaccaaaacgaaacgatggccaaagtgatagaaaaatgtgaagcaatcgaagaacgggaagacgcgaaattggcccaaatttacttaagtttaagaacaaaactcggagaaataaaaggaggagaaggtaattgggtaattaaattaattaaggatgatttaaatgggcaattaaattaattaccgaggtaaataagtaattaatgagaagaatggtaattgggtaattaatttaaaaatttaattataattaaagtattagaatctgtgtgtgatgaagcagcagttgagagactaagaaaaaatgcggtcgaagcagtgtttctgttagccaaac

SEQ ID NO: 77015 - DNA, 247 bp, Heterodera glycines
atgcacagtgtatttgcgaaacttggatggacaagtaaccgaaaagctgctggaggaactcttcgtccaggtgctcatcgttctattgcacttaaggcattaattgcatacaaaaaggtccttggtttcaattagcaacctgtgctataaaagtgcctaattatttaaataatttgtcccatatgaatattaagattataggtgctgacgtaatagataaaaaatctgtttgtaattgcttattaaa

SEQ ID NO: 77016 - DNA, 611 bp, Heterodera glycines
atggagctccatcaacagggagaacccggcacggaaaaaggaacggaaaagttggagcaagccaaactcacttttagtccaccgcccgctgctgcgaatgaagaagcattgtcgatcagtgaaagtgatgcaaacgacgaaaaggaggacaaaagcaatagaaaagaggcaaaaagtaaaagtgaaaaagtggaggaaaaagcgaatgaaagcaatgggaaaacggagaatggaacgacggaggaagaaattgggcaaaatgtggcagaaaaggcagagcagcagagagaagaagcgaagggccgcacaattgcagcgattcgaaaaggagggaatggcgcgcgatctctcccaccgatcattgacgtcggtggcatagcagcggaggaagcaaacgaagaggaggaacagaaaaaagagacagatgagaaagggaagacagagctgacatggtgggacaaaattgtgcttggattgaggtgtgcacgccacgactgccgaggtgagaaaatttgaatttgcgtaagaattttggtgtttttttggaaatagaacgacagtttcagaaacattaattgtgaagaatgaacagcttccgaggatgatcaacg

SEQ ID NO: 77017 - DNA, 405 bp, Heterodera glycines
atgctcaataaattttatctcgatcggctcatcgaaaatggtcaaacaggtaagaaaaacatattttgaaacttctataacgtttttccatgtggatcatatttcagcatatttcgagaatttatatgcatattttatgtgtataatttttaatataaaacgcccatttgagtaccatgtgccaacgccatgcgtatgtgccggcgatgatcagtgagtgcatcgctgatacgcactgacggcacccccacaaagtgtccaagccacgaaatgtccaaaagagtaaaaacccacgaaatgtccaaaatttttcaaaatttataaaaacaaaatgagtaatttaggatttttattcgagacttggacatttcgtgggctggacattttgtgggtcagcggcactga

SEQ ID NO: 77018 - DNA, 1282 bp, Heterodera glycines
atgtccaaaaagttggaggccaaaaagtattccttgaccctttcaaagtcaacgtcgaagaattggcgttcccaatcggtgaatttgaaccaaatgcgcttaaagtggcctcttttcacagtttgctttgaagagcactcacttcctgcgtcaccgggtcctccttgacaattggctcggcaaggtctgaaaaggagccgaatttttgtgtcaccaaaatttcagaaactcagttggcccccgacgatgtacaaacaggagacgggacataatttagcagccgaaatttcgcagagacaaaattaaaaaaaaaaaaatttttcagcgattttccatgaaatatatggtgattagtaaattgtttcgaaaatttttccaaaagtcgataaaaaaaaaatttacaaacattttccccttggaattttcatataaaaaattttaatatttttttcttgaaaattttttaaaaaatttcttcggcgaaatttgggcagcgaaattttttgcatccgtaaaaacactaacattcactaatatttacttatcctatggaggtggaatagtgtgctcgactgtttatttacccgttgggaaattaaaggattatgaatttatcaattttagagggggtaaaacgattctggtaattattatgtttaattgtaagtgccaacggactgtgatgttcgcgcatccaagcaagaatctgttgaaaacagtcgctggtgatgtcattgagcggaaaaacgaagtccgcaaaattctcttccgttttttcttccatgccgagactttccctaaattgaaatacgaattggtcattaacttttatattgtttttttaattgggcccattccatcaaataaagccgcctgaaaatgatcatagactcgacgaccatgcaaaattcggttggggtcgttttagtctgaacacatgttttttgggtataacctttttctttgccaaccaaatcaaaacatttttggtatcactcgatagccctaaatgtcttctattagcctgcaaaattgctaaacatttcgttttgtttaaaaaaaaagttatgaccaaaaatgttaagaaaaccatgttttttgaaattttctggccataacttttttaaagcataaagaaattttcaaaaatttgcaggctaatagaggacatttagggctatcgaatgataccaacaatgttgaaattggttggcaaataaaaaagttatagccaaaaaacaaagggataataatcaaatattgccagatttcgtcaattaaa

SEQ ID NO: 77019 - DNA, 804 bp, Heterodera glycines
atggaagaaaaaacggaagagaattttgcggacttcgtttttccgctcaatgacatcaccagcgactgttttcaacagattcttgcttggatgcgcgaacatcacagtccgttggcacttacaattaaacataataattaccagaatcgttttaccccctctaaaattgataaattcataatcctttaatttcccaacgggtaaataaacagtcgagcacactattccacctccataggataagtaaatattagtgaatgttagtgtttttacggatgcaaaaaatttcgctgcccaaatttcgccgaagaaattttttaaaaaattttcaagaaaaaaatattaaaattttttatatgaaaattccaaggggaaaatgtttgtaaattttttttttatcgacttttggaaaaattttcgaaacaatttactaatcaccatatatttcatggaaaatcgctgaaaaatttttttttttttaattttgtctctgcgaaatttcggctgctaaattatgtcccgtctcctgtttgtacatcgtcgggggccaactgagtttctgaaattttggtgacacaaaaattcggctccttttcagaccttgccgagccaattgtcaaggaggacccggtgacgcaggaagtgagtgctcttcaaagcaaactgtgaaaagaggccactttaagcgcatttggttcaaattcaccgattgggaacgccaattcttcgacgttgactttgaaagggtcaaggaatactttttggcctccaactttttggacattcgttcattgtacctctact

SEQ ID NO: 77020 - DNA, 1242 bp, Heterodera glycines
atggcattttcgtgggagaaaatgcaaaaaagttagacgaaatttgaatttttttaaccatttgccaaatttttattaaataaagaagatttgctcaatttggaggtgctgtaacatttcgacagtggctgatttcgacagtgacagatttcgacagtgactgatttcgacagtgacagatttcgacagtggatttcgacaatggctgatttcgacagtgacagatttcgacagtggatttcgacaatggctgatttcgacagtgacagatttcgacagagaattaaattattattttattattattatgtattcacatgaaccatccggaatccacggtttgcccgaagcaaactgcctcagggtcaaactgacccaaaaagtcatttttatttaaaaaatcactatgcttaatgaaaattgatatatgtgtgtagtaaaaataacgcatctttctcttattttcaatgtggtaaaattcagtggtactttggccgttggatagtgataaggccggtcgttcagtttatctcgggtggtcaattttcttgggaggtcattttgataagagaatttggagaggaattgttttggcattcccgaatgctgatggtcattctcgagttgtaattgctggtgttcatcatttgctgtttttccctctattccttttccaaattcattggctcatggctcttctccgattcgcagaaactaaaacaaatcgcgggaaaattcttctatctcgtggtggatatgagtacacttttgaggttaaaaagctaatttaatttggtgaaaatgttaaacggcaagttctaaaggcggtttcaaaaactgaagacggaatggagtattggcgttgccctaaccgtccaccttattgcccagggcgtgcttgtgtacaatgccgcagggaagtcgatgacgatgggtcgcaatataaaattggacgaattaccgggcagcataatcatccacccgttttgggtggtcatatggtagaaatttaaaatgtaaagtgcgttaagtagctaattaggtgagagaagcatctgaacgtctccgacaagaggcgaaaagcgaatttccgacaacaagccgtaacatcatcagagaagttcggtcgaaccttagtgatgaggttcgggcaatcagtgcaccatctgcagccgacatgaggcgaacatataattatcagaaacggaagcatcaggaagaggcaaaatgataatttaaaaa

SEQ ID NO: 77021 - DNA, 179 bp, Heterodera glycines
atgactatgcattttctcggaccgggtcagtttagtacgtgccaggaaatttcgacagtggctgatttcgacagtgaccgatttcgacagtggatttcgacagtggctgatttcgacagtgaccgatttcgacagtggatttcgacaatggctgatttcgacagtgaccgatttcgaca

SEQ ID NO: 77022 - DNA, 938 bp, Heterodera glycines
atgaaggaaagatggccccataacaacagtcatccctccagtgttggatgtggtctagtggctaagacaacggatccacgtaaggggccacgagcggcggttcaaatccggccttacaccccaatttttcgcctaaataatagttaccatcgctgaaaactttaagcattccttttaacaaatttattgatgaatgcatgatccctggttttttgtcggagttgaatcgaattggtcattttatgaaaataaaacggaaactcaagtccacaatttgcgagaaagcctatggaagtatataaaaataaataaaacaaagaattttcaataattaactaatatttttaaaaattatttctcagtgacgaaatgatcggccaccgttttaattgggatttaaaaatttataaatttgataccacaaatggttgaaatagcgaagacgaattcggacaatattacaattttagcactgtccggcacagaattagggtcaggtgactaaaaataaaacattttaccggaaaatggattgttctgttttaaactcaatttaatttaaaaattacagcgaaaatgaaaaactaaattatataaaatttcaataattttttatgcatatttagctaaatacaacatcaaaataaatttaggcttcaatgcctttgttcatttatgtgtcagttttatttctgatagcacttcaaaggcaatgccagtcaatggcactggatcaatcattacaatgtttgtgccctctgcattgaacccaattttctcaatttgcatgataaaaagctatcgaagtgcttttgcaaaggaagcgctgaaaattggtaaatttcaggaaatatcgtatttccttcattataagcctcctctcgattagaagccaccctcccctcgaatataagcaccttcttgagggaggttgaaca

SEQ ID NO: 77023 - DNA, 1396 bp, Heterodera glycines
atgcagtcattgtcgaaacgcaattccaaacagcgaaagttcataacgattttcacccagatttggttcttttttcaaccatatgcatttgtcactaaatacttctgcctattattgccgaaaacaccattattagtgatgggtgggacaggatatggtggaataaataacatgcagcagcagtacaaccatcgttttgtaaatcaccaattatacttcgtagacccagcttactctcaaatacacacccagggaattgaagcgacctgaagggctctaaatcaaagcttaaaacaaacaccttcataggactaaccctgaattgttgcgaacctatttgtaccagaacgcatttcgtggttaccacataagcataaaaatattttagagaaaatacgtacaactatactgtttaaaatattttttcctattttttaatgtttatttgaaataaaccaatttggatgggaaaattgggtgggacgcgtaaaatgtcaggggacgcgtaaaatgtcatgggacgcgtaaaatgtcatgggacgcgtaaagtatcatgggaccgtaaaaccgactagaaccggctttttttgcttcacttataatacccatttattttttatttctgatatcgtttcttatttcagttttttaattcgttttttaattacataattcttgaatttatttccatgaggcaaattctgtatcaaaaaaaaaaaaaaaattgaccaaaaaaagtgaaaaagttttcaaaatcgaccacttttacagtagcgccaacattttcattgtaaaaataatcagattcttttgcatttggtttaaattttaaaaatgaatttaaaggtttgacatcaatcgacagctcaaaatttttgaaacaaataagctattgctaagcgctgtaacaatttttaaatctttgccgccatatttaaaccgcgaaaatttttttatgaatttatctttttcacattttaattttcttcaattttttaataatctaagagcttgtttcgatattttgggttgattttctaattaaaaaatatataaattttcagttttcacaaatttccatttacccgggcagcacagtgattgtctgcaaaaatatgacggctgaacatagggtcaacatttgccaaacatggagcacaagcggcggatgctgctcaaaaagcagttggaccgaaaaactgacgggcccaatcattgaggacaaaagaattggccaaaaagtgcactgaattaaattttttgaaattattgaattaaatttaaaaaatattttttaattaaataattattatcagaaagttaatttcttttaattgaattttctaaaaaggttaattaaattctgtgcaatattttaaaattaaatggaaaaaga

SEQ ID NO: 77024 - DNA, 550 bp, Heterodera glycines
atgttcaacggaatgtggaccaattgttggccaattgtgcgtactgttgtccacaaaagcatgttggtcagcaataagcacacagcagttgccggttggagaacattgagcagagcggacagtaccgataaggtaattaaagcggagttaagatggggaataacctgtaaaaaataagcgaaattaaatttaaaaaacaaatgtaaataaaaaataatataaataagaaaagggatctattaatattaacctaatttaaaaaagggacccaactttaattagccaattaaatttaattaatatattaagaaaatagacttattaacacaacttaaaaaggagaaaaaattagccaattagtataatcacaaatggacttattaacgtaactaaaaagggacaaaaaattaattagccaattaaattaatgtaattaagaaaagggacgtaaaaatttgtttaaaaaattaatcttaaatgtaagcaacaaagaggtatataatagatttatttaattaaaaatttatcataaataatgtatttatatgta

SEQ ID NO: 77025 - DNA, 583 bp, Heterodera glycines
atgccgggggcacaaaatgacggaagggattatatgtttgccatttttaagcatgtttcctcgtccgccaaggtcgacattggcactgtgccatcgtcggaaaccacggcggcagtgtctgccaatggtacggtggccactaccggtgccaacggcacatcggcggacaatgcgacggcggaaagttgggtcggcaagggatgtgtgagttaacaaaacgctaattgattgatccgagtttcgcactttggcacagccaacagaagagtcgcttctccaattgtacattaatgcaattagggagataattaactaattgcctccttggcttgtgattagttattgattgccatttccgactgtaatcaattaattaattaatttcctgcccattttcagggcgcatttgacgtcgctgtgccgccattggtgcccattgtggcggccacttttggttagctttttccactaattagccgattataatgattattctaattgtaattaattttaaaggttgttttgcggcgcttcagcaacttttgctgctgtaagaagtgcgacttggggacgaaaaggagca

SEQ ID NO: 77026 - DNA, 2590 bp, Heterodera glycines
  unsure (1)..(2590): unsure at all n locations
atggccatttgcgcacacttttgggacacgtcggcccaaagtgcggagtgtgtcgggctcagtttgggccctgtcggttactccaacgacgacattgcggacgcggtcagggaaaggctggcggagatggaactgacgatggaacgcggaaaattcatacgattcactgtggacaagtcgagtagcttctccagctacaacgcgagaccatcatttttgtaaggcacagctcacaccaataagaaaaattcagtcggaaattgctttgtcactctttttaatcagcaacgatccctctgatcagccttccctttccttctgatcagcccttcctttcgctctgatcagccctttcccttccctctgatcagtccctcccttccctctgatcagtcctttccctctgatcagtccttcctatacctctttttgttcagcaatcctttcccattcgtcggtggcggttcatttgcctctgccatggctttgccattcgattggcaattggtcgactgttcgccggaagtgttggaagcgttttttaataacgacgccgaagaggacgacgccggcggagaagaggctgaaattggacttggcgaaggcatcgaagtgaccgtttgcgcagcacggcgattggagacggtgctgaggacagtgctggagagggaccagcaaatggtacagctgcgtaaggtaatgccgacactttgtctcactttggcttcattttccccaattccgcgcgcagcgtttgttccttctgttcggccaattcgccttctcccactccgcttgcaccgctctctctgcgcgcaatggcggcgtttcccttctctttcccgccaatgtccgttggcattcgcttgagcccgcttacgcgcgactgttcactctttgcgacacaattggcgccgtttgcgacgaattcaaaatcgaacgaatttgtgaaagggattggcgaactgtcgaaacggctttggaagtaaatgaaaaagcaattggcactcattcattcatcccatcccttcatcacagatatccgacacttttcacaaatttgtggccaaattggagcagcacggacagccgaccatttctctgctgtttcccggtctcaaccttttgctcagcacttttcaggtgattggtcacttctcattagacttttaaacattttgaaagtccgtttttcttcattttatcataagttcgtcaatttatctttcccccaccccccaattcagcaaaacttttccgcccaaatgccctcactaatcgatgtcttttctgatcaaattcgccgctctttctccgatgttttgagtttcgatcgcaattcgctgtttctttgcgcttcgatgttggacccaaaagtggcttatttgttggtgcaggaacagaagcaggagggcgtaagggcaattcggaaaatggtaagtcaaaaaagtaaaagcaaaaataataataataaataaaatggcatcgagcaacccatcaaaatcaaaacaatgccatcatcactcccctaaataatgccagttccatcttctaccgtggcagtgccgatgacttcccatgacaattattccatctttttccatggcagtgccatcgcccttttccgtgccattcctttccaacttttccaaaatccttttcgcttcttccaattttattcttttaccatttttccgtttaggtagaacataaaatctccgacccatcaacacttctccgcgttcgttcaaacatcgaaaggtttttggacgtcgtcgagtcgccctttggcttcggcactattcgccgggtgcgtgcgccgataattggcacggcaaaagagcaaaacgcaatgggcgaagaaagggatcaaattgacatggaaatcatggagtatttggacattgtacagttggattcgtccgaaagttgcgcacaattttggacaaagcatggacaagtgagaaaggaaagggaaagagagacgataaaggatggagagagaggagagaaatggggagagataaagaaagaagtgagagatgcagaaatggggagagtgaaaagaggagagctgaggaaagagggagaaagattaagggaagagaaagagagagtgaaaagaaaggggaagagagagggggagagaaatagggaagaggagaacgaaagagggtgagaaagagagaatggtgggaggaagtgagaaagggaaaaagaaagaaactgaaagtgaaggaaaagcttggaaaagcatcttttaaacattttgctggccttggtttttcattcgctttgcttccctttcagcgctttcctttgctctccgaaacggcaaagtccgttttggccgttccggcgaccgctgcgacggcgaagcgattgctaaggcaaatttgggaaggcgttgagagggacgcggaggtgggcgtgcggaaagcgcttctccgcttcaatcgccgcttcgtcgacctcgcggaatgaatccctatttgaagcacctccntccattgatatttttgactcattctctcccactttgtttttgttttttcttacaaaccattacaatccatttaaaattgctaga

SEQ ID NO: 77027 - DNA, 445 bp, Heterodera glycines
atgaacaatgcaaacagtggaggaccaccgcaaatgcgcgggggtggcattgcgcagcagcaacaaacggctggcaatcatccacagcagcaaatgctaggctgcgccggacagccacaggacccgaagacgcgcaagttgatccaacaacagttggtgctgctgctgcacgcacgcacgtgtcagcagatcgaacgggtcggtggttcaatttccatgggatttcatttttacaattggttattatttccccgtaaatctctttttttagtctgaaccgctacaaaaccgtgcgccctgcacattgccctactgctcggtgatgaagggcgttttggagcatatggtcggctgttcggccggccggcagtgtcagtacgcgcactgcgcctcctcccggcaaatcattgcgcattggaagaactgtaacaaggacgactgtccg

SEQ ID NO: 77028 - DNA, 662 bp, Heterodera glycines
atgaccagattggtgaataatttcaaaaaaggagcaaagtgccaaaaggtaattaatggtgccattgagtgacctaaaataataaaaataattaattaaaattatatttgactactttgtcttgatggtgacataaatgactgaaaaattaagggcaattcccaatgtggcgatgatacccaatatggcagcacagctgatcaatttccatttggagtttcatttgcgaattccaaaaagaacttaaattcatttaaaaatagtaattatataaattagtttgttaattaccgttaaattgtttatatcagacattatttcaacagttttagtaataacaaacaattaacagaaaattaatatttggttgggttacaacttttcttccctttatttccaaaattttctcaatgggcttggggcttcgttttccaatttggggtgtgatttaagagtgccaaagtgaagagtgggcgaatggcaccatactttataattttttgttttgttttgtttaaagtgttgtgaacaattgagcccatgacaactatggcgtgataaactcataaacttgttgaattgttcacacgaaatattttcagacattttctcgttatatgttgaaccggattttagaattttggtcgagttcgtgttaggga

SEQ ID NO: 77029 - DNA, 947 bp, Heterodera glycines
atggcaattaaaattttattttcttttgtgatatttttcattttgtctgaacaaatttgtggcgtaaatccgcgtcagtcaaaaggaaaaagcaaatccttgaataaagttgaccaaacagaagaagaaggtaatgttattcggcatttaaaaaatttttaaaatttaatatttcactcatggataaaaaaaaatctaataatgctaaatatttttgaaaaaaatgaaattcatccgggatttagaggttgctgatcacacgaatctgacatctaattcgaggtcatggaccccaaaaaacccagggaataaattttcatgactatatattaaaaaattttgcaaaccaaaagggtcccccttattgtttttaatttttgataaaattcaaaaatggtgactttgcatatagcgcctaaaaatattataatgtattcctcagatcaaagcaatgtgcctgatgactgtatgaaatgcccgatttgtattgagaatgtaaactatgatcagctctgtttctgtgatcagataatggcggaaagaatttttggaagcaattcaaataatcaacaaaaaggcacgacaaataaaattattaattcaattttaaatataaatttaaagagtcccacgccttctgcattgaatgcctccggaaatacacagaagcggcacatgaagaaatgccattcgcacgcggtggtttaggactgaagtgtatggcactgaattgcggaaaccctctctcttggcgtttcgtctatctatttttaaatatattttgaataaaattaatttaatttaagaagaaataaagtaccggctcccggatcagctcaactcaattcaagcattggaaaatcattgtgcagaattctgtgtgttgtcagtggaaggtctatgcttggttaagtaagaaattttatttttaattaattatataatta

SEQ ID NO: 77030 - DNA, 208 bp, Heterodera glycines
attttctaaaaaaataggagttttgggggcgcggcggtgccgataggcgccgccgggaaaaaaaattggaaattttgatcatttataaacaggttttcactgaaaattagccaatttataggtaaaattttgaaaaattttatgggaatttaatccaattcttaggggtgtaaaagtcgcgtttcgcgccaaaaagcgaaatgcgaaa

SEQ ID NO: 77031 - DNA, 966 bp, Heterodera glycines
atgtgcaaatttgcccccggctcattttgtaaaaaagcactaatcaacaacaattttcttttttaccgcttattacacaaaacaaagcgtgcggatttttggagacgaattgttagtaaataaaataaatgatcaattaattaactgtcataaattaatccctattgataatttgatgtttgttcagaatgaagccgagcgagaagaacatgccttttacacgtatcaagagcgaaattaccatgcacttttaccaagaattccaacccaccggtgcctgggcacaatgttttgtcggctcgacccactggcttaccttgtgcacgaagcagatgatgaacaaatggccgaacggaccatgtacatttcgcttcgtgtcggaacagttgcgcaagtattatattattaatgtgtttggtgccgagggcctttaccgggccgcctgggcattggctctgtaaactctaaaaaaaaccgatgccacgatgtttagcgaaactgattttatcgggcggcctgggccaggcaaatttgtctaaatccgctcgagccggttaaccaaaaataatacctaatttaatacaaaattaccaacaattaatgattaatataagcatctaattttgccctgatctgtttgttacagagattggtcttacaaaatcactttcaaaaccaagaagaccaaatacaggaggcgttaaatctggtagcatttacttttatggaactcccagctcaggaaggagttgtaagaaatttaatttaatttacattttaatttaattaatcaaattatgtaaaattttttaatatttaaaatagttttgaatttattgtttggtttaaatacaaggtatgggaccttgctgaggtcaactttaatgaggatttaatggcttaattttggacgccgttgatgaattatttgcatgaaacccttgttgaggtgtgttttaaatataa

SEQ ID NO: 77032 - DNA, 706 bp, Heterodera glycines
ctttgctcaacgccatcaaaaatgggcagaacaattacacattggaggtggctaacaaagtttacgtgaaggacggcttcgaagtgctggacacgttcaaagcgcaaattgcggagcattacgggggacagttcgaggcggttgattttgcggacagtgtgggggcagcgaaggtggcggggcggaggagaaattgttggcatatgccaatttggaaattgtcgggaagaaaaagtgccatccacactaataattcaaccccaaactaaaattctaacattggctcggtgaaaaggatactctcgctttctttggcacttaaatcttgttcaaattttgctaaatgtgaatgggaataattaaattgtttttttttgctacattttgcatcctcatcagaaaatcaacacatttgtggaagaagcgacccacgagaagatccatgatctgatctcgtccgactctctgggcgaactgacgcggttccattcaaaataaacaatggataatttaaccgaatttgattatcagaaattaaattgataaataaatgtttccgaatttcttcagtttggtgctgatcaacgctgtctatttcaagggcaattgggcggacaaattcgactcgaaattcaccaaaaagagaacattttatgtggacgaaaagaacagcaaagaggtgaatgaatcacaaacatttatttaa

SEQ ID NO: 77033 - DNA, 4784 bp, Heterodera glycines
atggcatttattgacccaagaacaatgattttgagctctgatgcgagactggcaccatgctcagaataccgcaaacagctcatttttttgcgtggttctcttcatgaagttgatcaaattgatgctcaggtcaagcaggtgaatgccaatcgcattgacggtttcagcctaaatctatcattggcaccgacttatgctcgccattcttttcttcatcttgcccttgtgaatgtgtctgactttattggccagttttacgacgccaatttcgcaagagaaagtgaactcacattccaacttaaaagtgaggacacggttataacaaagactctgtctgaacaatgggagcaggtgagtgagtccattcgcagcaaaatgtttgggaattgggaacaaattggcaaaatcgtcctgtctataatgataattattgtttttacagactttttgatccggtttggattaatgattagagatgaatacgttggcagaggaacaacacgacgcatgacttttggtggaaataaaacgcagaaaattgtgaaatctccagcacacctcaacatgatgaatctgaatgcatctgtagaatttggtaacgaaattgagctcagtcccgttaagctcattgaacccgcccaaacccaggcatacaaatttgcaggaaaacgaaagagaccagtaaaaaggactcgcttcagttttcgggcgccaaaagtactcattggacttttagtaatttttcttcccaatgcttttgcaaatcccgatgtgaataatcaaatctcaattcaattcacttctccttcaatgatttatctgcttatcattccatttctgatttttatcactatttcagtactgcttcgctcaaaacggaattcagaccttccaatgctcccaaatctgaatgcaatttctccgcatcacgccgtggtgcagacattgattaactccacacccgtccgctgtttaatggacactggcgcaagtttgactgttgcaccacgatcaattgcggatgaactcaattgtcgaacattttcatctgatctggaggcaatgagtgcctcaggccatgtcattcgcctcaaggaatatgctcaggtgaatttgaacattgctgggtacacagtccgttcattaatttattttgtggatgattccgaatttactgtggcccgggattacagtgtaattgtcggttgggatgtctttgaaaaattgcccccaataaaattcgatcatttaaacgggaaattttttgttgggaacaacgaatccaaattgtgctatcgttcaattcttttactgaacgatttgcgcgtgtcggcagagaaaaacacactcattccggccgactcccaaatattggtcgatgcttcaatcgaatcatccccaaacccaaaaaattcattttgcattgatcgacctgacataagtcttattaagaagggactgtcagtcattaatagtgtctcgcctgcgggccagaaacaaattaaagtggcagtggtcaacccaaccatggaaccaaaatggatttggaaaggaacacatttggcatttgccaatgaattgttatgtgaccgaaatggacttttgaaggaaaatagcacaaaagaaattcttacgttaaattctgaacgaaagaaaatggaaattgacccaacatttgtagttgacttttctaaggcaatggttgaaggcaaagatttggaaaagctgaaggcattaattgaagaattttcagacgtttttagtaagtttaggtatgatcttgggcttttcacagctgctgaacatcacattacaaccacaactgaggaaccaatcgcatctgcgccaagacgaatgccgtacaaatacaaagaggaattgaagaagcacattaatcagcttttagaagccggagtcatggttgagtccgataccccatgggtaaccccaattgtcattgtgcaaaagaaggacggtggaattcgtccctgtttagactttcgcaaacttaacgaagttacagtgcccgacaagtaccctctcccacgccttgacagcatcatggaaagggtcggaaactgtcaattttacagctctctcgacttggccagtggctattttcaaattaaattgagtgaagagacgtcaaggaaatgtggcattataactgaagacaaagtgtaccaaatgattacgatgccatttgggctgaaaaatgcaactgcagcattttcaagggccatggctatcgttttgtctggattggaggatacttccttggcctacgttgatgatgtgcttattttcacgaaaagcccaaacttttcagaacacctgacggcggttaggaaagttttggagcgttttcggctttacaatctgaagcttagcccgaaaaagtgcatttttgcctcaaatgagatgaattttcttggatttgttttaacagctgaaggttttaagccaagcttaagtagaatcgaaattctcaaagaaatgcccgtgcctttaaatgttaaggaagtaaagagagtgctaggacaggcaggcttttacagacggcacattgagaactttgcaatggtcgtagagccattgctgaagcttacgaggcaaggcaataaattcgaatggggcagggaacagcaaaacgctttcgacaaaataaaagaattacttactcaagccccgagtctaatttttccagattacgacaaagcatttcacattttcactgatgcatcatcgactggacaaggaggagttttgatgcaaaaggatgacgtgactggcacattttctgccatttcctattgcagcagaaccctctctgctgctgagaggaaatggccggctgttcaaattgaaatgagtgctataatttatgctttaagagaatttagaacgttcattttcatgtcggacattgaacttcacacagatcacaaacccctagcgtttttgctgaagaaatccgaaaccaatcagcatttggcaaggtggctcattgaattgcaaaactatcaagttaagattgtccacgtggcaggaaaagccaacacattggctgatgcactttctcgtgccgctgaggacaagcccttgtcggaaatatacaatgtggatgaactcgaggacattatcgaatttccggtctgtctcgctttggcagcacattccagggtggtcgcgtacccatttttgcacactttgaccatccgacacgaggatggaaacacttacgaagttaatttgttggaagagcaggcaggagatcctgaagctgcagcctacattgcgtttgtcagagatggggaatttccagctgatttggatgagaaagaaaaagagttatttgctgtaggcactgccaattacaaattaatttcgggaattctttattttgaggacaaggtactccctccgaggatatatgtcccaatttcgttacgtggactcatttttgaatcatttcactcgtctcttttgggtggtggtcatttgaattacaggaaaacaattgccaagtgcaaaaaatatttttggcccaaaatgtactctgacgttttaacttgggtcaaattgtgtgtcacctgccaattgagacacaatccaacacccgcgtaccgggaagagatactcatggtgccagccaacacactttttgccaaagttgggctggacttggccggcccctttccagtcactcaaaaagggaataaacacatttatatatcgtttgttggttcaccaaatacgcgatttctgtcccggtccccgacacaaaagcacaaacaattgcccacacttttcttaccaattgttacttaaaatacgatggttgtgttgaattaatcaccgataatgcttctgcctttacttccgaatttttcagggaattttgctccatgctttacattgacaaaaagtatgcctgtccacattggagtcaaggcaatgcgtcaacttaacgcacctttcggacatttcacaatatcctggccaagtacatttcgaagactcagcctgaattcgatgaatttttggatgcggctaatttctgttataatacgtcagtccatgcttcaacgggtgagactccattttttctaatgttcggacgtgacccaattttttgtgttgatcagatcattgatccgaaagttcgtgatccgatagccatttcggatcgtaatgaatttaaacagaagctggtcgttgccataagacacgcgtggcacgctgcagctgatgaatatgcaaaagctcagcgaaaaatgaaggaacaatatgacagaaaggcaaggccacagcaaatcacaattggtgaccgagtgctgatcagaaactacgacggacgggtaggaacatccaaaaaatttcaattaccatggcgcagaatttttcgtgttatcaaaattgagggcatttatgttactgtgatcagttgcacttcgccaaattcaaacccaaaaagacttcacttaaatcaaattaaaaagtgtttcgaaattttgggccctccctgcactatgccaacacaaccagttgaagagaaaaagtgccttgaaaagacacaaaatgtggaagaagtcagttcggaaaggtccggaatccgaaatgaaatggaccccgaatcccgggaaggcgaaaatttagaggaaatccacgcccgagggccggaaacaagaccagaaattgaagcagatgaggagaaaaatgagcagaaaaaaatagatacggaaccaagaaagtatgaccttaggaaaaggacgagaacttga

SEQ ID NO: 77034 - DNA, 317 bp, Heterodera glycines
  unsure (1)..(317): unsure at all n locations
atggaacaacgcaatcaggaaataaagacaaagagaaacaagcaaaagctggaacatgaaggtgcactttatgttcttcaccaaatcagtgacgatggacttcggaagtattggcgctgcgagtttttcggacctaacaacaaatgcaaaggtgtatgcaaaaataaaatatagattattttttaaattcagggcgaattcacactgacattaatggtaatgtcctcanaataattggaagccacacatgcgacatgagtgccgcacaagtggagtgtcagcgacgcgtgaccccagctcaagcggcgtgcagttga

SEQ ID NO: 77035 - DNA, 1983 bp, Heterodera glycines
atggacaattacaccggaaggccgtggttcaatggtggtttgacagtgccacggttcgcaaaatatcgtgccgccgatgcgagaattcttcgactcttgcagagctacaatgccatcaacaataaccaggctcaccaaaatgatcacaattaccatgcccttatcaatgttaacccctataacatcatcaatttctccttggtatttctcggaattatgagatgcgcccgtaatattttcaatgttttgttatttttttgttgttaacacattgacaaatctgttatggtgttaattttaaagaatttttgagaaacaaatcagaattggatcaatgtaggacaaaaacagcttgccagactagaacgaccctctgactaaaccggccagactaaatcgaccctctgactaaaccggccagactaaatcgaccctctgactaaaccggccatactaaactgacccccaccgcaattccggcactttttcggcttgaaaaagggcaagcgcgcctctaattctatttttccaacccattttgaacggggggcggaagtttgggcaccgggaagtttgggcaccagaaatttgggcaccgggaagtttgggcactaaatttaggatttaaaaaataaaattatttttaattgtctataaattgcaaccatctaatttaaaagcatagtaaatttaatcaagttacgaatagaaagtttttttaacgaatattcactcgattaagcatgcttattttgctaaactgattaccattcattctataaaatgccttacatatatatgtattatttgtatcattacaaggctcagtatgttcaagatttaaaatttataaatttaaatagtattagacgggtctcttgtcatttcgggcccaactaagacggtattcagggtctaagtccataaccagtacatgtttaattctacgtttaaacaaccgtaagaattgactaaataataagaatgccaggtttccatataaaaactttttaattttcaagaacatagaaatttttgagcacaagggttgttaaatttactaaactttaatgatttatataacattttatatatttatattgttttatttttttgaaaggtgctgtaacatttcgacagtggctgatttcgacagtgaccgatttcgacagtgaactattttcatttattttactgttttccgacatttccgacagtggctgattacgacagtgaccgatttcgacaatgaacaaaattttaactttgccaattctaacatttgaaaacttcaaattgatatcgaaaataacgacaaaattgtgtaaaacgacaatgctaaaatcctataaatgtttaaaagtgcagatgataagcgcaagcgcgaagaaattggatcggatcacgattgaaaaaatcctgcacaagtgcttccaagttttggtcttgacgaatgtatttggcctttctcgtttcatgaggccctttaatgccgtcagccggtgcaagcatcgacttcccaacggcactgtacacaagcacgccctgggcaataaggtggacggtttgggcaacgccaatactccattccgtcttcagttttcgaaacagccttagaatttttcgtttaacattttcacgaaattaaattagccttttaacctcgaaagtgtagtcatatccgctacgagatagaagaattttcccacgatttgttttggtctctgcgaatcggagtagagccattggtcaatgaattcggaaaaaaacgaatagagggaacagcaaatgatgaacaccagcaatgacaagtcgagaatgaccatcagcattcgggaacaccaaaacaattcctctcaaaattctcttatcaaattgacctccaagaaaattgacctcccaatataaagtgaacgaccggcccttccactatcaacggcctacggccaaagtacagtacaactgagttttacctcattgaaa

SEQ ID NO: 77036 - DNA, 716 bp, Heterodera glycines
atgaattttcttaatagtgttaaatttttggattgcgaaaggtggtgaaaattttttaattttcccttaaatattttctattttttgttgtcaatgttttgtactgctctcctatttttacatttttatttcttcctcaggtggaagaagtgtccagctgggtcaattttgtcaccggatcagacacttacggccaccgttttgttgaagaggaggtgaacggcgcttcattgcttcgccttcagtttgagcagttgaaaaccgacctgaagctcaaactgggcccactcacaatgatttggagcagtttggaagaacttaaagaaaagcgatgagcaacagctgacagagtggaatttatggatcgatctctttgttgactatataattaatctgttgtccgttggctaatggtcacacaattctcctgtctttctatcacattaaaattggtgccaggaaatttcgacagtggctgatttcgacagtgaccgatttcgacagtggatttcgacagtggctgatttcgacagtgaccgatttcgacagtgaactattttcatttattttactgttttccgacatttccgacagtggctgattacgacagtgaccgatttcgacaatgaacaaaattatatttgtgtattagtcatttttatttaaaaaagtcactatttaatgggtgaaatttatatatgatgtagtaaaataaa

SEQ ID NO: 77037 - DNA, 293 bp, Heterodera glycines
atgagtaagtatttcatcctcatttgggttctcaatcgcatcaaagccttcagacaattaagaaaaagacttaattttcagcttcaaaccattatgaggagcttttgcaaaactttttcaccttgaacttcgtgttggacaattacgaatttaatattgccgcgaaggactatacgcccgagtatttttttaacaaaatatcaaagcaaatggggcgacgagttgacgaaatttgtcttactagtatgtttcctttatatttacaaaaagtaaatactgttataaactattaa

SEQ ID NO: 77038 - DNA, 123 bp, Heterodera glycines
tgggtcgcccctacaaggaattcctcgttcacggacaataattgcaatgtccgatcccaatcacggcaaattttcaccggtttaccaacccctttcggggaaagacaagcacgctgattttgc

SEQ ID NO: 77039 - DNA, 1126 bp, Heterodera glycines
agcccagtcgcctgttggactgtctgcactatgtgtgcgaagagtgtgtgcctgaacaatgcctgctgctggacaatttggagcccgacgaaatccgatgcccaaattgcagccaagtacgggcccatcattagtgttaaataggggaaagcagcgcgtggcaatcttgggaaatgccaccggctttaacgctcggagtgttgtggggcattgcaatatgtttctttttaaaagttagattattaattatgaattttttgggcaacccgcgcatctgttggggagcaaatcaaaatgtgtaggcaaaagatcttaatgaatggcttcaagctggtcatgacatgtacagttttttcggacaaaaagtgacagaaaagaattcaagcatttttttgcaaattataactggctcaaaaatattcatttgcttagactttttcctccgccctccgtctcgccccacctactggccgccgtagtcgagtgtgcggcggttttgtagcgtaatattattaaactttggtctacctatgatccaatgtcttataatgaaaaaagttaaaattaattgccaaattttacttttttcaaaaaaattgttttcagcatgaaataccaagttttatagcaaaaaaatgatgatatctattaattatgtgccattttagaaccattaaacgtgtttttcatttaccccttaaacggaagtcttacctaaaaaataattgtattatgtcaaaagtaaaaactgataaggaaataaatcactccgggctgtgctgtatttttcatacataatacatgtgtatgactcagttccttggcaaatcctgtacataatcgatcatttactctcttgtccaccgacctctactaccaccaattaattgattgtttctgttgctcactcactcaatgtttaacaattatccgttttaaggttgaaatgtcttcaatttcgggtcaatccactgaaagttcgcgtgtggaaatctgtatcaaacacgagaaatttacgcgtttttgtctgtcatgtgcgcgtctcctttgtgtgaattgcgagcagcagctgtccttgcccaccgcgcaagtcaacaatgtcactaacgttgttgctgttccgcaa

SEQ ID NO: 77040 - DNA, 1148 bp, Heterodera glycines
atggcaacggcatttgatagatatgtgagaaattggggagaagaaggtcaaatgcatgcggaaaacgccgcttcaccaggtcaaaacattttttataaattctaaaaataccattttatcctttaagtgaagcccgagtttcaactttcggttggtaacggttatcggcaaattcggttgagctcagcaatggaagtaatcaaattgttattcctggaaatgtttgttgattttgaagacaacgaagacagcgacataagttatattgaggcaagttttaaaaaataatacataaaattttcaaaaattaattattttagttcaattttgtgaacgaaaacaaatgtgaaacggtacaggagaatgagacttcattgaacaccggtaaattaatagcaaaatattcataaaactcttaaaaatggtaaaaattgttatttgtttttgggattctcgaggttttacgacccttcgtttctccatactgagaagaatacgcgccattttatccaaaggccatttgtagcaaattttgtgctctttctaatctttaaaatcgtcttccacgaaaattttttccagccatttaggaatttattagcatggtttctttcacattttatcaagtgcaaaaaatatatgtcatcaaaatttgtgagtttatcattttgaaatccaaatttgaagcatttttagtataaaaatatttattttatttcggactcgctcagttgggcccaccacatttttggacataagtcacccaaatccaacattgttattataattcgatagccctaacaaataagagtcctctattagccagaaaaattttaaaaaccgtcaattttgaaaaaacttatggccgaaaaagactgaaaacctggttttctgatatacttttggccataaatttgtccgaaattgatggaattttttgaaaattttgcaggctaacagatgactctatagcttttgaatgataccatctatactggatttggttgacaagaaaaaagttatagtccaaaaacttgctgggcccaaacgtgcccgggcccaactgagataaaccgattttgttctctactcattccgattttttgtatgcttcatggacggtaaaaaagaaaaaaagcgacaataaa

SEQ ID NO: 77041 - DNA, 855 bp, Heterodera glycines
atggacccaaagctgatcactgacccgggctctgtcgagcgtacagccgaatgtgctgatcggtcagcaaattgtggtgtattgaagaagaatgggttctgctgggaaattcgctatgtacgactgatcagaatccaatgccaacacacatgtggcttttgtgaaaatgagcatgggaatggcgccacaaaaaagcagggcaaaaacggaattggaaaccaaaatcaaggacagaatatgggcaaggacaatggccaagacctaaaaattaatgtcggattggacaacgctgatggccaagatgggaatgaggagtatgatatgcaaaatggtggccaagagtgggagcatggcatcgacttgccaactggggaagaccgaactatgaatggcaaccgaggccaagagttgagcatgtttggcctggacaagacggaaggccaagctgaggaaaaccatggcaaaatgggtgtccatgatttggactatggcaatggcattgatgaagaatggcacagcaataacaacaacattgccgatggtaatgatagtggaacaaggcatggaaatgatggcattggcacaacaaatagccaaaatgggaatgctaatggtcaaataaatggccaagaggaacagaaacaggcggaaagcaattttatggacaaaaagaagcagaagaaaaagcttttgctattgactacaagcgatgaagcggatttaaacaatccgaaactgttgaacaaagtggacgaacactacacaaaatggacattcccaaaaaggagaaagccaatcggaaatggagatgaaactgatcaagcggtggagaagaagacctggcatgagacatga

SEQ ID NO: 77042 - DNA, 171 bp, Heterodera glycines
atggatttgacccccgtcggcccttctgtcgctccgttggctttttcttcgtcttcaaccgatgcttcagccgttgaattgccatatgccgtcccaaactttggcacacccactgaaaaattgttgctgggcggggagctgattgccgtgccaagcgctctgttggccgat

SEQ ID NO: 77043 - DNA, 1912 bp, Heterodera glycines
ttccagatttttttggggttccctccccggacgacttgcccaccagccgagtctaattgcttggcacattgtgtggaaaattcgaagaattttcaggcctcgaagtgggagggaggggggggggagagagcagggctggacgcaatccaaaatttttttttccaaaaattcatttgtttagattaattgtgattgttgtgattagtcgttcaaaatgggcgccacagaaagcgttgaacacagcaaaagcgatctgcagcagctgaagggcgatatattcgtcaatgggaggtgacggaccacgtcatcgttctattggcttaattttacaattaaatatggaaaaattgacccaatttggcatacaaattaatctatcgatgcaatgtgccattaaaaacaaatacaccgagccattttggccccaaaaatggttcccttggccgattgggcacaaaaataaatgcatcaaccaaatttggcataaaaatggataatttgccccaattagcattgaaaatgccccctttttcctcctcctagacctttccccgaccaaatttgccaacgaattgtcgctttggccatgggcggcatgcccccgcgggacattttgcgcaatttgcttgtaagttattgttgaggaggtcaacaaaatattcagacgtgtcagcaggaaatgttccggaataaatattgctttgctgtcatgagaatataacattccgtagcctccttcctcctaataccgtcccagtagaatactgtatctgtgtcatgacaactcgtacaaaagtcgactcatacatattgtacgagttgccattgccgcatttttcggtcacgcccccccccccccccccgatttttattatttttactcatcctgggaatttaattttaatgaaataaattttggatgagttaaggtgtcgagcggatgtgtttctaaaattcttgcaagttgtggcaccatcgatggccggtactgtttacaaggcacaccaatttgtctgatatattgtaaaaatgtcaaacttttttttaaagttccggaccccaaatgctgagtcaagaaatcgtcgagaaaataacggtaccgtttgttgtttgcgcgaaagtgcgcgcttcatcagtgatactgtaaaaacagatattattttaaaaagcatttgaaatgtatggtaagctcacgacagtatgccacttttttatacagtatcactgacgaattttttcggttgcgcaattttgcacaaatttttgccatcgcttatcatttttggttaagattacttttagctgtataaaactgaatacccgtccatttttgcttgggagatcagggaccggctgaagcaggacagtttgtgcacggcggagactttgccaagcgtgggttgccacaacccctcgggggaggacggtagcgccggaccggccattcatttatcgtcattaaaattgttttgttaccgattgtaaaggtgttcaatatttttgtaagcatgaattggtactggaacatacatgtaatccatttacagtatgtttgcatttcttggatttcgtgacttcctgttgtttttgaacgttcaaaaaaacagaattattgaattcaaacaaatttccttaaatttgggtcctttatactacaataagtaatgatacagtatcaaaaaataaatggacaataaaaaaatacttttggtagtgaaaggccggttcttcgcgaaagtaccgtataccctcgtccaactatgctactgtattggttataccattataatgtttaaagatctcgtcaatcaacactgtgcttcgttcccatgcaatattgtgaaagcagcagatgaaaagcaaatttgacgaaatcatgaaagaaaggagagggatgaatcggcaaacaaat

SEQ ID NO: 77044 - DNA, 1141 bp, Heterodera glycines
  unsure (1)..(1141): unsure at all n locations
atgtcaaactttagaatggatttgatcatctgtgccatttcgttccgtgtctcgtgccacatcgtcgcacagacatacagtgtaaggattctgtccatttcgccattaaatattcttgaaatgctttcacggtagttgtaatcggagtcacaatcagtttccttgataattaaaattaaaattgcattttgtgatttcagagaacctttttagcgattgagcaacggaaaacaaccagagattggcaaatgtcaagcccactcatcatcggtgacatcgacacaattcttgatcaattaggtaaataaaaagtacagaacgtggaacaaacatttcgtccatctgatcgaagttctcaccacttataaaacgatagctccatttcatatatgagaaaagccaaatcaatgttatgtagaaatcggagaaaacgccttgccgttgcattcctacaaaaatttcattttaaacgcatcgatgacatcaacaaggaccttttacgcaataaatgctcaagtcaaaatgttgaaaaagagcattgattcgacaaataggaacgtaatgacaaaatgtatagaagaagaagaaaagcattggagtcgtgagaaagacggggtgtccaagcggaatgagttcaagtcgcatcgcagccaaaaagcggaagcaaaagcggagataaaagttgagagaaatgacaacaagcgcaagcagaaagataagtcttanagcgaataagcgaccaaaaagacaattttgagtacttagggccttggagcgttcccccgttgagcaacagagaagtcagcgtaccaaatgggatgttgtgattgcaaagggaaaaccccaaaaatcagcgcggcacacaaaaaacggaccacacaagcgcacacgcgcgtctccgcgttcagttttctcagtccatatttgagctgtggttggctaataagctgatgatacgctcgtccttctcacctcgtacaattcctgcaatacgccgcttgtgtgtttcgtgtccacccaactttcccagtgtccaactgcacacatcagaaaggataacggaagcaaaacgccgaaacggaactccaaatgcgcttgagtaagataccacaggtaggcaccagtgaaaagaacagcgaaa

SEQ ID NO: 77045 - DNA, 1787 bp, Heterodera glycines
  unsure (1)..(1787): unsure at all n locations
atgcgcatcatcgctagcattccttcagcgtttattttcgctgttcttttcactggtgcctacctgtggtatcttactcaagcgcatttggagttccgtttcggcgttttgcttccgttatcctttctgatgtgtgcagttggacactgggaaagttgggtggacacgaaacacacaagcggcgtattgcaggaattgtacgaggtgagaaggacgagcgtatcatcagcttattagccaaccacagctcaaatatggactgagaaaactgaacgcggagacgcgcgtgtgcgcttgtgtggtccgttttttgtgtgccgcgctgatttttggggttttccctttgcaatcacaacatcccatttggtacgctgacttctctgttgctcaacgggggaacgctccaaggccctaagtactcaaaattgtctttttggtcgcttattcgctntaagacttatctttctgcttgcgcttgttgtcatttctctcaacttttatctccgcttttgcttccgctttttggctgcgatgcgacttgaactcattccgcttggacaccccgtctttctcacgactccaatgcttttcttcttcttctatacattttgtcattacgttcctatttgtcgaatcaatgctctttttcaacattttgacttgagcatttattgcgtaaaaggtccttgttgatgtcatcgatgcgtttaaaatgaaatttttgtaggaatgcaacggcaaggcgttttctccgatttctacataacattgatttggcttttctcatatatgaaatggagctatcgttttataagtggtgagaacttcgatcagatggacgaaatgtttgttccacgttctgtactttttatttacctaattgatcaagaattgtgtcgatgtcaccgatgatgagtgggcttgacatttgccaatctctggttgttttccgttgctcaatcgctaaaaaggttctctgaaatcacaaaatgcaattttaattttaattatcaaggaaactgattgtgactccgattacaactaccgtgaaagcatttcaagaatatttaatggcgaaatggacagaatccttacactgtatgtctgtgcgacgatgtggcacgagacacggaacgaaatggcacagatgatcaaatccattctaaagtttgacattttttcgtcaaattttcgccattttttagacttgatgaggaacatgccattcgtttgtcggagaaaaatacccttgaaggaaccaaattccgcttggaaggtctttattaaaattgacaagctcgccccaattgcatttttctcaccttttttttgacctaagatttatattttccagttaatttctacaaaaattgaaactttccgtgatttgttcagttcatattttcttcgatgactcgtggactgatgacaaagaatgtggtcgcattccgaatgagtacttcaagctgttgttcgaagttctgatggaattgactcggttttatttaattagtcaattggttccgtggtatttttgctttgtcttgtcaagttccgacaacgctgaagcggacatgtacagccgtattcttctgaacactccgtacggaggtcgacttgtgctggcgttgaatgggggctcacttctttttgtgcatctcaaagacaaacgtttgatccgacacaaaaagcgttggtcgcaagtgatgtacatgtactttttgctcgggcatcgaattatggactcacatttgagcgtagaagacaaacaattgcaggtcttttga

SEQ ID NO: 77046 - DNA, 443 bp, Heterodera glycines
atgccaattgggcacaacgccaaatcggtcatccgacgatttttgcgtttgcccttcgccgtggaaatacgcgcaatcggaggaaaaagaaagtgagttaatgaagacaatatgaaaacaaacggacaccctgtcaatgattcagcaaatggatatttgttcattttgcactcaaattgggcactgcaaaaggaacgaatggaaaatcgacgggcaaatggcgacggtgccattctctgcgcggaagggtaagcgaaagggcggcctctcacaacgaagcgacgcatcgcaggaacacccaggcgcatttgctgtcgctggtcgccccgtggggcaaaagggtggtgaacgtcggccgaagcaccggtgacgagacggtcagaagcggtgactgccaccgactgttctcacacaacccgaacaatctgaacccatacgaatga

SEQ ID NO: 77047 - DNA, 924 bp, Heterodera glycines
  unsure (1)..(924): unsure at all n locations
atggcaccgccgggtcaataccaccacgaggtgttgacggtgggcgagccccagctgatggcctgttcgtacggggagcatgacgaacggcatatcacgcgggtggagaacacggcttttgctgccgcagcggcgggtggcggtgccatgggaccgccgccgatgccaccgccccagggcataatggtcagcagtgcgccgggaacttcagcgctgggcatgccaccgatgccggtgccgacgacagcgatgggcggcgacaacggtggtaagcgcatatttccgggggttaggcaccgttggaccccattgtgccatttttgaaaatcattttttggcacaaaaccgctacatattttttaaatttattcttctttgcttgggttgaaatgcgaacaaaaattcgctcaatttacagctcctccacaccatttgcttggtgccaacaacgacttcgagcagcacatccaacagcagcagcaacaacaacagcaaatgcccccgggcggcttgtggaatccgctgccgccagcaacaagcgcgggccccggcggcaacggcggagaccaggcgatgggcggaaatggcggctgatgactatttattgtgattggactgcttgctgccgtgcgttgaccgggctgctggtgatgatcattcttcgcgccaccgccgtctctttcctgtaccgtatcgcccaccgtattcctccgctgctgctcacttcgtctctctcctcccttcactctcccactctaactnatttctgttgttgccccgtgttgcgtgcgtgtgtgatcgacccatttgaactttgattgacctccttcctcatccccccccgntctcgttccttcgttccattgccctcgtcaccctcttcttctgtcactctttctttgctcattggcactttgtctcgga

SEQ ID NO: 77048 - DNA, 1476 bp, Heterodera glycines
atggacgaaaatgcaaatgcggacgacgcgggcgagggaagggaaaaacgccaaccgaaggctaaccaagtgggtcaaagggaacgaaggtttagtggcgccgcttggtaatttagttggatttatcccgccccctggttttctatgtaattgccttgctatcattgtcagatcaattacgcttccctgggccatttgctcgatcgtctcattgtcagccagcgtcggacttcgcttcttcccgtcgttccaatcgctttttttccactcactgacttcgagaaacgaaatgtgtcgctttgcacgcgcacaaatccaaccgaagtgttcggtaagatggaggacttcaagctcaattcgtgccacgtctatggggtgatttattctaatgttttttaaaaattattatcttcagtcaattgctctgctcgatttcaaaaacattgccatcgtcaacaaattttcgcaattagtgtgggaatttaatctttcctttttgcattaatttttgttttagcattaactcccaaaaaaacgatgcaaattttgtcggtttggagccattgatggagcaaactgaggatgattttaatggtaatattaactccattagattatgaatgcttttcagatgctttgagttgcgcttccaagtcaagcacagaaacaatgcatcgccaaaccgaccaacaggagatcgaacggcgcggcacggacacattggcaccaacccaacttcgacctaattccaatatcgaaaatgaaatgtgtgccatcgaaatgaattcggagttggcactgcaacgacatgacggtttggttgacgaggaaatgaacgagaacggaccaacaccggccctgacgcagcagcctcaaattgactttgaaaatgagatgttcgacaacgactccaccctcgtcccgccctcgccgcgtgattttttagaagtgagtgagcacgaaacgacgccggaaccaacgacagacaatgaggaaggggaagcaccgccgccggacatttcttctttggtgctgtgtttggcaatctttcggttcattggtcccgaattttttttttaattaaaattctgaaaacacatttctaaggctaatttgagccgctgagtacgaatctgaccaccttttcggcctttttcgaatcccgaacctaaagtcgaacaattttttaaaaaattcaaaaatttcaatttcatcaaatatgtacgcctagatgtccgggacaacgctccaattgttgttatttggacgaatatatgtgtcgataattcaacggaaaaaagttgtcaataattatttttagacgtatttatgtaaatatttgaaggaattcaaaattttgaattttttaaaaaaatgtttgaattcaggttcgggattcgaaattggccaaaatggtggtcagattcgaactcagcggctcaaattagccttagaaatgtgtttccagaatttata

SEQ ID NO: 77049 - DNA, 882 bp, Heterodera glycines
atgggacgaagcgacgctccgcgcatcgatggaagaaaaataatggaaaataaacgttttttattatttttaatttttgtgttgttgtatttactgtgtacaataaaaaacgcatttactattaaattcaaatgccttaaatttattttaaaaagttctcatacagtattgtgtacattaatccgaaagtgtttcgtttaattggctcattttctctttagtttacttatccaatttttggtgaaatggttgatgaacgtgtgaaaattttcgaattgttcagggacattgacgaagctgcggacagagggtgggccgaggccgagcgattgggcaattctttcccgtcttttagcaatcagttggtagagatgctaatccaagagggacaaaaggaccaattggagcagttcggcacggttttggacaaattgtcggaattggacaaaaatttggacatggaccttagggtcggaggagggaataaatgccacggaaaggacgcaaatcacccttttattttcagacaatcgacgaaactttccgacagttggaaaatgccgaaacggagaagaaagtgctagagaagcatttcaacgaaaggtccgcgaaaaaaggaaaaaacaaaaaagtgaaatcgaatttagccgcaaaaacattcaaatgccatcaaatgccggccgtactcaggcgaatatcgcagcaattcggaaaaagttggacacagcactcgcagagggaacgagcggaacggcacaaaacgaaggcgaaacggaacagaggggggaggaggaagaggaggacatgctaatgtcggagaatgtgttgtcagcaaaggacccaataacgaaaagggacataaaggagccggtgaaaaattcg

SEQ ID NO: 77050 - DNA, 547 bp, Heterodera glycines
atgagacactgtttctcgaccaactcaggacaaatggtacggagtctctttggtttttgccttacttttttgttttgtttttgactgtccgttttcagttggcttcgtccctttcactttttcttccgccatttgtgccgcgtgcactgtcatggctcattttgacctcgtcgctctgttcctttgctgctttgaacttgtccattccgatgtcttcggtcccttcgctttgttttgcttttgttccttcgcttcttccgccactcttttggctcattttgcgcttctccgatcgtcggatctgttccaaatttcgtcttccgattttgttgaatattgccgaacttttgtcacaattctcgcgtttggttacgcttttactccggtgataaggtgagaaagggggataaatgaccaataattgtttgtttaattgcaattttaggacattgaccacttcaattagcactgacaccatttacgcctgtgccattctgctctttttcgccagtctttttgtccacgactacggcataaatgtgccggt

SEQ ID NO: 77051 - DNA, 1820 bp, Heterodera glycines
atgagcgggccaatccgctcaaaaatcgggccttgtgccgcccgtaccaaggcctacatcgaggcggccacggtcaatctcggaaaggacacgacagacgagagcattcaagcagacctcacagcggagcgccgtggactccgccgagcgattcggcttttggaggattgcaatgacaaatggcaatccctcctgctcaaattcaatggagccgaccgccaacaagaggagcaacgctacgatgactttaagccatcgggaaagcacttcatggaatggtcggacaaagcccgaggtgcagtggacacgatcgatggagtgatcggtccagaggatgacgacgaaataactgggagcattatctctcagcccgccaatcctccacaaattcaacatgttcagcctcccccacctcgccatgaggtgaatctccctcccatttctctcccaaaatttgcgggagagccaagggagtggccgatgttttggaggctcttccgttcctcagtggacaaccttccaatcgacgacttcaagaaacacatctatttgttggggtgccttccccacaactcgccagctaggcgggcagtcgacttgtacccaccctcggacgaaaattatccgagggttgtcgacatcttgaagaagcggttcggtgatagtaaaactatcactgagtccttgcaggcagagctactgcacctccccaagccgggagagtcagtgctctcgctccgcaacttcgcagagtccgtggaacgaatctgtttccaactaatggacttcggcgaatctgaggacaacatgttcatggcttcgacgatcaagtcgaagcttcctttctccatcctcacccacgtggtggagaaagagctttcctcaggaaagacattttcgtgccttgacatcagaaaggcacttcaaacaatagtggaagtaaaggaggaagtgcagagatgtgcacatgtcctccgaggcgatgaacgaccacgttcatccgccttcaattccccacctcaacagaggggtgcctgggatcaaaggggtgaccaccgtcactccaacaaccgacagagccaaccaccaaggccatttaatcgcggaggaacgcctcagccagaatatagggcgttctccgctattaacaaaaatccggaaagggccaaaaccccagcaaggaaatggggtcggtcctgctcgctctgctcgggaactgatcatctcccgagcgagtgcccggcgttcccaacaccgggagctcgccgaaaacggctgacagaacagcagcgctgcctcaactgccttgtgcaaggtcacaacactgaggagtgcacctcaccataccgttgccgaaactgtggcaacaaacaccacttcctcatatgcttcaagagggaggagtcccattcacggtcaaatgggaatcgttccgcttcctcccccaagtcgggaagagagccaggagggcgaaagttccatcagcggcaggtggaaagccaaacccacctgatcacggctgggtttcaacagaacgatcagtcaaaccctccgccaagagagggggagatcgttcaatccatggggatgtccaccgtggacaccagcaaagggagagccaacaaggttcccaagtgcaaaaatccgcacgcgtatctgatgatgcgacggctgctggctaagtcaagtcgcgacagccggaatataatcaaagttgcagtgctctttgacccgggaagccaaacaacgtacggagcggatccgcttatcgataagctccgcccgcacaaactcacctccgaagagatggaggtccacgg

SEQ ID NO: 77052 - DNA, 89 bp, Heterodera glycines
cccgccctcacattttcggcctataaaaagggcacccttttcattaaatgctcacttccacatttccattcattcatttctgctgctgc

SEQ ID NO: 77053 - DNA, 1251 bp, Heterodera glycines
atgtcgacttcatcgcccccgtcttccgagtcggacccccccgaacttcttcaaacgccccattcgccgtcctcgcggcccttttggcgtgatcaggaagagttggtgatcagtgggatcagtggacgattcccgcgcagtgacaacgtcaaacaattcggagatttgctgttggctggggaggacctggtcacagaggacgaactcagatggcctccaggtccgattggccttatttccgcagaattccaccaatgacagacaattaaatgccccatttatttaaggcttttatgatctgccgaaaaggcacggaaaactgaaggaattgcgcaaattcgacgcgcaatttttcagcgtgacgccgaaacaagtgggaatagggaattgtgcaaagtaaaaagcaaattgcaggccaattacatggacccgcaagtgcgaatactgctcgaagtggcctacgaagcaatgattgactcgggtgagtgtctttctttagccatcggttgagcaaaacggcgagggatttcgtcgacaaataatgtattcacaggagtaaacccaatggaattccgaggcaccaaaaccggcgtttttgtgggctgttccgcttccgaaacgggcggagcactcactcaggatccggagatggtcaccggctacactttgaccggctgtgtgcgttcgatgttctccaaccgcctctcctacgccttcgacctgcgcggtccgtccttctccgtggacaccgcctgttcttcctcactgctcgccttgcaattggcaatcgacgccattcgccaggagcaatgcgaagcagcaatagtggcaggtgggtgaggggggcgagcgagtggggggggggaatagtagggggacagtaagataattaggggggggggggggattttaagacattgagcattttttaaatgctttaaccttcgcccgccctttgctcaggtgcccaccttacgctgactccgactgcggctcttcagtttctcaagttgggcatgctttcccccgccggctcgtgccgctccttcgaccaatccggggatgggtatgtcattttttccttccgatgacatactgtatcgtttccctgctcttttgaggtattgtcgtactgagggtgtttctgccataattatccagcggcgttccgtcgcgcgtcgtatttatgcgactgttgtgcacgcgaagagcaacacggacggctacaaagagcagggcatcacctttccg

SEQ ID NO: 77054 - DNA, 306 bp, Heterodera glycines
atggtcgctgctgactcctcctcctgtctcctccatctgattgttatcaactgtggcgatctccgttgtcgggatgaggtgaacaaaggggaggagcaaagagaacggagaggaagaggagcaagaagaataggaggagcaaaaggaggaggaggaaagggaggaagaagaagaagaggaggaggaaagggaggaagaagaagaagaagaagaagaaaggagacggacggaagagtcgacggaagaaaagagtcgacggaagagaagagtcgctgttcagaatttgtgctctgccggcggcgctga

SEQ ID NO: 77055 - DNA, 93 bp, Heterodera glycines
attacgctcactttcaaacggatctcagcgccgccggcagagcacaaattctgaacagcgactcttctcttccgtcgactcttttcttccgtc

SEQ ID NO: 77056 - DNA, 69 bp, Heterodera glycines
atgggaggaagtaaaggagaaagagagaagaaattggaggaagtgaaggagaaagagagagcagcaagg

SEQ ID NO: 77057 - DNA, 57 bp, Heterodera glycines
atatatgttatataggttttgagtttcgtttcaaaaaacaaaatctcccggccgaag

SEQ ID NO: 77058 - DNA, 476 bp, Heterodera glycines
atgaccttatttttgttcaccgccaacttctttcttgcatataaagtgccaaaaaaatatatatataaataaaaatgattttttaataaaattacacttaaaattaattgaataattttaggtgcttccgtctgatcccgaaaatcctccaagttctgataaagtccctgccttaactgttggtgcacacgaattcacgtgccatgtgatgccttatttggacattcagtgatttgacttaatgagattaattaatttttgatttgtcgagaacaatatttttattacaatttaatttgaaattgagttaaaaaattgagagatatttttgaaagaatgctgaatgccaaaaatttaaaaaattttccaataggcaaagtgccaagtataaagtgcaaccacaactttgaaatcaagtacatttgaaaaaaggcaaaaaagcaaaaacaaagtatgtacttggaaatcaattacaa

SEQ ID NO: 77059 - DNA, 769 bp, Heterodera glycines
gaaacattgcgtttgacaaatttggttgtgttcaacaaccctcatatgactcttgatgaaataaaagttggcaattttacggtggaaagtggcacaccgattgtgccacaggtggacaaaaaatccggcgaaatattttttagttttatttttcagatcagcagtgtcctcttcagtgaaaaggtaggaaaatttggtaaaattcagcaaaaaactgcgtaacaaattgcaaaaaaaaaatttttttttaatttccgaacattttttttagtactttgccgaaccccaccaattttggccagagcgctttttggacgatgagggaaaattgaaaaaatgtgacaaattaattccatttggagttgggaagaggtgaattaacttccttttttattaaaaataattttaatttattttaaaaataattttgcttcttagacaatgccctggtgaagcattgacccgaatgaccttatttttgttcaccgccaacttctttctcgcatataaagtgccaaaatatttataattaaattacatttaaaattaataaataattttaggtgcttccgtctgatctcaaaaatcctccaagttctgataaagtccctgccttaactgttggtgcacacgaattcacgtgccatgtgatgccctatttgcacattcagtgatttaacagaattaatttgtgaaatttgttattattaaaaaatcttttttataatttgttttttggtggcctttgagtttatcatatttaaataaa

SEQ ID NO: 77060 - DNA, 5275 bp, Heterodera glycines
cagaagaaacaattgagaaagggaagacatgggattgatctcctcgaattggcataataaaatacgtcaaatggattgggttttctattttaatcgtcttaattgccgtcggctcatgttttatcttcggaaaaattaaaatttacggcactattctgacgattccgctccacatgattggcaccctgacccaaatgttaatggattgtttcacatccggaagaaatgtcgtcgaacgtgttcgacacccggtcgttatggaggtggaactccagcccttttcgaaaccttccgcgccgccggaggagccagcgctcgaacagactgcctacattttgaattatttgccgaaaatttgtcaaattcatcattatcaacgccgaaagaagagatgctacgtgaatgtcctaataaacgggaaggacataaaagcattgttcgacaccggagcagatgtcacgtacattgagctctcaactgccaagaaatacgggctgagcatacttcgaggagacttcccacaagctcgtgctgccaattcaacgtctataaattttattggatctgctctgacgaacgtgaaattcggagaatttgagggaaaattcccaattcttataagcgaggacggaggctgtccatgtgccgccattattgggactgattttatggactttatcagcgagcaaggaggggaagaggaaattggtctcaacttcaaacagggaattgtccgagtggggcacgtccaattgcccatggttggagccgttaatattgagtgccgaccgatcgaagtacgacttttgcaaacacacactcttccaccgctctcggattcctttgtgtggggacggataaacagaaatttgagtccagaagacacattcatcaccgctgagagagaacacgactattttccaatgcgtgtggggaagtgtctaacgagccccggggcgactcgaatcgtaccactccgcttgttaaactttggaaattgtgacataaaagtgcacgggggatcccgcttggctgtacttgaaccgctttcagctgacacgcatattaattcgttgcgaaagtgtacagaaaccgaagaaaacatgctgatgaacgacgaggaatggcataaattcaaagcagaaagtgatcaaataccaccggaagccgattggacagatgaaactctggcgttcccaaaaaatggcgaggccaccaagccaattttggaaagaatctcgctgaaggaatcaattttgagtccgggaggaatgataaaattgaggcaaatcatcgaaacaaacgaaaatgcatttgtgaagccgggcgaagtcggtctctttaaggggaagacaattcatcgaattgatctgactgagggagccagaccatgtcaacaaaggccgtatcgttatcccgtggcactccaaccagaaataaagaggcaagtaaaagaattactgcgacagaatgtaatccgcccctcttcctccgcttgggcttctcctattgtgcttgtacgaaaaccggacgggtcctaccgcttttgtgtcgattatcgaaaattaaatcaattgacaaagcgatcaacatattatttgccgagaatccaatcgattcttgacgaagtgacgggaaagaagtatttttcggttgctgactgctccagtggattcttccacataaaattggctaaaggacatgaggaaaggagtgcctttatctgtcacatggggctgtttgagtggctacgctgtccatttggcctagcgggagcaccaacaacttttcaaagagcaatggaggaagtccgccaaatgtgctcggccacttttcttgtctacttggacgactgtattgttggatcaatgactgaggatgaacacttgagggacattgacatttttctaaagacaatggcagaggtgggcttccgtttgaaaccggagaagtgccgctttgcgcttggtgaaattcgttatttgggacatttgatttcggagaagggagttcgaattgacccgaaagatttggaaccaatccaacgactaaagaaaccggcaaatatcaccgaactgcggtcactgatcggaatgctgtcgtatttccggaaatttatttttggcttcgccgaaattctacaaccgatttacgaactgacgaaaaatgaaaatacaacggaatggggtcaaatccatgaaaatgctctggaggaacttaaacagcgattaatgacggcaccagtgttggctccaccgaaattcggaaagccgttcgttgttgagacagatgccagtacaaaggccatcgcaggctgccttcttcaggaaaaccgtgacggagaagtgcacccaatcagctatttcagcagagttctcaccaaacatgaaaaaagatattccgtcgttgaacttgaggcgttggccatttgtgcctctcttaaaaattttcgcccatacttggaaggggccggaaaatcgactgttatcacagataactcggcgttaacatctctattccggcgaaaagacttagagggaagattgagtcgctaccaattagccattatggcattcgacgttgacataattcataggcctggaaagagaaatcaattttgtgaccatttgtctcggtatttggaagagagtgctgaaccccaaataaattggctgaatgtcgaagcgaagacatcacaaagtgagatggtcgaggctcagaagagagatgccgaaatacaaaaaataatgatcagattgaaaacaaccgtagacggggaagagtcaaacgaaaatgaaaagaagagatggaaactttttgaggaattgctatgtattatggacaaaggcgaatggaaaatatgtgtgccgaaaagtctacggtcgaaaatcatgggcgaataccattctgacccattccaaggcgctcatttgggagagaaacggacgagagagaagataaggagaagcttattttgggaaggactggacggagatgtccagcgctttgttaaaacatgtgatgcctgccaacggagaaaaattattggaattcaaatgagcgcagaaccaatttgtccaatcgaacccgcatcacggccctgcgagagattacatttggatttaatgggtccattaaaaacggcaaaaggaggattccagtacattctaatgattgtcgactccttttctaaatatatgatggccattccattgcgggaacaatcagcaaccaccgtcacagctgtatttgtcgacaaattcttgtgcttattcggtttaccaaaaatagtcgtcactgattgtgggactcaatttctgagcacaacatttgaatctctcgccaaaagcggatgacagaaatttctctgacatggccatttttataagcgatttgacagtgcgaatgacggaaatccgacaaaaagttaatgagaagttgaaaaaatgtgcggtccaaatgaaaaagcagcaaaaacgcattaatgaaataccgtggacagaaggaatgctagttttgttgcgaaaagtcgacaaaaaacataagctggaagcgaactacgaagggccgtatcgcgtgattggaattgagaagccaaatttgttgctgaagaagttaaatcccgacggcacagaatttgaggctcatatggacagatgcaagccatatttccagcgtgaggtagaagagagaaatgaacctggcgatgaaataaaaacgagagcgttgggcgacccaaatctggaggaatcagatgacgaaaatgaagacgaaaaaacaactatagcctttttgagaacatcagacaccgacgaagagtccacaaatgatgctttggaagatccattatttctaatggaaattcaaatcgacggaaacacaatattggcttatattaacttctccgaaaattatgagccctcaataatcccaagaaaccgtgtccaagcccattgggaaatatattcgggaggacaaaagccttacatcacggcatggctattcgaagaagagttacaaatttttgtagaggaaggggcggatcgaccgtacatcggtagcgaaatgaaaagacttttgaggcaaaatggtataattacggccgaaaatgatatggcaatgttttggaactcgattggcaagaggggacaaatttgggaagaaatgattatgccgattgttgaagtcactcatcgggactcttgggattttgatttggaaaatgcccaaataaactgtctcaagttaaatgaaaatgaaaaatttacaaaaaatgaggaagaaatattttctactaataattttcacccatgttcgcataatccgcacctattttcaaatttcgaccgttcatttccttatacaacatataatttggacaaaattaccgccattttacagcaaaaatatttactttcacaccaaatatcgcggcacgaagcttttattcccgaaaaagtgcgccagtctcgcgaccaatcgtcaccaactccacccccgattttggtgtcaatttcgtcggacgaatcagacaaagaaacggcaactgaggcgggaactcaactgaaaaaacaacgtccggcctggccacagaacaaggaaacggatcgtgagaaggagattcaggagcttaagcaaaaactcctgcttttggaggccgaaaaggcaagtgatgctcggaaggcggctaaagctaagaaagaggcggaaaagagagcaaaaaaagaggcagaagcgagagcgcagagagaggtggaagaaaaagccaaaaaagaggcagaagcaaaagcgcagagagaagcggaagaaaaagcaaaaaaagcggcagaagcgagagccaagcgagagatggaagcgaaagcccgtagagaggcggaagcaaaaacgcagagagaggcggaagaaaaagccaaaaaagaggcagaagcgagagcgcagagagaggcggaagaaagagccaaaagagaagcggaggaaagagcgaaacgagagagcgaagagaaagtgcaaaaagaggtggaagcgaaggccaaaaacaatctgagggctccatccgagattagtctttgtgaggatgagttggattgggaagaagcggaaaagaaggtgcaaaatatattgaggaaaagcagtgagatagctaagaaaaaagaggaaagaaagaaagtaggggagagaattgccagaggagtaataagaaggaagattacggagaaagagaaagaggaaaaagccaagaaagacagtagcgaggcagcaaaaaaagcggaagata

SEQ ID NO: 77061 - DNA, 1161 bp, Heterodera glycines
atggtggtggtcggaatcgccgtggttggaattttggctgtcctgaccggaattgtggtggtcggaaacgccgtggtcggaattttggttgtcgtgaccggaattgtggtggtcggaatcgctgtgatcggaattttggttgtcgtgaccggaattgtggtggtcggaatcgctgtgatcggaattttggttgtcgtggccggaattgtggtggtcggaatcgccgtggtcggaattttggttgttgtgaccggaattgtggtggtcggaatcgccgtggtcggaattttggttgttgtgaccggaattgtggtggtcgaaatcgccgtggtcggaattttggttgttgtgaccggaattgtggtggtcggaattgccatagtcgagacggaactgttggatgggagtccatcattttgatttcttcttatgtttggtgtcctctttatttgctgagtggaaaaccaagccaagcgaaacaaagttgaacaattaacagaatgaatgaacgaacgggccaggggaattgagggtggcagaaaggggaggggcagttggtcaattgaggggacaaaaagtgatgagaggggctgacaccaaggaagggggaggaactccaagcccaagccaaaggggaaccccggtcaatgaccatcttttcatcacaacctcaattagctattatcaaactaatgaaatatataatttttgagggatccactggtgctatgacgttagtcaaaaaccatcaactgaaaatttggtttgatataactttgcccaaaatgaatgaactcattaattcttgatatccttcgatagctctaagtgttttctattatcctgcaaaaatttgaaaaaatttcgataaatttcaagatgactaaaaatgttcaaaaaaactttgttttttgagtttctcaggtcattatttatttgaaaattaatgatttttttttgtaatttttcaggataatagaaacacttaggactatcgaaagatatcaagattttaaaatttggtatattttatgcgaagttatgaaaaatttttatgtcaaaaattttgcattttggtctttattttatagtcattttcttcgagaacatttctgactctgggcaattaccttaaaggcacaattagctattataaaaata

SEQ ID NO: 77062 - DNA, 417 bp, Heterodera glycines
cgaccaccacaattccggtcacaacaaccaaaattccgaccacggcgatttcgaccaccacaattccggtcacaacaaccaaaattccgaccacggcgattccgaccaccacaattccggtcacaacaaccaaaattccgaccacggcgattccgaccaccacaattccggccacgacaaccaaaattccgatcacagcgattccgaccaccacaattccggtcacgacaaccaaaattccgatcacagcgattccgaccaccacaattccggtcacgacaaccaaaattccgaccacggcgtttccgaccaccacaattccggtcaggacagccaaaattccaaccacggcgattccgaccaccaccattccggccacgacaaccaaaattccgatcacagcgattccgaccacca

SEQ ID NO: 77063 - DNA, 569 bp, Heterodera glycines
atgccaggttatttggcttattgtccccagcccacggacttcgaacagtacacttactgttgtctgtactaccatttgggtgttgaccgaccttcgtgctgtcgcttcccatttcataccggtagtgggcaaggcattttgccagctttgaagttttaagtaaaaattttaaaaattatcccccccccccttgtgaaatgccctcaggcaaaaagacataagagaattcagcatcaattagcgatgcattaattgtaattcattcaggtgtgatcattgcactgtttgtttcgagtgttgtcgcctttttgggtaattatggtcaatttacattttatctaatttcattttagttaattaattattatttttagttctattgtttctaatgtgttggttttgcccaatttgtccgttggccaaaaaattgagggaaagaaaagaagaggaggctgaaaatagtggagaaatggacgaataaatgaagagaaaagagggaatagagaaaaaaagggaagtgatcgaaaaatgaccaattgacgatcagaagaagaacagaaaatgagaaa

SEQ ID NO: 77064 - DNA, 659 bp, Heterodera glycines
tgaaatatatgaacgagcggtgaagcctttgagggaaaaactatgggacggtcctctcggggaagcttcttcttctctatctcagtatcaattggccccaacttcagaaattgcaaatgctgatcaattacgactgggtgcccgtccctctgggcaagtccctccctttcccttccctttgcctttggccaaatgccgtgccctcccctcccccttcagcttattctcaggtcgttttcttggccactcgcgtttacttccttttgtgtttgtttgggcgccaatttcgcatttgggagcaaagggattccatggcttacttcgaatattactttccgctgatgacttttctgcaactgatgtgttacatgggctggctgaaaatggccgaatctttgctcaaccctttgggggaggacgacgaggactttgagagttcgtttcgcaatacgtacgctgaaaaacgacgaaaaacaattcgacgctttttcaggcggttatataatcgaccgaaatttggccgttgggatgacaatggtggacgaattctatggccaactgcccacccaaaagccggacaaattcggcaaggagggcgaagtgccgtcagcgtacacagagttagcgggggtcagtcattggcactttgccaactcaat

SEQ ID NO: 77065 - DNA, 300 bp, Heterodera glycines
atgaaaattcattgcatttttttcattcttcttatcaacgaacttttcgttgttcctcttatttttggacaaccaattaaagaaaaaaggtatttttaatatttgcttaaattaaaaaaaacataattttaaaaataaatagtcaatatggattaacactgtcaaatcaagctgaaattttaatggaaatgtgcatccttggaattcgctaggtttttttgagttgaccaaatttgtttttccaaaaattttccgattttcagtgtattagagggtgtcccggtcactctaaacgaatga

SEQ ID NO: 77066 - DNA, 2983 bp, Heterodera glycines
atggagcggaatttgcaacagcagcagcagcaacaacagttggagatgggaaacaaccaatttcggaaatcgtctcctgacaatttggatgggatggcactgaaaaggtaaaagggagagactggcggctacagtaagaaagtaatgatattttaagcttgtaatttacaattgtaattcatcatggaaaataagcattttgcggttgtaatttacagttgtaatcaaaatgagcatttacggatgtattttataattgtaaccaaaaataaacattttacggttgtattttacaattgtagtgatatattgaaaggcgtattttgcctttttacaattgtaattaatcatggaaaataagcattttacggttctattttacaattgtaacgacacgaccaaatgcgtattgtaattaatcatggaaaataagcattttaggattgtattttacaattgtaacgatttaacaaaaatacacattttatggttgtattttacaattgtaatttattcattggaatatgcgcattttatggttgtatgtattttagaacacataatatgtttttccatgcctaaaaaatagaaaaactctatcattttattcccttcatgacacaggtaaaatgaaatttgaattttacagtgtgatcaaaaagcgtgaccggctaagctttgcacttgtggacgaacgggagaggcaacaaacgccgtcatgctgccctccgtcatcgccgggaaaagtgcgacgacggaggacggcacattcagtcacgccgttgcttgatgctcgcttgttcctcaacgggctcgatgaggtagaaactgcgagccatcacagtcaaattcgacaaattctatcctgctccatgaaaattcataggcttcatcatcggcattaatattacaaaaaaattgcagagtgccgtcgagagaactgctgatggcgctgctgaaatgaaaaaagacggcataatcattgagcaaagtcttgaagcagtggtggaccaggcactgatgagaaaggaaatagttagtgccagagaaacaaagtgcacaaaaatagatgaggaaaagaaggggcagcaacaggaggaaaagcatatggaaatggtggcacaacaaatggctaattcgacgcttcagcatgagaaattggtactggcatcgcagacgatgccgacggaagaagccaaattttcggcacggcaacaacaccgggaacagcaaaatatgccaccaaaagaggaaaatttgttacaaaatgaagcagtgccaccatcaccggcacttgtgacgatgagcaccaaagcgaagaagcatttgttaaccgatcggaacagtacggcggagacgcaacaacaaaaacggcaacgagtaaaggcaaatgctcaacgaactcatggccaaacagtgtcagaacgagttggaggacaacagcaacagtttgggacgaataacaacagaacagctgctgcatcaacaataaatgtaaagccgaatgctttacgagtgctaccaccagcagctgctggtgttctacgaacggcacaaaagcggactaacaacaatttggcaccggcaccaaagtgcactgccaacataaccgccgacccatcgtcggcaccaaaatgcgcaccagcggtgtgtcggattcgaattgttgccaaaccgaacagcaacaacaacaatgtccatggaataacgacgacgacgattgaggctgatcagcaccagcagaagcgagccccacatcagcaacagatgtgttcctcatcatcctctatgccggatcggccgttgaagccatcacaggtgaaagcgtgccaaccaaaggtgcagaagccagcagcagcacatggcggggtcggcactttgggccaaaaggcaacagttacggcatccgccggtccatttaaaacggacaaaaatgtcacgacaattggtggcggatgtgcaacagcgacagcaactgcagcagtagttgcggtacttatattttcgaaaattctcgggtttgaacataggcttcagatagtaagccaagcttttcggcccagcccaaatgcgagtcaaggatgcatgaaattttgtttttcatttggtccccctttttcggtatttttggtttcatgtttcgtttttggtccataaaaatatttttgggaatttgatttttttatgatcaaaaattattacttaaaaaaacgacggaaatttcgactttcagaaaatgaaaccatcatcagcaacaccgaccagcaacaacagcaatggtagcagtaccggcagcagaaggagcgtaacaactgctgcaaccaatacaactgttggcagttgtcaaatgatgatgatgatctgcagagggcaaacaccacaatgccaagaaaagcagcaacagcagaaggatggcaaagcaatggcaccggcacaaccgacgcaaccgcaacaacaacaacatttgagagcaacaaaaccgacactgacgagacgggtaagttcagaacaaaatttggtgtcggctttcaaaacaagaaatttttttgttactttttactcacagtaattcgaaatgtgtgacgtgataggctttttcaaattgaaacaacagggggtgcaattccaaggcccaaaaaaaattcggaaatcgaaattccaatccaaaaattcgaaaaacggaatcccatgatggcatcactgaacataattgaaaaattgagtcgtataatttctgatttcaatttttcgactatgcatacaggtcatagtttggaatgccagggtcaaaaaaatttgccaattttagcgaaaaaatgcaaattaaaaaaaaaaaataaatccagctgagcacttcctcccgcccaactttggtgcattcaaccggtcgaagctgtacaacgacagcaggaagcagagaaagggaaaagccaaaatggatttaacaacaaaaaaaaggcacaaacatatattttacaataaa

SEQ ID NO: 77067 - DNA, 2070 bp, Heterodera glycines
atggcaacgccgatcacacggcgttgctctgcatttcacaaggggtggcaatgcgctgcagcagcagccaaacatttcccggaatattgtgactccgggaaactcggtgacaaaaaatgcgccgattgcggtgcacatctcttctcacatgaagacagtaacatttgctgccggaagggaagagttgtgctgccaatgcttaacccgcatcctgatgagctcaaagagctgattgtggggaataagcaatcccgtgaagggaaagaatttgtgcgacacatgtcgcgttataacaacctgttccaatttgcgagcgtttccgctggcaacaaaccaagccctgctggcggtccgatggccgttattcttaacggagaattccatcgccgcataagcagcatgcaggctggtacaactcagattcctggctttggccagttgtacattctggacccagtcgaggctatggaacagcgtcgaaacaaccccaggtttactggggagaaaatcacaaacgaagatgagtttgtgcagggtcaccagctaaatgagcagactcttgagatcttagaaaaaatgatccaagtgcatcatcctgctgtgcaggcatataagcaggcgcgtgagcagctcactgagcttctccaacaacaaaatcaggaagagcttcgtttcttccgcatgactttgttggatagccgcagggctccagctggtcttaaagacccaaaattgcacccacaccaaataatcaccccttctacgggtgaagggatgttcgctattcatgcggaccccactggtgctcctccgcccaaaggaatttgggtagagaacaaacaagggcaattaaatgaaattgctcctttcagtccgtggactgatagtcttacgtatccattaatcaagccaatgggcgatgatggatacacaactggcattaaatatgctaagccaccatcgcgtaagcgaaaaggtgttcagaatgcatctggcctatttgactcggaagccgagtcagataatgagtcgtgcgagactcagtcaattgcatcatctgatgcggggtcagtcgcagattcagatgctgaatctgtagcatctgtttcatcgcagcaccggcggattgacaaatccaaacaatttatctccctgcgagattattgcaagtattatctcgcaataagggatgaaaatgtggagttgcaataccaccacattctttcatgtggtggaggacttggtcagcgctggatccttgaccaggctgcaaaaattgattggcaaatagcaacatttttgcgtagacctgacatggatctgcggatcagcactccaaaaaatctgctgcagtatttggtcaaccaatacaacaggcagcaagcacggcaaaaccccaatgcccaacagaaaactgttgatgacattggcagtgttgttcggctttccgaacacaacgtaaattctctccaatattggaagaaaatgtatgaagattgcaacaccgtttttgcacggtgccatgacgcgaagaaagcgcgtctcttcattactttcacgaacaacagggaatggcctgagttcaaagagaatttacacaaaaacggtcaagtatttactgaccgttttgacatgtggatgcgtgtctggagcagcaaaatcgctgagttccgagaagaactttatgacaaaaagttcttcggaacaatccttggttacggtgaatcaatggagttccaaggccgaggaggcccacatgcccacattgtggcgcaaacagacctggacgcagttccatatgtcattcaggaatacatatgggcgcacattccatctttgcctgataaagatgacgacacgcccattgcaaaaatgcatcgcgaaatccgcgaaacaatgcatatgcaactgcacagatgcagtgacagttggtgtggtcctagcgacccaatttacgggcggtgcaagaaggggttcccagccccttactcaaaatgtacgattttgcgcccggacaggcccgcgatgtatttccggccttcaccaactgatggtggtgcccaattagag

SEQ ID NO: 77068 - DNA, 821 bp, Heterodera glycines
atggcaccaccatcaatgtccaacacggtgctcatgccggacattggcgattgcgcggcggctgaggcgggcggcgcatcgtttacggcaccgtcgcataaaggtgtgtgctttttatgatatctgattattttgattagcattgtaattaattattaaacggaaggtgattaaaattctttatgattttttaaaaattttctctgatcattgccggtcaaaaagtgatcagaattttgtttaatgatcagaatttcctttgatatataatgtttttggattaatttgaattattttcaattagtgcaaaataatttttcatttgtttagttttgccattttattaaaattattatctgcctgttaaacttatttgtttgattgcgttgccccatcaaattcttcaatttaaggttctttgttgtatcgaagtgaaggcgttaaatggaactcttctcgcgtttcgtggagagctttcacattacgtaaataccaattataattaataaattattttttcattaaattgtatgaattcgaaattcagaatcaaccgacataatgcgcaagtaatacaaattttcctttttaaatcaaccaattttattaataattacatgaaatggaatagggcattttataatttgcagaagccccaaaaatatttttggcatttttcttggcatttctcagggaattgcgcatgctttgcttccaacgggacaccgccaaatcgccagcatttccgcctgtgtcacttggtgaattcccactgttctactcggtactgtttgacatggcatgtgggaggcgcaaataaa

SEQ ID NO: 77069 - DNA, 1173 bp, Heterodera glycines
atgcgaatatacctatgcttgttgtccttattaatttccgtacattatgctacagtaaacgaaccgcagaacaaaaccaatgacgacgatagtaatctgactctaccatcagtaaagttggcggtgggtgataattaaataattttaataattaataaaaaataataaacattgtttggtaataggtagttggttaagttcatttaaatgtgatttgagtgccagtcaaaccaataattagtattgaaagtcaagaccaagaatatctcgaaaaccaagatagagaattgatatctaaatcgatagaattgaacttgagaatcatatacctatgaattgttctcgaaatcgagaattggtccagcagaaaccgataagtgctccctagaccgagaaatgatttcaagatttcgaaaattaatcccgaaaatcaagatcgagaatttatcttgagaccgagaaatatctcgagatcgagaattgattccgagactcaacaccaaaaattgactggtagcggaaaatcgtgaagaaattctctgaagctataatgctctaaaatgtctggcactcaaatgtactgtggtactgaaccgaccggctcatttcggcattaagaaaaatatataaatacaataataatactaaattattgtagaacaatgtaaaattagctgacgaaaatgatcagcagaaaaataacgggccaccaaagaacggagttgcttttgtggttgaaggcattgagaggagcgattttggccaaagcctacgaacttcgaactttcaacgaagccgagcagctttaggtattattaaattgcaaaaattaaagcttctcacctaatgagtttgttcaaggcttccaaaattgtgaggacgaaagtttggccgttggcgcaaaaagttcgctgataaaagtgttttacgagagtcagcgggggccaagcaattacgagcccgaggcgagtgtgattaatgccactaattggctataattattagccagggggcaattccgtggcatcgaaatgaaaaattaaaaaatttatgagaaaaagttagcatattttttttatttgaagcaattatcaataataatttgtttttgaaaatttaccttaaaattaagagaaaaacatatgaatttttgaaataatttggaacaataaa

SEQ ID NO: 77070 - DNA, 324 bp, Heterodera glycines
atgagtgaaatggccgaactcaaagctattattaatcgcctatctgcaattgagaaactaatttcaacaaacaacaacaacacattggcgaccgaaatgactgcgcagttcagcgccatcgcggaccgcctcggcgaaattgagcgcaaattaaacaacaacaacaatggaattggcagtgcggaggataaggagcgaaaaaggagcctcgtgctcattggtcttccggaatcagaggaggaagtgccatcgcttcgagcgaaggatgacgcgaaaacggtggaggaagtgttggaccggctggacgtggaagtgtgcccgtaa

SEQ ID NO: 77071 - DNA, 1438 bp, Heterodera glycines
atggttacaatccaatctaactcccaaactctatttttaagtagctcaagaggtgtttggagcgaaaacaaagcgttgagcgttcagctgccagcgctggcggagggtgaggcgttggccagcccattggtcagtgacgtggactcggacggccaattggacattttgatgccggtgagttaaattatggatgcacttcattccccctaactcctgataaatttttttaaacaaaaattgaaaaattttttctcgtttttttaaatacttgcatattttaatggcaaaatatagatatgtgctattttcaggtctgtgccagtgctgcatgtacaattgttgctcgactgtggtgctacagtcggcagacagtgcgaactgtccaaattgatttcagggtttgtaggcctgggaagactgaggaatgggtccccaaggttgggaaattgtccggaatattcaacgcaaaaaatttgtattgtgagcgaaagtcctggattttaagaatttcttggatgtacgtaccccgcgtatcccccccccccatggggtggggaaacaatgtctgtctgtctgttcattactatagactggaattgatttgtctagtttagcaagtcactcttgtgccagagattgacggacaaaccattgtgccatttcgaattggtgatttctcgcagaacggctttccggatttgctcgctaccgtgacgccgccgggtggcagcaaaacgccaatgatttttgaaaatatacccgacgacggcagctacccgaggttggtcttggctaaataatgcggatggatttgtttcccctcaaaaaaaagaataaaaagttttttattccctacaattcaaattttttcttgtataacatttttttataacgaaaatttgtaatttgtaaaaataaaatttaaaaaaaaaccttaaaaaagcacaaattgcatcattttttacttaaaaaactattctaaattttaggaagtttgaattgaccaagaagcctgaacgtattttacccccgttgaatgacaaattgtccgggcttacaatgtctgcgttttttgacttgaaggaagacggaaatttggacatgatggtaaatatattattattattatacatcatccttaatttgtaaaaaggtctttcttagttggctcattttgtatcataattaattttaaaaattttcttaccaggttgaataccttgacgaagtgaaggggtccagcgtgaatttcatccgttgtgatgacaagggggacacaacctttctgaaggtgcaagtgttcaccagcaccgaatgcaccggtccatgctgtgagcagcagtatttgccgtcgtcacacagcacaaatggcgttcgtcaaatcaaaattggtcagtcagtggtcagagtcggtgacttttaccgacaacaattgtaa

SEQ ID NO: 77072 - DNA, 1751 bp, Heterodera glycines
atgccgaaatcgttggtcatgtccctgttggctagtgtgaccgctgcttccatagtcagcattggtgacaagccaatgcaacccattcctggacgggtttgtgccattgccgacatggacaaggacggcaacacggacttggtggtgcagcaaaacgatgtgttggtagtttacctgcaagcaaacgacggcagcgaatttaagcgagttttttaaggagtttgacatgctaatatttaaaattgttggttcaacaaagtgtccgaatccgaaccaattcgatattattggataggctaatggctcaaaattggaaaaaaaaatttaatttgaaaaaaaagatccaaaaatcttcattgtcagctattggtccaatttaggaggtccaaaacggagctgacattgccggccggcgttggccaagtttcctgtgccgtgggtgatttcaacggagacacgtgtcccgacctgcttgtcatccaggtatgcaataaatggacaatgtttcgcattagtcatttgttattttctatctagccttttttgtttcgtttcgtattttgagatatatttttgcttttgcataactttaaagttttcccgaatttggtctcgacgaaaattaaagttaacgaatttttcatttcggaccacaaaagactttttgctaaaaccagtggtaatacaaattacaaaaacatttttataattatttgtctttatttgtttgtttttggctttgtccttgtcgcttttgtgcccgtgcacagtgtttgtcttttgtcgttcttttagacgttccaagccgacctgaacatcatcgacaaagttaaggcattgttcaccactacagccgaatcgcagtacgctgccattttgtacctgaatgacggcaacgacacattcactgagcaccaagtttgcgatgaaaacagttacgtttttctttttggtatttaataaatttcagaaaaaattattagaaaatttttccttattgttcaacttattaaaatctagaaaatcctataaaaacaacgtttaatgattaattgggggttttcaaattttattcaaaatttttggttaaaagagattgaaaaaagttttctatttttctgaaaaaaattttaattttggtatagaattgagattttaagaaaaaactagcttggtttaatgatgtgtcgaatttcatttttaaaattattataaattcgaacttgggtactattttttaaatttttgcttattcttaggtttggaaggcaccacccccgtttctcctgaccctggtccgccgaccccaccgctgcattgtccaaccaaatttttggaccatccaactcttgtggacatcaatggcgacggtgtcaccgatttgctcggatttgtgcagcgaaagagtggtgggtaaaaaaaaaaatcaaaattttaccaattttcgcatttttttgcctgattttacgtgacaaaatttagcggacaacgccaaggaatttacggagctgttctgccttgagggcgttcggcatcaatcttcggcatcggtgccaaaatttcgtcactgtgagcaccaatttccaccggtgcccagtggtggtgtcttccccggctttacaccaattttcgccgatttggacaaggatttgagtgccgaatttgtgtttctggcagcggacaaacgttcattggtcgtgtggagccagtccaggttcatctcgttttgctccttcctcgttactctatga

SEQ ID NO: 77073 - DNA, 2045 bp, Heterodera glycines
  unsure (1)..(2045): unsure at all n locations
atacaattgtgaaaatttcaatgaaagagacgttatttttatgagccgnaaaatacnagagaaaatggtggaaaaatcagagaagaattggaaattgtttnggacagaaataaaagtgtttttgctaggcatgaatatgaccttggcacatgtgcctattgcgctccgcctattctaacaacctccgaccttccggagagggttcggccttaccccgtacctgaaaagtatgaggaggaattgaaggcacaaattgaaaaaatgttaaaatccgaggtgatcagagaaagttgcaccccgtgggctcacaacattgtccttgtcaaaaagtctaatgggcagttaagaccgtgtgtggatttccggccgttaaataaagtcacggtcccagacccttatccaattccccgaatggataaaacaattttacgggcagctggcaaaaagtggtacagtaccttggatttggcctcagggttttggcaaatcccattggaccacggacgcatccgcagtcgcatatgcaggcgcactaatgcaatcagctgatgagaatcaaatgcacgctgtcggtttttggtctaggactctaaactcgacagaagctaaatttcctccaacacatgtagagttggctgccatcgtccatgcagtccaaaatttcaaacccataatttatggagcagaactgattattttaactgatcacagaccgctcactttcctattttccaagtcaagctcaaaccccaagctgaatcggtggttaatgtcattacaggaatttgaacccaaggttgtatatttggaagggaaagcaaatcgggtggcggatgccttgtccagagtcccgattaaatgggaccaaattgaatcaaaatgtaaagaagacattccctttttgctggtgacagatgaagaaaatggttttgaaattaaccgggagaaaattgagaaagaaaccagtttagacccaattttgtcacaaattgtctcaaaaataaaggaaaattgggccgaaccaattcaggaggagcttaatgtgtattataagcaaagagatcaattatatttggagggaaatttgatcagaaaaaagccactgagacaaattgtaatcccggagaaaatgcgaaattcggtactaaaattggtgcacagggcacattttggaattgtacgaaataaggcaagggcaagaaaccagatttggtggcccgaaattggagatgatgtcgaaaattttgtaaaaagttgttggatttgtcaaaagaatggatctatctaatccacccaaaacggatgctgcttataaatggcctgattccaagttcccattcgaacgggtccatgccgacttagccgggccaatttggggaacgaatttttttattttggttgatgcgtattcaaaatttccattcgtttaccaaatgaattcgactcattcatcggcacttattaattcgctccgtgaattatttggaatttttggatcaccaaaaacgttggtgaccgacaacggcactcagtttgtgtcaaatgagatggagacgttccttcagggggaagggatacgccatttgacatctccgacataccatccttcatcaaacggcgaagccgagcggtttgttcgcaccttcaaagaaggaatgggcaaaatgttggaagatggaaagagcatcaaaattgcgcaatttattttcctgcaggagtacagagcgaccccttgctctgcggcagaaggacaaagcccttctcaaaaatttttgggaagagaattgcgtacggagttggacaaaataaaaatgtcagcaagtgccattgaacgaaaaaggcgtctgttgcccgaggcaaatcgtgaaaagaatttggttacgaaaaactttaagcccggagacttggtttgggtaaaagagccaaatggcaaatggacgcctggtgttttattgcgcccaattggtgaaagaatttggaaggtggagcctgagggatgcaccattagcaaaagtgcccatttggaccagttaaaagcgcgacgc

SEQ ID NO: 77074 - DNA, 1120 bp, Heterodera glycines
atgcccggtgagtgccggacgacagacaaacacaattttggtggcatgggggcatttctcttctcccagaaatggcatttcaaactttgaataccaaaatatgttgaattggaaaaggatagcacaataaaaatgaatgtattttttaaaattttaatgaaaaatctgagttttctaaattttaacaaaaaagtaaaaaaaaaatctgtgaactctttttggaaaatttaaaaaaatactttcattggatttttatttatttatttttcgttttttttgccatgattttttacccctcaggcgcaccagtgactgttgcaagtgtgaacattgacacggacactttgctgcgcacgcggcacaccgacgccaaacattcaaacgacgacgaaaaccgggagaacgacggcaaatttgatgatgctaatgatgatggagaggacggggaggatcaacagaagggcggcgaagaaacagtggcaaaagagggggaggaagaagaggacaatgggatgggaattgaacgacggggacggcacaatgccaaagctgaaacaattggtggtgctcagctggcaccgatggtttcggttcggcgcggcacggtggtggcggagacgcggggcggcaactacaaagtgtccatcccgttccgggcactcatctacacagggtccgacccgaaattattttaaatgacgcattttgttaatgggttttagacataaatttttaaaatctaacaaaaaatttaaaattcgaattgaatttttcccatttttcagcgatttggagcacgagacggaggccaccgcctttcaccacgcgttggagcccattgtccgccgggaagtgaccgtcaccaattcgttgcccttcggcctggccgtttggggcgtcgaactggccgagaacgcgacaacggcgtttcaggcacgttgcccattttcggaatttgctcaaacaaatcttttcgagactttaaattgtgtttctcgggaatttacaaatttttcgtaatattctaagaattaagaaatttaaaattttccaattcccattttttcaaaattatttttaaaattcaattttgacccaactttacctcatagcgaataaa

SEQ ID NO: 77075 - DNA, 990 bp, Heterodera glycines
atggtcgtctccgagctgtttgtcagcgactgcaacgtgcgcattgaactgaacgatggcacaacggtggcaatgcaaaagcgacgatgggacggcggggacaaaagtggcggcagaagagaagcgatggattgggtagaaacttaacttgttggacaatttaccatgggggatttaaccatttaaccgagtaaaacatggggactatttaccatgcggatttacgatttacagagtataaattcggagcaagtcgtccctctcccccacctggagtttttttttgtttttcaaaaaacttttattggaaaaatttctgtttgaaattttaaaaaacttccagaggttactgagcaagaaacgtggcgtattttatcattgagaatttgacatgaattcccaaaatgctggactctttttttaccagggcatgttaagttggaagtttgctaattaaaatgccattctttgtgcaaggaattggttaacacaaattcaatttggtaccaaacccgggaaacgaattccttcgtttcgttaaataacttttttttacatatttttaccatggcttttatgaatgcatttggttggaattttgtcatccttttgcctaattttcagcgctttcgtccctttgaaacacgcgaaattggacacgccaaagtgttgggcaacttggaacggaacagcaccgcgtttattgtggcaaaactgcgcagaatgggcagcggcgatggttggaggacaacacattccccgtcctcgccatcggcaccaaacgatgccacggcacaacgccagcaaaaaaacgatgggtccgacgacagaaaaatgggcggcgatgatagcgatgccaaaaaggcggtgccaaaagagcagcaaggtcaactttggcacaaccatcgcaagaaacaaccgaacgccggggaggagggggaaggggacgacccatttgcccaattgttggttgtcgcaatcggagtgcag

SEQ ID NO: 77076 - DNA, 972 bp, Heterodera glycines
atgcccatttcgtgcggctccaccacctcccaatcggcggaactggcggaagaaacaaatggcaatcaatatgacgacaacatcaaagaggtaagtcaaggcgagcaagaggcgttcaattccattggacgagaccgctggtacaacaatagctgatctgctatttctacgatcgccgtcttcaccccgcttttcggcgcctgcttcaaataagaggaagttgaagcgaatgtcgcttgagttggtcagaaactggagctgtgacgaaggatcgttgaaatagtgtccaatgcggaacttgtacacctgccttcgccaaatcaggtacacatggtcagctgcaatgaaataatccgttttttgttccggcaaaaagccaacaaaattgcttctcagaacatgtgccgtcctgttcagtgcattgtcagtgttattcagagtccaccatcgctccaaatcgccaatgagcaattcgttgattcggcgttcgctattgtccacaatgtacaatcgggcggcgatatgatcatacaaaatgcgaccatgtgcactcaattgccctgctattttttgctggtgtccacgaagaacggtcacctcacccacggcattttgaaggttgaaaattacaaaactatggccgccatgcccaaaacatgcccatggtaaggcggttgacggtatctcaattgttgtccgtcccaggctcattaaattatccacatctgtcagggcaatgttccacgtatccgggttggtgtacagccgattgatgttcctttccaactcaacatggcatgctgtgtcccggttatagccgaaccaatgttgcgccggtgaagtcttggaaattgtgcgaaatgaacggtcaaaaaagtttggtgggtcaacactcagctcaacattaatccattcgccagcagatagacggagaacatggaaaaaaattacgatgaaggcgatcagcaagaa

SEQ ID NO: 77077 - DNA, 3239 bp, Heterodera glycines
atggacgaattttacattgtacttccgtccaacacaccaggctcaacgaatacggcatcaaattttacggttcggcttccacacacgttggagttggactcaaattggaccgtcgctctagcatctataatctacccttattcatttccatcagtcggaattgatgaggatgatatcattagcattaaacttgttaacccgaactatagattcctagacgacaaaaaatttttacatatagaactaaaggttccaagcatgcaattttcgagtgtagaacatttgcggctcaccctgaacagcctcatacgtgaggtgtatcagcagcagcaattttcttctggccatgatggagctagccggacgaaacggcaggtcacagacctattttttcatgaaaatccagtggattattgggaaaagattggcgaattacgcaccaaacaagagcagttcgaaaaggaggtaaaacaggaggagagtgaactttcggcagacactacggatgtggagaggaaaaaactgatacaaagcgagcttccactcaaacggattcgtatgcagaggaaaaaggaagagctggaagagttggaacgcgctgctgaacgtcgtgatcaggaaagtccggagaatgagcaaagaaagattagcgattttttccaacatcatcccgaagattataacaaaaaattgaacgagtcaagacttatattcacacaacatctctcggggctgcaagaggtgatgagcaagtacattggtgaaaaagatataaataaaattcgtcagcttaacaccgaggttggcaaaatacgcacaaaaataaaacacatgcagcacaatttgaccatctttgaaaatgctgcgcttcagcgtgaccaccaaaaatctttgtcggaatatgaggagctcagccaccagcagaatagtgcatttgttgaggaattttttcaaaaacatcccaaaaattattggcaaattattcacaacaattataggggtcttacagaacattttcagaagatagaagaactgcaagcaaaggcagtagggttaaaggataatgcctctttcgaaaagcaaatagagcgagcaaaacagatgattgagtacagacgaaagagattcgctgcgctggaatttgaggcaaaaaagcgtgatgagcaacaacagtttgttgcagcagcagcaaatacaattactgcaccgactgcgtcggcattgatcggaagggaggcgttaaaaaaacgtacaggcatctctgccagaacggatggtgaagtaggtgataaagcagatgtcggtccacaaacagctaccacaacaacacatggggaggtattaaaagagaaaatactggagcagcaaaaacacacggacaacgatgataaagcagatgtcggtccacaaacagctaccacaacaatacatggggaggtattaaaagagaaaatactggagcagcaaaaacacacggacaacgatgatacagcagatgccggtccgcaagcagctaccacaacgcatggggaggcagtacgtgagaaaatattggatcaacaaaaacacacggacaacgatgatacagcagatgccggtccacaagcagctaccacaacgcatggggaggcagtacgtgagaaaatattggatcaacaaaagcgcacggacgatgatgataaagcagctgtcggtcagcaaacaatcccaacagcaacaaaaacacgtggtgagacgttaaaagaaaaaatatcgcaagagcagaagcacctagttgacgataagtcaaattctgccaatgcaaaacaagatgatggtagcggtactgatgagaaaatcgcgcatggtcaaacgctaattgcccgacttaaacagagcgaggagcagaaaaaagaatggggggacccaccccaagataatgatgatgatgggcgagcgccgaagcatggagaaatgctgtggaaactgttgcgatcaacggtgccgactaaccaacagcaaatgggcgatgtcatccaccaccaatttgctgatgctgaacaaacccgtggacaggtactgatggagctgttgaaaaacatattagaagaaaaaactgacactgcggatgcacagcaaaattatcaccatctacagaaatcagcctatctttcttcaacactgcgaagaggtgaagcgttgaaggaactgattaaaaaaacacaaaatgaacctttgcataaatcctctgcaaaaacgcgaggagaaattttaaagttgatgttggaacatatgaagttttccagggaggaagaggtaagctttgaaaaacttgtcgccaagcagcaaaaagagtcaaccgctgccgagtttgtgttcaacgatcttgcacaacggttcgttctgataaccggtgcgggcgttctgcatgtggatgtaagtaagcatcttgcatatgtgctaggctttgacaacactcgtctgtttcatggggaacaggcacgctatatgccagatctgtctggtggtgttaaacaattgtatgtttatgctccaaagcttattgaggagtgtatcataggtgaccgaatggctcctctgcttagagttgtcaatgtttcggccgcacctgtcagtgggggagggacggacgtgcctgaggttatatataccaatgaaatatttcattcacttcaaaacaaacgcatttccgaaattcgcatagaaattcagaacgcatttggacgatacgtcaaatttaattggggaacctgcattgtcactctgcattttagacggaaattattttaaaaaatatcagcaacaaaatgactcacgtcacatttaacccggatagcattaattggggacctcttcttgctttagaacaagtgggagggggagaaatgcaatattttgttggtacacggcatcagcgtggtgctggtctattgagaaatgttgcccgcttcctgatgccggtcgcttccaatatgctgaaggcggtgtcacgcgaaggggtgactgccggaagccggattatggaggatctttcgcagggaaaggccctcaaggaatccattcaggcacacgcaaaacatggtatggaaaacctggctgaaaaattgaagcaatgtgggaagggagcccccacaaggaagaggaagagaccggtgaaaaaagtgaaggtgccattgccaatgcattcgttgagaggcaacaagagacaggcaatagaccaactcacatttgcgccttaa

SEQ ID NO: 77078 - DNA, 1925 bp, Heterodera glycines
atgcgctgctccttcgctttgtcccttctgttcgccgtcggtgttcagctgctgattttgagaatggccaattccgaaaaggtaaagccaagggaacggagaatggcattccctggagaatgacacttttgaattggcaattcatcaaaatgaattaattccctgcgaaattctttggcccatggccatcttctgctaagaagagcatttttcaggaatttgtaatggccaaaagagagatgcgcgatggcaccgtcccactgagcttcaaaatggacagaaatgcctttcggatgagtttcggcaagcgcaacgcggtaaggccaacaaatgccttaataagccaataaattgccgcttttcctcccaggctttgcttttgccattccctgcggttcgttcttccgtcccgcgtccgttggacatcgatcggaatgcttttcggatgagttttggcaagcgaatgccgatcagtgacggcagtggcgagcgaatggtaagggaattcgaagaacgctaattgaactcccctccccccccccgcctcaacagaatgccaacttcggtgccaaccaccaattccgcgcgttgtgggctccggccagcggtggatgggaggcggccggcatttccccgaagcgattggacagaaatttgtttaatgtcggatttggccgacgataaagcgaaaggcggggagaagcagccattaattgatctcattttgaccacaaatttctgtttttaagaaagaattcgaaaagacataaaagtttagatttttaataaactcagaaaaaatgccaaataaaaaaataaaaataatttttcacaaaaccattaaatgttttttttttggttttttggctgggctttccttaacattttgccgtttctttctcttttttctttgtcccgagaatatgaaatttgccgagaaaaaaagaaatgccaaaaataaatttcgaaattaaaatcagtgaatcgaatgaatgaaaagcgaaaaacaatgccaaaagaaagggacaaattttcggccaaatgccaaacaatcagtggagaattgagcagaaaatcatgatgaatattgttaattttatttgtttttgtttttgcctaaaaataagggaaaaaattggcgaacatttgcaaatccaacggagaatttacgagcataaatattattaaataaatcactaaaatccctctttctatcccaaatttttaaatatttcaacaatttggtcgctacagtatgttacttggattatcgtattcatttggcgttattcggtcgattgaatttccacttttttctgatccttcgcattccgtcggtgcaagaaatgacgtcgacaaaatccaatgcttttgcgatttgcattttgtattaaccgtcatgggatttcgacgacattaattattaatcccccaaaattcgaagtgaatctatcaaaatccgcggctgattatctcgacaaaatgaaataattcaaataattttattcaattttttttctctcttcaaaatttgtctgtgccttccattaacggattacctctttgacaaaaaatcacaaataattcatcaatttatccgttttgataatatgtttcattttttgattcattttgaaaattgtccattttttggaatgaaaattaaactaaaaatccctttttattttttaagttccattattaaaaatgtctgttattttttttggtaaatttacattttttgtgccattcaaaagacttatataaattgaccgtcgtcttgtgatgctggcgtaaaatgcagctttcccttcctaattaggtgctttttcttatttttgcctttgtactgaaaataaaaaataaaaatccaaaaaaattccaattttcaggaaaatgtaattttgattattttccgtttttaa

SEQ ID NO: 77079 - DNA, 58 bp, Heterodera glycines
atggcaaattggcaatgcttttttgtttctgatcattggccaacattaattgcttatg

SEQ ID NO: 77080 - DNA, 122 bp, Heterodera glycines
atggacaaaggcggagaagtgaccggcggacggacggtaatgtgcgacggagcggcggttgaataccgcgggacattgtttatccgacgggacgcatatcgcgaagagaaactgccatatcc

SEQ ID NO: 77081 - DNA, 682 bp, Heterodera glycines
atgctcggaaaaaacattcatggcattgaattgcccgtcggaatttttcatcgtttgcgtcaattcaccccgtcacttctcaatgaatgtccatcacttcgcatttccaatgcatattacttttgtttcttccccgaattcccatgcaatgacaatgccgcggcatcggatggacaagcggtggccaaatggcttttcactccacttcaagacaatgtgccaaaggtgttcaactgttggttgcaaaatgatgaagcgaatttgacgtccaaagttgaagttttgattgatttggcacttttatgggcgttgggattttctgacaaaaacattaataactacataattaaaaattgtgcggacaaaaatggtcttttcctaagagaaaagtgccacattttaccatttcatttctttatcaatttgctccatattttaggcttttgcctcggcttcatctccgtccaatttcatcatttccatttcgtttcctttgccttttgcttcctccgttgtaccatttgctctaaccaacgaattgactcgggagcaattggtgttgaaaagaactgacaataaccgccgttttctgctgattcgggctctactccagtttatgcgtccaatcgacttttatgcgtccaatcgctttttatgtatcaaattatgtttttttgccaaa

SEQ ID NO: 77082 - DNA, 282 bp, Heterodera glycines
atggttttccactcaatcacagagaagattttggacaggtaaaagctaaaattatattaataaaagatggtaggatttttaattaagcagctgacaaatgagtcgattttgaagttttaaaataaaaataggtaaatgttttacttttttgattttatgagtaattacaaaaatattttctaattgataagtgatattgttttaattattcaaaatacaaatttaattttagcgtgaatcattcacaccaaatgacaaagaaaaagtaaaagaggtaataaa

SEQ ID NO: 77083 - DNA, 142 bp, Heterodera glycines
gcgcgaagcgcccgtctgaggccgcgaagctgccttaatagcccaacaaatttagaaacgggcgcgaagcgcacgtataagcccaacaaaatttaaaaaacgggcgcaaagcgcccgttcgaggccgcgaagcggcctaaaa

SEQ ID NO: 77084 - DNA, 1217 bp, Heterodera glycines
ttaagacaaattgttggctggcgcggtcaatggaatggcacttttggtggcgaagggaataaccgaatttccgagcaacgttaaattgagtggctatttggacgtttattggattgtccgagatggcggactgtgtgtgctgatcacttttctgctgaaacagagcaaagtttggcgcagttgcaaaactcgaatcgttgcagtcgctcgtccgcaagaaaacagcgcaaaactgaagaaacagctccaacactacgtttaccaattgcgaatcgatgccgaaattttggtgggggcgcgggaaagcgatcggacggttcattttgtgcgttcattgtcaggtgacagaactcaatgacccagaactgtcgactactgcttacgaacggactttgcttatggaggaaaggaccaaaatgctgaagcaaatgcaacgacgaggaatgccctcgctccaatcgacccaactgaacgacgaagcgaacattggagtgactgaccgacccatttggagcaaatggactccctttatctgttgcatttcagcctaacacgcaaagtcaggaagaggagacgcaagaggaacagacaaaggcatcgactgatgaagacgcatcggaagagcaaacggagacgaaaggacggaaggaagggcaagggacgacggagggagtccaagtggcagagacaatgtccacccaacgaagtgacggcacagccaattgaccgttctttttccaggaaagaaagtgcacaagcggagacatgcgttgacactgagaggagacagcgaatattaaaggcattggaccgaagaaaggtcaacgaatggacgaactttgacaataagtggggggggggcggggaaattatcgaagccaaaagagaaaagtcatcaaaactggaaaccgaaatgcgaaatatattagaaatataaaaatgggatggtccgtcaccgcatttttctctaaaggtccataaaatgcacggggcaatccgactcaatgagcttattttggaacactcgcgctgcagtcaattggtgcttttttctcttccgaagccgcctttctttgaggacgaagtggacgactacattcagtatttggaggtgtactttgacattttaaacgcaacaaaatgaaagtgtttaggtgatttcggacaatttgcaaaaagtgctttttgtccgggggacgggcgcagaagtaatcaca

SEQ ID NO: 77085 - DNA, 705 bp, Heterodera glycines
atgcatggaagcattggcgttggtgatttcataattggcccggactcatccgattcagatggaaaagaaaactcagggcagggaagtgcaagttggaaatttacaatttatttataataaaaattttttaattaataatttaattacgtaataaatgttagaagaaaaaatttaaataaaattttaaaatttgattgatttaaaattatcaaaaacgaatgggggcggatcttttgatatcaagagatttttctagccatgttattaatgtcagggaacttgtaggttttgtcaccatcccgccttgaaaattttttccagcgagttacctgaaaattcacttgaagtgaaaatttgtgagactttttgttcaagtttttttacacgtttttttatttacaaaaaattctaggcttcaagaaaatttaattttttaaaatttattaggcacttcatttgttgcgggacaaagcactgattcttatataagcagtttaaaagccaaaattattgaacttgaaaaggtgaagactgagcttgaagtagagaaaaagcgtcaagaagaagcaaatcagcaattttacacttattggtgtaatgaaaatgccaaatttgaaaaagttcaaaatgagtttcaaaaatttcaattgtaccattgtgtcagaaaggcaattttggacaaaattgttggtacaaatgggggcg

SEQ ID NO: 77086 - DNA, 2121 bp, Heterodera glycines
cttggcaacgtgaatgtttggaggatgagcgactggtcgaagggagggaaaatttcgttttatggctgccgacgggggccgggaaaacggtggtcgcggaactgatgatgctcagggaatgtgtgcggtggcgacgcaactgtttgctcattttgccatatgtggcaattgtgcaggaaaaggtgtgcaattaattccttataatttccgtatgtaaaatccgttttcccttccgattattccatcttaccctttaggttatttccctgtcttctttcgaagaaaaattgggaataattgtggaggaatacgccgcggcgaaagggcgtttcccacccatccgacgacggacggccaaatccatttacatttgcaccatcgaaaaagctaatgggctggtcaattcgttgattgagaacggaagggcacacgaattgggcctggtcattgtggacgaggtgaaaatgtaaaaacaaaacaaataaatgattgtttggcacccaatttgtcataaatggaaatgccctaatgaccttacgagtcattatgtcctccttagattcacatgttgggtgagcagggcggaaggggcgctttgctggagcagtgtctgtgcaaattgctcttccgtcccaccaatgaacagcaacaggaacgagttcagctcattggaatgtccgcaacacttggcaatgcttctgaactgtgccgttttcttggtgccaatctcttccgaactcattttcgacccgttgcgctgattgaaaggataaaattgcacgacaaactgttcagggtggacgagcagggcgagtggaggatggagaaggaattggagaagggcaacaaagtcggacaattgcggggggaggggggtcacaaaaaacgaattcatttggaggaactcgagaggagagacccggacggactgttcaaattgttgggcaatttgctcaagggatctgtgctcattttctgtccgaccaaacaaagctgcgaaaacgtgtgccaaatgctgtccaatttcagtccgaagttggcatttacattattatttgttttttttttgtaatttcccattttcagacaattgcgtgaccatagagccgatgagagaaatgcactgatcggtcgacttatggacgaacacgagggcctcatctgtccggtgctcagtgcgtgcattcgcaacggcgtggcttaccaccactcgggactgtccagcgacgaacgccaattggtggagggggcgtacaaagttggccaccacttctttatgtctgtccattttatattctccatttccttgtcagagtggcattatttccgtcatttgctgcacttcaacgctcgccgccggcgtcaatttgcccgcgagacgagtgatcattcgaagtcctcatgttggaagagagcagctgaagaaggcacaatatttgcaaatgattggccgggcgggcagggcggggttggacgacaaaggggacagcattgtgatattgcaccacgggacagaggcacaaacggtgggcaattggcaattaaaatatcatgagaaatcttttagttcaagaaaatgcacgagggacccattgagccgtgtctaagcggactcagtgaccaagtccaattggaaggcttcttcttggatttgattgtgctcaaagtgtgtgggtcattcgtcttccattgtccaattgctcctccttttctcagctttgctcctcactcgacgatctcttccgatttctacgccattctctgttcggtgttcagcacactgacgacacggaattgttgtcctttgtggaacggactgtccaatcgttgctcgacaaaaagatgattgttcgacaagaaattgttccgttcttccatttcaaatggaaaccctaattcatccattttaggacatgttcgaagccacacaaatcggctcggccactttcaacgcgaattttaacccccaaatggcacttgacatgtgcaacgacctcggcgccaatttgggcaaaggcatcgtgctaatttcgcacttccatttgctttacaattgtgtgccgttggacgtcgccgttcaagtggactggaatttgttctacaacgaagtcagtcagtctt

SEQ ID NO: 77087 - DNA, 2340 bp, Heterodera glycines
aggtcgccgatgggttcaccgggtgaaaccgatgcgagtggaggcgctgtttgtgttcccgggcgaacgttacgacattctaatcaggtacatgggccaaacgaacacttattagccggattgatcagcataaaacgaattccccccaattcagaggactcatttcccctcgtcggcgtttataccgaataattgtcgagacgatggaatacattaattgggattggactcatacgaaagcaccgaccgtagggcttgccaatttgtactatgaagactttgttggcacagaaaaggcagtagatgttgacataggttggcaattagcgttattttccaatttaatttcaaattatctaaaagtggattggacacatcgccaatgcacgcccgaggcaaaatgcaatgtgctgaattgtccctttgagcagtttccgccatctttgaatttgacttgtgtgtccgcccatctgttggagagtgcggaaccaatcgaagacaccgaacttttggaacaaaaagtgttccccaaggactcgtttcacgtaaacatgcgtaattaattaattaattaattaccctcatagtattcatcaattaaaccgtcattaatccgaaagagtcgtccaacggaccactcccccctcgtcactaattgttaaattattatttaaaatgatttcctcacggcacaccggtggtatttgagcagtctttgtgccttctcttttcaggaagtgttcgccaatatgcacgcggacaatcacttcgacggttggctgtttgagcatccgtttggaattgtgcgagtttggcacaaaattcgcacagaattgcgcacgggcagcggcaagggctgaaaacttacggcccggaaggcaaaagacacgaaaattttccagaatttagatttttctttttactaattatcctgagttgtggtttccttaaaaatttttgtgtccggacgggtagaaatttcgggtcggggtcacttcagcgcggaccatttcggctccgccaattttgaactgccataacttttttgtttgacagttaactgtagccaattaggcattttgaaagctttatttgttctcgacatttacatgtcaaatttgaaaggaattttcaaaagtaaataagttatggcacgcggtgccgaaaagccaagtttttttggccataactcttttgtaaaccgacaaaaaatttttaaattttgcatgctaataaagaaccttaagagctatcgaatgataccaaaaatatttaatttgatgataatgagaaaagttattagcaacggcgccgaagtgggcggtccttgaagtttttgggttcattgcgctgcatttccataagtttaaaattatgaatgtcctccccccccccaaatttaagccgtatttcaaccgtgacaatttgagtcgtattgcacggctttgcgacacgagcgaaagctgcagcccaaaaacgaacgcacattgggtgttttaactgacaatttcggcactttttatcactttttttgtcaaggaccgttcctgcgattgttttgttcacttcaacttcacattgggctccgtcgttcagatcaccatttacaacatgggcgacatgggcaacccccacgggccggtacgatttcttagggccaaaatgcccccaccccgaaatttgttgcagggctattcgcacccactccatttgcatgggactcatttctacctggtcaaagttggcttcggcggataccacgcgaacaatggcagcatttggacaatgaacaaagacatcccatgcatcgacgataaagtacataataatctgagataactcgtatcaatgccttcaatttgtatcaggagcgttgcgtgggactgaaatgggccaactcgacttggctgggtggtaatgtgccggccatgcgccaaaggccgtcctcgcgggacacggtcaacatcccggtcggcggatatataactatacggtaagcgcgcgcgtccctttctttgactgaatgccaaatttatttccgatttcgcgctttaaatgccggctggtggttttcccactgtcatctgatgctgcacaatatggtcagttgattttctaattgtaagagacccattttaattttaaattaataaagggcggcaccgcttttgcttttcgtgtcggcaccgacgaacaaatgccgaaaccgccggacgcatacccacactcatgcggaatataaagacgaaaagtcaaattggggacgccatttttggcattctctgggtgtcaattccaaatgtttttttaatgaatttaatgaccatcaatatgtttaat

SEQ ID NO: 77088 - DNA, 1725 bp, Heterodera glycines
  unsure (1)..(1725): unsure at all n locations
atgtatgaagtgccattcccgtcgccggctcgtcctcgcgtgttggttgagcttggcagcgacatgatcgcttttgaaagcagcgatgacagtcaaacgccattgacgggtgctaattttgtggagacgttgaagtgccttggcacggaaaatttgctctacgccatgctgctgacactgcttgaacaaaaggtgtttttgttttccttcacagcgaatagagcaaacatcttacaattaacaatacattttgtcgaatccgtggcattcccaagatttaaagtttcctaggccttttttttgaaaaattctttgtttttgtaaattttcacaatttttcggtaactaacgacgggggatgccatatttgaaaacaaatatttatataaatttataccactttcttttgctcattgtcagcttcttgtccattctcttcgtccttggctgctcacctgtgtggcggagacactctgtgccctgatgttcccattctcatggaatttgccctacatacctcagtgcccgttgccgttgggcttcgttttcaacgcaccactttcattcatggccggcgtcgattcacggtcaaaatttgtaacttctcctttttattccgtaaaaattctatttcctagacccatttttagtaaaatttaaaaaaaaagaaggatgccttaacattcatttcattaacacaatgtttgctgaacattttaagctattttgatctctacgaggagcctccgtcggatgtgacctgtttcgacttggacactgcaacaatcagccaatcagcggttcgcaaattgtaccaactgtccatgttgccgaaaaagccgctgaagcgtctgcgtgccgcgttggacgaaattggcacaaaaattagtgaaaaacagcccaagaaaggcagcggcgctggcggcggtgccatggactacgagcaaacacatgcccgacgaatgcactccgaactggcaattcgggatgcttttttgaggtaggaaaatttgtgataggtctctttggagaggnggggggggggggggtttggaaattttttaataattttgtacagatttatgtgttgcttgatggacggctacacggattttctctgtccaatcatggattcgccgtggaaaaagggtgccaccgacgtgtgcaaactgtttgattgggaacactttatgcaatcgcgggacaaaaattccatggaattttatgcaaaatttcgcgagaccacctgcttcaatcggttcatcgaggaacggtcgggcgcaattggcggcgcggaaccaaatgaacaaaatagtgagtggcacagtagttggttatgtacatgtataggaacaactatgatcaaaaactatgaaaattttttttgagcgatgagcaaaaaaagtagggatgaaaatttcgggaaaattactgtaatcttacccaaaaataaaggctattttttaatactggtattattctgaaattcaaaaggcgaggacgcacacaatgagaacggcagtagcaaggaagcaccaacggtggaggacaaaagtgttttctatgtgttctttgacgattgcatcgcaaaactgcgagcaggtaagagggaaatgattttgaaaaaggtgctaactataaaaataaaatttggtgaagattgacaacatttttgagcgaattcgatttttttttttaataaataatttgcttaaacaaacagag

SEQ ID NO: 77089 - DNA, 1072 bp, Heterodera glycines
atggagcaaattggagtgcctttccatgaccaagtgtgctaccgtttgttgatgcatctgtgcggcgcctatggacgccctgaaatggcgatcattgtcctgaaaagaatgctcaacatggggatcatcccaaatgcaatcacatacaaagtgtaccacaaagcactgatccaagtgggtgttttattttgtgcgtgttcagtgcccttggttagggttagaaagaaaattcagaaaaatctctagaaaaaggaaatttttctttttacaaaattttcaacgtttaaatattggccttttcgccgcctttcagagcgaatggccctccgaactgagtttgtcggcaattgctgcttggcgtcgtgtgcagtttaggctggacgtttgtgcccgctttcgtgcaatgttgcccaattcagcgaacattttgccaccaccggcaacgcatgaacaaaagctgaacgacatgacaacattgtcaaccacgaataccacggcattggaggaggaagaagaggacgatgataacagcaaggactgctcaaacattgtgcaagaaatcggtaataatttttaaaagaatccttaaaaatttaaaaaaacagacttttaaatacgtatgcaccttttaacatcaaaataaaaaaattcaaaggaattatttagaaaaatttattgttaatatttatactaaaacaaaattaagagaaaaaaaaaatttttttttttaatgaattctggtgaaactttaaggaaatttgacattacaaaatgtgcacaccctaacaaattcagtaccaatgaaaattgttgaaattgacgagcccatttgtgagcagcagcagcaactcctcaccaatcatcacttctgtaataacaacaacaacaacaataataataaaatcacaaaagggaaatcgacaacgatggcaaatgccaatttgtttgatccattgggtgcctctgttgaattggagaccgccctcaacaatgtttctattgttggcaatggcacgccagtatccaggccgccacaacaccaacacaatccaccgccaaaaccaccgagggc

SEQ ID NO: 77090 - DNA, 670 bp, Heterodera glycines
aaaatttggacactgtgagtcgggatgatagccttgtttcggatgcacgatcagcgtcaacatcatcagcagcagttggctcaccaagcatcctttcgttggcaaacaaaatgcgtaaacgagcaatgagaagtgagttgaatttgctgaagcagtttaacccctcgcccacaaaataagaattttttgcaatttatctatttaaatgttagttttaaaaatcatcaagaaaagcttttaactttaaaattctagcatacaacgaagtggttggtcaaggtgtcatcaacgatctgctggaacggtccggactgaacagtccggcgcaaattttcaaggaagccaagctgaacctgagccgatcatatcgcgctgctgatcagtccggtctgtcaacaatgtcctcatcggacgacaatttgttcgccagtgatcaaaccggagcaatggacttattttttgtaggcacatatttatttgtacgccttatttttgattaatattcgccataactgttttgcttgttgttagatttgtgctcaacggacacgagatccagtgtcaattcactattggatgaatgacattttgccagatgatgacgctgaactcagggatgtttggttgcggtacagtgctgggccagtcagttcacctgaagaatatttgg

SEQ ID NO: 77091 - DNA, 548 bp, Heterodera glycines
atgccggaagaatctaacaacaacaacaacaacaccagcaacaataacagcgtcaatgctaatgctcaattatggaaacttttacgaaaaaagtatattctaacttttaatctttgtcattgctgctcacaaaaattgttcaattcgacaaaaaacaataacaacagcggcggtaattaagcttttgaaactgatcagtttggaggcgttaaggtgcaatttgttatgtgcagtgggtgtgtttcgcttaatatgaggttgagcgacatgaattgtgcaaataaaaacaacgattacaacaacaacaatcgctttagaagcagcttcactaataataactcaacatttggcaatttcgaaaacaatcgcacgcactttgacactgggaataatcaaagcaacgcatacaacaacaacaacagcaatgaaagtggacaaatggtacataacaacaatgccggatggatgaattgattacctattttataacagactaataattttgctaaatagttcattgcatttaatcaccatttcatattgttcta

SEQ ID NO: 77092 - DNA, 1304 bp, Heterodera glycines
atgaattcccagcagcgccaggcagaacgtgcccaactccgtgcaaggttaaacttgcttgtcgacgaggtcgactttgtggtccaagggctcatcaacaattatcaggccgatggattgatcaacgcggtaagttttcttttcatttcttttgctgtctttttgttttttttgaattttaattctcgattgaacaggcgccggctgatgtacagctaatggagatggataatgggcatgagcaacagcagcagccgtgggaactggacccgccaatgcctgcacagcaattggaaattgggccacagctcccggatgcgtgggaactggttccctatcagccaccacaatgggaccaagttgtgcatgtggaacaacaacaacaacaacaacaccaccagcaacaacaacagcatcagcaaggcgcgtgggacgagggatgggaggagcagctttcgccaaatgcgttagcgcagatccaggacgaggcggatgggttgcgccaggatttgagtaagaatttcgggtcggggtccctcccataaaacgaaaattaagtggttgagagatttgttcgtgtggggcagccgcagcctacgtggcccggttaccatagatgttcggaaaatttttttttattatgcactaattaataattaatttagcattttggctcgacgagggcacggcaggcattcctgaccaacaacaacaacaacagcatccgatgcagggatgggaaactccgcgcacccactttgagcggcccgtgccgcagagaacgcccagcccttcgggagatgcgccggcggcactgatcagagaattaaatttctccgatcagtgcctcctgtgcatgggtgagcacgggttggactgcgaagtgaccgttcgcggcaacaactgcgggtgtgtcacaatttgtgacacgtgctgcgaaaatggctggtgggcgaggtatgcggatgctgcgcgcgagcagtccgcgcggcagctcgaggacagcctcgacccgtggactgggctagtccgcttagatgaggacagtcagaggcgttgggtaaacacacaaaacattgattttctgataaaatttaatttggttcatgttttcaggtcgaggggcacgatgtgcgccccaagtgtctcggctgccagacgagccgaatcgactacttgatcggggtaacgcggccgcgccgctcgcaacgcacgcgcaaggccacccactgcgccttttgctgttgatggatagtgatgcattttgtaggatcacacaattgatagtatttggtgatttaaaa

SEQ ID NO: 77093 - DNA, 543 bp, Heterodera glycines
atggaatggcttgaaatgcttccaataaaaattattcttctaattttcttgatttgcacaccaaattctgctgaaaacattactgaaaatgccaaatctcgaaatgaacgagacctgatcagtgttgggctcataattggggcagtgactgccgtgttgacaccaataatcatcggcagcgtggttgcaggatatgttattggaagcaatactgcacacgcaaacaatgatcgttggtcatcaattttaacttttctatgttttttttagaaagcaagctggtaaaagtgtttttccaggtccaagtgaccgtccacgatcagcttctctcaatttcgctcgaaaattttacaaatgagtttctttttgagcaaattgaacgcataaccaaaaatccaagcatacagagcatttgcctgcacggtgttgttttactatttgcgtataattaattaaaaatgatcagaattcgatcggttttccgtttacaaaaaaagaacattccttgaccgaatactcaaatagagataagaaaaaaataaa

SEQ ID NO: 77094 - DNA, 97 bp, Heterodera glycines
tgtgggcgatccacaaaaaactcagtgtgggcgatccacaaaaaatctcagtgtgggcaatccacaaaaaatctcagtgtgggcgatccacaaaaaa

SEQ ID NO: 77095 - DNA, 446 bp, Heterodera glycines
atgacgcggtgcttggtttaccgtttcaccagagtaagctttgggcattattaaatgaaagaatttattatcattttataaagaatggaacaagctagcacaggcagggtaaaatgtttaacgctccattgtttctgcctttcttgcatctgagagcctaaacgcgagtaaatctaatcggtgctaggtcgatccacaaaaaaactcagtgtgggcgatccacaaaaaaactcagtgtgggcgatccacaaaaaatctcagtgtgggcgatccacaaaaaatctcagtgtgggcgatccacaaaaaatctcagtgtgggcgatccacaaaaaatctcagtgaataattaaataattaattttaattatatagaacgtgtcactgaattaattataattaaatttataccattatatttcaagataaatttaaaaagaacaaataaa

SEQ ID NO: 77096 - DNA, 623 bp, Heterodera glycines
atgggctaccaaatggtgccaagaatgtaaaatttgattgcccttaagcaaagttaggctcaagtacagtttatgcgtccaatggactttcaacatgtgggatgccacggcttaatcattgacaaaatgggatatgtaagatcgaaaccttggcatttttgcggatgttctaacagatatgaaaaggaaaacattttacgtgaatataactagtaattctgagaaaatattcataattttgggaaattctagcaaatctttgtgtcatattgtcaatgtgatacaattcgaagtattgattggacacataaaaatttgattggacgcataaactgtacttgagcccaaagttatgccatgtttggtcgaaaatcactaaaaattgcgcattttatggaacgacccagcacagtatgttcctatcccattgtgagtgtcaattgcattatggatcgaaatgaaattttaattagtaaattctttaattagatttttcatattttccacatttatttgggttgtgtgtagttaaaagattaattacatttttagataatcattaattaaaaaaaatattatttcgtcggaaaacatctttgtatcttaattatttaatttaatta

SEQ ID NO: 77097 - DNA, 232 bp, Heterodera glycines
atgtggtccatgccaaatttggatgagatttgtttttttggtatgaaagaactgataaaaaaccacataaatcagccttcctttcagatttaaaaggaacaaaaagacgccacactcgatcgggacaaattgaaatatttttattttatctgtcaaaaatggaattgcctgtttcactgaatgcttgttgattgctattttttctcgttagcccttgagaaaggcgaataaa

SEQ ID NO: 77098 - DNA, 1168 bp, Heterodera glycines
  unsure (1)..(1168): unsure at all n locations
atgacttacttcaaaaaanttaataatgaatcatctcaaaacctaagtaaatctacactggaaagatatctttctanaatcaaaacaagcgttggaaaatattctacgaaagcagatgaaacaaaatacatcgcaagacaatgtataacaaaaaacgatcaagaaaaattgtttctaataggaaaagaacaggaagacaattggagaaaatttggtgtcactttaatttacaataacaaattttatatttcttgtattaaatgtcaaattatacagcaaaaattatttcatccggaaattaaccaactcgaagagtatattagaaaccataaaatgccagcaatagatgcaacagaaatgtttaaatgggcatcaaatattgactttttagctgcagcaaagctttttcagctcaatgttatagtgtgtagtccgaatattcaaacatcccaaagtaatataaagtatacatgggctgtttattctccagattcaaataattcggtaaatatttctttcgaattttatttcatttttcttaaattttagttatcaatttctttaaaaagtgatataaattctatttttgtttattatgattgtcatgggcattttgaagctataatcaatcctcaagaaattaattaaaaattgagcaaattttccaaaaaattattgatcaaatgctttctctttaaattgttcgtttaatgggtttcgctgataaactgatcaaattttgcaaaatttgctgcagcaaaattttttaaggtttctttgataatgtgaattctttaaattgttcttaatgggttttggcgataaagtgatcaatttttctaattttgtgctttcatgtgattgtgcattggcttgacaattataaaagggttaatttttcttaaaaattatatttttataaaatggctaaattaaaaatttttttttttgcatttttgattttgtcacaaaatttgacaatttcaaaaccaattcgtcgcaaagaaagataactggggactcttgcggctattgcaattatttcggcaattgttctaactccaataatacttggttcggttgcaaccggcattgtatttggttatactttaaaagatggaagtggtcgtgaatgtatgaatataaatttaaatttaaaaataataaa

SEQ ID NO: 77099 - DNA, 1840 bp, Heterodera glycines
atgccgaactggtgccatttaaatggaaagataaatttcttagcattaatttattgctttaatcaacagatccaattgttacggacaattgaaggggaggacgggaagccgatccagacaaatgttcgaccagtgcagcctttcaacaaaactgcataaaaagtgcctgtctaacctcgttaaatacgattgatcaatttttacgtttcacattgtaatttcaatctgtaattcaagaattctatcattaggaaaaacttatgacagggttccaagttttgatggtgctgagtcgttatataaaaaccctcaaaaagggcgttatataaaaaaccctcaaatggtttttttttgtgtttttattgatttttccttgtgttttgggcgttatataaaaaaccgtcaaaaagggcgttatataaaaaaccctcaaatcaatcaaattgtaagacatttcatcaaaattgggcgttatataaaaaaccctcaaaatgggcgttatataaaaaaccatcaaatcttattgttaccgtattaatttagaaaaaacaatcgtgccaataaaattaaaaaaacaatcgtgccaataaaataaaacctatataaaataataaatcattttaaataaatattttttatacaatattgacattaaatgtaatcaattattggatttatgtaaatgttacgtcatcaaaaaaaatattcgatagatttatattttttattattcatattaatggaaatgcatggaccatcaaaagccgtatattgtatattatttattttattcatatttctttttaaaaatcggatttacgattacattactggtggaagccgtgcttcttcctttgactcttttatcaatgacaatataattaaaaatcttttaaataaatatgaaaaaagagaaatccgaacaataaatgaattacttcaaaaaattaataatgaatcatctcaaaacctaagcaaatctacactggaaagatatctttctaaaatcaaaacaagcgttggaacaaaatacatcgcaagacaatgtacaacaaaaaacgatcaagaaaaattctttctaataggaaaagaacaggaagacaattggagaaaatttggtgtcacattaatttacaataacaaattttatatttcttgtattaaataattaatgaaaataccgagataatttcttcacgtccaacaatacatcatcacgactgcttgggagaaaaaattgaaaaatttagcgcagaacagatagacagacaacaacgaaataaaataataaattgcactgctaacattaaaagtttatggcgtgaaataaattaaaatatattttaacttgtaattttatttaactaggggtttcaaaaagctgagtcttttgatgtagcaacagataccgaaacattatcagaacaatcattatcatttcattacccaacttataattccgtcagacgttcatataatagacgtagacagcaagcacacggaatttcaactgactcatataatttgccagaatctttattaataacacgttttggttctataaagctggcattaaataaagaactttcaagtcaagataagtaagttctgcttaaaattctcggaataaaattttgaaattatttgattttatagctgggttatataccgaaatagagaagatggtataatcatttttgcaacaaaaactgcaagccaagctatgcaaaaatgtccaattatcgcactagacgggacttttgaagtagcaccaaaaccttttatgcaattatatattgtgcacggattggtattagattttatatttatttaaaataaa

SEQ ID NO: 77100 - DNA, 1595 bp, Heterodera glycines
atgaatgagtcggttcttgatctgatgaagcggggaattgagacgtacaacggtttgccagaccaagcgttgatccagagccaaccgaaaccactgctcctcgtgcttgatgatttaatgttgaatgtaggaagcgattttctggatctgctgttcacacgtggttcacataactggaatgtcagcgttatttttgtcacccaaagcctatacgggcgtaacattagaacagcgcgagctaacagccattatttggtgctgacaaggaacccgtctggtcaactccaggtcagaacggttgggtcacaacttttcccaaaacgactcaattactttatggaggcgtacaatgaagcgactagtcaaccgttcagttacttggttataaacatgcacccaaatgctccggaaaatgagcggttgacaagcaaaatattccccggggagagtcgtgaggtatatttacctgtagaataagtgtaatgaacgaaacaagtgcgctaaaaaactatttaaggaagggaaatttttttggttcgcaaaatgtacgagttcagtccatacattcgcgcaaattcggattttttcaaaaaattagcctcaacaaaatcggataaaaggaaaaacgatttgctgaaaggcgcatccgtagaacaaattctcggattggttgagatttgtgcaaatattttaaaatttaactttcgcctcaaccggcgacagaggagacgattggccgtgtacgcagactattaccgagcaattgcacgttcacgtagtgagcgcacagccaggcagaggctacaacagggcagcggaatagctttaggagctattttggcgccaattttgagcgttttagctgaacatctggtccagaaaattgttgcaactccatcggcacaacaataaaatgaagcacactaaaaagatgctacttgtaccggagagtgaatatttggcgcttatcaacctgctgaaagggggcgcaggtggaacggactcacttcaagccgaaaaagcagcgatcgatgccagcatccaaaaaaatctaaatgacaataaaacgggtgcggacgtgaaaatgaaacgccactcgtggttgtacaaacagaggcatcagatcaaggacatgattgagaacaaaccacaaaaggtgattgtggaaaacgctacaggcacagcgccacaaaacattgccccgtatatgggcatacagaaaccaaacctcaacaagcttgaagaattgaacgggcaggatggcaaaaaaataaataaataaataggacgaaaatcggtccaggctttcagatttcaaactcccaatggtgccagctttggtgaagaaacggatacgtctgcgcctgagaccgatttgcggctaaccaaaaagagacaacaaaaatttttggagcttaaaacaggcccagagcattatgataagctgcacgaaatgattgaacgaaaccccgaaaagtacggagtcgataagtcgtccggcgaaattctaacaaacttcaaaaagccggtgattaggtccaactacattgactcactgatgtacttgacaggacagagagcagatgtgccgaaag

SEQ ID NO: 77101 - DNA, 568 bp, Heterodera glycines
atgtcccaccaaccatttgctaatttcgaaattgtacggcttgaagcgatgatcattgggttagaaatcgacaaggaacaactccaacgagatgtttatcatcttaaaaataggaaaacacaaatccataataaaaaatttgaattgctacaacaaaaggaacaattaataagagaaataaatgtgctgagagagacgaaggcaactctggtcaacgagacgaaagatctgagagaagaaatattggaattacgagatacggatggttccactgatgacccactttgcgccgtttgttataccagaaaagtcgtcagcgtttaatgcaaaactaattttggatattttagcgaaattatgcatgcatcccatgtggccatcgtgccctctgcaaccgatgcgccgaaactgtttcaattgatgggcgttgcccgttttgtcgtgaagaacttattggggtgtttaaaatattcagtccctaatttttcgtgaccgaacacacacacacccacacacattgttaattgatgaatttctagacttaataattacaaaatgtttttaatga

SEQ ID NO: 77102 - DNA, 300 bp, Heterodera glycines
atggcatccatttgggttccaattcgaatcccgaacccggatcgaaaagaaagtcaaaattaattgtttaaacaaaattcacatttttccccgaccctaaaaaagtttatcaaaaaaaaaagctttttttttaatctccttacagattatacgcaaagtacgggaactttacgtagcctcacatgtaaatttaatccaatttttttatttgcagcaaaagtcttcatcgagataattcaaaaattaatcgccaaagaaacacgagcaatgaacaggcttagaagggatcaaaaagaaaag

SEQ ID NO: 77103 - DNA, 745 bp, Heterodera glycines
atgggggcggccggataccaaggcacgccgggaaacgagggcgaggaggggcgcgagggcgcccagggacggacggggcccgatgccgcatactggtaagcctattttggctggcacatggcttttcgtgccatcttttgggtcaaattcgaatttgcagcccctgcccaaaccggtacggccacggcggtggtggtggcggcggcgttcatggtcgctcaggtaaaacgcccgaagaatccgatgaaaaattatcccgccgatcagagatcagcatgggttaggatattatctcatcagatcaagttgactagaacacagcttaaacgcggattagcgtcgttcttttatggtttgatcagttgttatcccgatcatttgggaagttaataatgccctgatcagatgcccacacttaaatgattaaatgtgggctgcgattattttctgggttatcagttgaaaaatcaattgggcattatcagatgttttggaaagtgtcccgagaatcggctaattcgcattttaattgttttaattttaattcgtttttaaagctggcggcaacgctggcgatcgcttccaccaaaggcgccgaaagtgacgttgaatttcacttcgacggtggaagaaggcgaagaaaataacggagagacggggaatgtgacgacgaaaatgacgacattagcaaatgatcaaacgaaacgaaaagtcggaccgaaaaagttgtgattaaaagagaaaa

SEQ ID NO: 77104 - DNA, 1152 bp, Heterodera glycines
ttgcggcgccgacacttgcggcggccagtaaaaacgacttttgcggcgcagaattaaattaccccaaaacaaataaatttttttattttatgtatttccttcgtttaataaaaaaaaattgggcgaaatgttaagccttgggcgaaatccaatcttttgacttggccattgcgttccgaggcaaatccgcctcttatcaaccgccgctttacttgctttagcgtatagcttgacttcttcattacaatatcccgtcgcggccctgccttaaaaatttatgaattcggcaaaattcaaaagatttcttaaagaccaggctgaaaaaaatattttaaaaatgaacattctgtggttcgttattacacttgaaaataatttcttatgacattaggaaaacaaaagggtgttcgagatttaattttgagcattaattatggaggcgccgcaaatgtcattttgactgggcgccgcaagtgtctgcgccgcaagtgtcatccgcaagtgtctgcgccgcaaatgtcggcgccgcaagtgtcgctttggctgggcgccgcaaatgtctgcgccgcaaatgtcagcgccgcaagtgtcatcgaagcaagtgtctgcgccgcaaatgtcggcgccgcaagtgtcgctttggctgggcgccgcaaatgtctgcgccgcaaatgtcagcgccgcaagtgtcatcgccgcaagtgtctgcgccgcaaatgtcggcgccgcaagtgtcgctttggctgggcgccgcaaatctcagctccgtaaatgtcagcgccgcaagtgtcatcgccgcaagtgtctgcgccgcaaatgtcgctttggctgggcgccgcaaatgtctgcgccgcaaatgtcagcgccgcaagtgtcatcgaagcaagtgtctgcgccgcaaatgtcggcgccgcaagtgtcgctttggctgggcgccgcaaatgtctgcgccgcaaatgtcagcgccgcaagtgtcatcgccgcaagtgtctgcgccgcaaatgtcggcgccgcaagtgtcgctttggctgggcgccgcaaatctcagctccgtaaatgtcagcgccgcaagtgtcatcgccgcaagtgtctgcgccgcaaatgtcggcgccgcaagtgtcgctttggctgggcgccgcaaatctcagctcc

SEQ ID NO: 77105 - DNA, 1430 bp, Heterodera glycines
atggacaatcccgaacaatttgtcgacgaaaaggaagccaaacaaatcatcaacaaacaatgctatcacaattttgggaaaatggacgtgccaatgtcaaatgcacatattacggtcccaattccgggtaaattaatattatttatttttctgttttgtgccattaaaaaaaattaatcaaaaaattaatattattatttttgatttaaatgtaaaataatttccgaattcatttgcagtccaattgtgcaagaaagcgtacctttccaagttgctcacttattatgaaagctccgacagttcatgcagtcaatttcagcgctattgttatatgcttaattgttctacaagtaatcaattaacaatgctttagatttatttttttgcaaaaaaagaaaaagattttaattgattatcaaataaggaactgtactttttttatttgaaaccaacaattttcagtgaacaataacaaccaaattgaactgatcactgagtggggctgcactgatgccaattatgacactgatgacctcattcatggcacgggacgagcattggcccaggcttacatcggcccaatcccggacaattccttgtgcgtttccgctgttgtaagcggctcaaacaatggccttgtgcttccaactccaagtctttcattttttaatttaaatttgctttcattttttaacataatttaatttttttaaatgtcctcaggcattgcaaacaaatgcaaaattggtcatgaaactctgggcaacaaaacctcagttggccaatgttcttcagacgctgatttatgctatgcaatcaaatgcgatgacagttaatctgccaattaataatttgtttcattcagaattcggtccaaatccctttttttgtctaaaggtaatcagccaaacaaatttgtccaagagtggggctgtacttcgagcttttcaaatgtttccaagttttgcatggataaagctgctcaacttggcttcggatctgaccagcgtttgtgcaaatgtcatttaaaaccaccaaacaaatcgcacaaaatcagtgcttctggtaatgcataggatttttagtggttaaaaatagtttttcttaagtaattttagggatgtaattttttaaatagctgttttttaatttgcaaataattttaaacttaagcaaacaattttattcactgattccagttactttttaggttttttattccattttttgggaaattttctaaaaaataccaaaatagtggagaaacgccaaaatagtggcaaaaaactattttagtggccaacatccaaaataatttttttttaatggcaaagctccaaaatagtgattcctagtgatgaatagtggcgttaaaacgaagaatttccgagctaaaattatgtttttcttgcatttctcgtcgaaataaa

SEQ ID NO: 77106 - DNA, 364 bp, Heterodera glycines
atggccaaaaaagttggagttcggggttggggaggggtcggggcccaacttaggactacacgtgactcgaaaattcttttttcacctaggttaaaacaaattgtcaaaaaattataattttccagcaattattttctgtttctttgttggcaatgcgtcccggacattggcacaaaatcggaaatctgaacaccccagcgaaaatcagacaatttcgccctcaagaaaacaatcaactaaatttcaaaaaaatttattgtaatacctatgaagtgagaaatcactggagttcaaattttttacaaagtggggatgtacgacaaaaattctgataaatttcatttttggtgcatgtactaataaa

SEQ ID NO: 77107 - DNA, 1175 bp, Heterodera glycines
atggctttcccttacgtcgtcaatttgtgtgccaacgaagtatgttcaaatctaattttaactaaatcaggcaatttaaatatcacatcataacctttgacccaaatttatttcagaagcctaattggtcctttttattaacacttggcccaaaactaatgaaattcatcaaaattaacaccaaacttccccctgaactgaacaacgaactgctccattttgttcccgagttttactatcgaagggttttaatcagctctaattttttagtttattacttttttaataacggaaaacgaggcaaacgattgaaatgcaaagtatgccaaaatcgaaagttaacaaaaaatcagttattgttaaatctaattttctatccaatttaatttaaatgttatgctttttaaggatgtagcagagagagaggccgggacgacttacacatttggcgcaggcacacccattcgctcttttctgccactggatgaacgtcatcgcgttgcaaactttttggcaactatgaatatctaccagttttttcatcctgcggaaggcggcggacattacgctctcgtttcattgcgaatgagcggaccggacgaggtgaaacaccattattttgatactttcagcttttttttggacgagaaaaatgaaaggaaatttggaaatagcacaaataatttgctttccaaaaaatatgaaattattaaattgatttctaatccctaactcaaacgcgaataaaaagtcgtaacgaaaaacttgaattttcgactttttccgagtttgggtacgcgactgatcaaagttagtgtcgcatccatgatcagcaactacgaaaaccccctataaaagaaaagttccatctggtttctgttcttccatgaccaaaatttgcctaaaatccatttttataattttaaacacagcgacagcagataagaagctactttcaacgagagggcattgcaatgaatttcgacaaccgtttttgcaccagtggaattcgtctgtttctgatgaacaatttggtaattatacaatatacataaaaagggaaagaagacgagctaaaggttttacatccagtggcaacccccctggctgctaacggagaatagaaagaggaaaactagaaaaaaattatgctcgcatattgaagagtacaacaa

SEQ ID NO: 77108 - DNA, 1050 bp, Heterodera glycines
ttctccgccgtacgttatgaacgaaagattcagcctaaagaggaggcgtcattcgattacgcctttattccctccgacgcattcgttggccgtcccctcggtttggtcgtcaatttgcactatgtggacacggtgggtcgatctttcttggccaaaatgggataaatgattattcagttggttaaaaatgcatgcttttttaccttccttcaatttaggatggcaattattttgtgagtgccgttttcaatgaaaccgttacaatccaagaagacgaaagtggcttcaacacggaaacgtacgtttcttcatgtttttaccaagatagaaatgatattttatcgggttctcctgatataatttttaaaagacagcatttttaacataataaaaaaagtattttattcttttaaaaaaatctattttcaataatatgcaatttaactgcatttttcgcattttcatttagctatttcatgtacatcgttctgctcggatttatcgttgtgcttttgcttattgcccagcattttttctcaaaagttcgaatagcatttttcaattaatatattttttaatttctcagctgaccaaaggcaccggcaaaagttccgcccaatcgtaccaaacgaagaccaaagcgtatgaaatgggcaccaacaaaaacgacgtcgactttgaatggattccgcggaatcatttgggtaaaatgaactgggaaaattcaaaaaatattcggatgttcgtaaatttcagaaaagaaatcccccaaattgggctctcctcgcaatcggaaacagccgtcggcggtcgccagctgaaaaaggaaagacaaagggagggacaatgacaaagcgcaaagtgtgcgaattcgctaaacaatccgttattctcatgtaattttcaccacatttcgttgttgctttttcttctatttctttgttaacatattttggtaaaaaaaaatgacgatttttaattataattcaacctatttattggtgcacttttattgattcgttcaattattgccctattgtcccaaataaa

SEQ ID NO: 77109 - DNA, 679 bp, Heterodera glycines
atgtcgacaaatgcggcttcgccaactccgaaggcaacgaccgcgccttctgtccagaggaagtcgtcaagtaaacgaccgaaatttgccctgagtcgattaatcgcacaattttcagctggtgaagcgcagcagccgccaccgcaaaagcgaccaaaaagagtggtggacgaggcggaattgagcgagggcgaaatccttagcgatgaagaagattaatcttgtaaaattgatcacaatttcaatgggtttacacagcatcaatttgtgcacgacgcaccaccccccattttaacactcatttggaccacttcaattttccgaaactttctcataaattataaatgtattaatataaatcttgaatttatcttgacaaatatattaaagggctcatatccagggacctatttcaattcggaccaggtcctcgacttgatttttgcgaaatggactgcaaaaatcctgtttcaattaaatcgaaaaaatcgagtgtcgcacttgattttggcatcaagtcctatttttttgttgcaattaatcaagtcgaggacttgatcaccaagtcaaatgtaaaatcgactgccacattcgattttttaatttttgtttcaattcaaaaaacagtcatggtgaatgaaaaaagttttcaaatttatcaagagaaaagttaaataaa

SEQ ID NO: 77110 - DNA, 1458 bp, Heterodera glycines
atggaaggtggcgcaatggttttggcggacggcggagtcgtgtgcattgacgaattgacaacaatgagagaggacgaccgagttgccatccatgaggcgatggagcagcagacaatttccattgccaaggtgcggtcggactgtccccccccctggtcaaatgatggctaattttttgagttttcgcccattaggcaggaattacgaccacgctgaactcgcgctgttcagtccttgcggccgctaattccgtttttgggcgttgggacgacagccgaggggacgaaaacatcgattttatgttcgaattcccttcggtgaaatgacagtcaaaatactgcttttaggccaactattctgtcgcggtttgattgtatttttgtggtcaaagaccaacacgatcgggccaaggattcggtgcgttgtcatacttttttcattttttgttcatttccgtttagcaattggccagacacgttgtttctgtgcatgtccgtgccatggacccccaggcgcaagtcctcacttctgaaaacgacgcaaccgcttcccaaacgcccctttcgcagccaatcgcagctaatggggtgaagaacttacaaacacaacctaagctaatgttgtgaaaaaggaactttcattggacttcctaaaacgtttcatcgcttacgctcgcgccaattgcgcgccgcgcatttccgagtcggcgagtcagaagctgatcaatcagtacgtgcaaatgcgaaacataccgaaggatcaccagcagaaacagcaaatgcgatccaaaagtaaggagaccgaccgactttctaattacaatgcatttagttttatgggtgatcaatttttccgtaatttttttgcagagcatccgcaatcggccattccgatcactgtgcgtcaactcgaggcggtggtccgcctcagcgaggcgcttgccaaaatggaattggctccgtttgcggaagaacgccacgtggacgaagcactccgactgttcaaagtgtcgaccattgctgcggcgcagagcggcaatctgtcgggtacggaagcacaacaaaatattcttgcaataataaatattcaacaatttcctcaaccttttttcattttccaacactgaccggaataaggaatatttctaattttgtatttatgaggcctttttccgtaggagtcgaagggtttacttctgccgaggaccaggaatcattcacccgagtggagaagcagctgaagaagcgcttccaagtgggcacttacgcatcggaacagctgatcattgaggaatttgctcgccagggataccccgagggattggtcagaaaggtgttttgttcgcaccaaatgagaagaaacggattaattattcgtttttaggctatcgatttttatgtgagaaggggcgatttgcaataccggatgcaacgcaaattgctctaccgatttaaataa

SEQ ID NO: 77111 - DNA, 615 bp, Heterodera glycines
atgccgtccaaacagcaaatggtgagtagcgcaatgcaaatgataaatttgcattttaatatatgaaatttggtgtcttaattgcctccttctttcgctgccacaattatctaaaatgccgttttctgattctctttgattttgccgcccaaaagggccgccccacattttgttgatcctcttaaattttgtctctccacccccatggtcaaatcttatgaagataaggctttcgtctgtatatataattctcttaaaatgattttgccattcaaattctttctgggctctctctccgctttcgaaaatgccaaaaagattacttcccaatgagctcatcttggaattggtctgctttatcccatttaatttgaaatggacaaattgccgagtatcaattgtttttgaccaatttttgctggaaaatatcggcgattgcttaattctgatgaaaaacacagtgctgtgaaataaataaatttaaatccgtttttattgaaattttctgttttcagattaccaagtgccgttcgaacatttacgaattgaacgacgccattatggcgaaagaaaatgaccatgaaatgcggaccagtgccagatgtgtgtaccgcg

SEQ ID NO: 77112 - DNA, 792 bp, Heterodera glycines
atgataccaagtatgcttaatttggatgcttctggaaaaagttatggcgttgatcaaaaattgatcttttatggtgatcaattattcaaccaagtataactttctatatacaaatcgtagaaccactattccaataacaattcggtagcaaattttgtgctcttgccagtgggcttgcccattttctctagaaaaaatttcccaaccccctagggattttgaaaatttccccgattttcagtgtattttaggtgtccccgttcactacaaaggagtgatctgatcaagttgatgtaagagacttttttgatcagcaccaaaagttgtgcaagcatgaattatttcaagtttttaaatgaactataatattattaattaattaaattaatttcttcgtactgaaatgaccccacccctctgaaagtctctcactgatatttttgtcacttcgccacactgatatttttgtcacttcgtcctagcaccgtaaaatcgagtaaatcgtggtccggcggtgccgataggtgccgccgggcaaattttttttttaaattttaatgattttattaagaaaaatcgacaaaaaaaatttaaaagtcccaatttttcctgtaaaaatttttaatttttcattttgggcgggggaggggggggggggataatataaaatttaggcaaaaatttttgttccttcctctttggaaatggtcttaaattttgcttgtaaatattcagataacaagttttttttactgaaaattttttacacactacaggatgaaacgcaataaa

SEQ ID NO: 77113 - DNA, 1799 bp, Heterodera glycines
atgttctcttggaaaagtcccggtcctcccggttgaaaaacttggtcccggtcccgacttttctggtaacggcaagtcccggtcccggtttttgtcaaaattgccggtcccgtgcaactctacatccaacacattctgagtcaggagattcattgttgttactttttctctagtaattttatgaaatttttaccatttataaaagcttcactaaaaaattcctattgtgattttagaaaaatttagcgaaatttttagaaatttgactaagttaggtcttgtaaggataacaataacaacagaatatcaccaaaaaaactactaacgcaaaaagaacgtattaattaataattaacccattttaacagacaaaatcagcaacaatggaagttttcctaccatcagcgattcagtgaaagtgataacaaatgcctttgaaatcaatttggaaaaagcacctaacaaggtgtatcagtatgaacttcgttttagtgccagatatttgaatacaaaagtggacatagaattatctcgagggccacacaacgagtgagcattaaataaacttaaattgagataaatttaaataataaaattgtaattcatgcttttttaaatgaataattattttatctaaattttaatcttaaaattgcttatggatgagtcatctcgatttctttggctttcccatggttcatttcccatgtagtaattaaatatattttatttttcttttaattttattgatttgttatgtaggttacaaattttttaatttaattaattatttgcaaatttctcggctttcatttcaagcatattttaatatatgaacccacacaatttactttttttttaatttaaataacccaaaaagggatgtttttaatacaaaatcttgttggcaaagattacaaaattgtcgttttcttctccttttttaacctatattttaacccttggaagaaaaacgtttaaaaattaagcctagtttttcaaaaacctctccagcggacgcctatcggcacagctggaccaaaaatggattttcttctggcggtgcctgtaggcactgcctcctccaactacatagggttttgaaaaatactgtaaatttctgagttgtcgagaaaagattgacgaattgtccattactgacggatagtcagtccttcatttttcaagaatttttaaatttctaaatctaaaatataaaaaaatgaaatatataccaaaaataccatttttagcgaaagcaacgagactcgtcgggaattgaatttatcgctttggcaaatattattggacgaaaataaagaattttttggcaaaaacaaaaatatgttttgttacgattgtgaacgacaactatattcaaccaaatatttgacggctcgtgtctttcaaattaaggaggagaataaggtaagttaaattcagttacctcttgcaaaaattggaataatcatttttttgatataatgttgaatatctgtccagattagggaacggatttttaagtttatccttattttttctgcggcttaactcgacgagaaatgcacgaaaaacacattttttgttcgaaaattttgcgttttaacgcccttatgaccttagaaatccttattttagatgttcgcccttaaaataagtttttgtccatatttaggcatttcgcccttatttcgcgattttttaatttttaatgtgaaattcaaaattctttttaaaaatacagtgaaaaaaatattctttacattttttggcgaattgtttgcaactgtaagaataaa

SEQ ID NO: 77114 - DNA, 1253 bp, Heterodera glycines
atggaaattagtttcaatcaaaaaatcaaacgtgtatttagtcacaaaacacataattcgcattgagttcattataatttcttgaacatttttgtgtttataaattatttagtaattattttaatttgtctatgtttttttgattatatttttaaaattaatattttatttaaaaagtttgattagactctttgggcggaaaatgcaatgcatttggaagatattttttaattaacaatatttgattttggtttatttaattcaattttgattttttattaatttttatcttttgattttgaaataattacgatttatttttatcttttttaattagaatttgtaattcgcaattcgtattttgattacaatatcattgtgctcataattgaattctcatttaatgagctgggctaatggtgttattgttattaattattttagtaaagtactaaagtttttccttttaattgtttattaaatatttaatttttttataaaattcactttaaaatgtgttcaaatattaatctattaaattttatttaatcaagtgccaccaatgctaaaagacgtaccattttattatgccgtttaaaattagttgtttattaagatagaaaagagaaattttgaattaatttttcatactatgtcatttaatattattttaaattatattttcaaaataaaattatttaataatttatgaaaaattaatgcacacaaatttttcaagcaaaaaagaaaggtgtttttttttatattgccaagaaaaatttttggtttttatcaattaaatatttttattatcattaatttatatatataatgatacattttgtgtgctactaagcgaaataaattgaaatcaacattgatctgaagagtaccttttgattaactggtccggatgattactattccttttttaaattattattattatttcgttttgtttttgggtttgtaagtattttttataatacattaattaaaccagtgccaaaaattcaaaattattttaaatatataaaatattttcagtcatctcgtttataaatagaaaagggattgggatgaaaattcttcattgtttaatagattattaaatatttaaagaaaactttgaattattaatatttataccaaatcatttcatttatttttgagaatgggatacaatatattaataacatgttgtattgctcatctgaagttatattggttaagccccagaattaaattagtga

SEQ ID NO: 77115 - DNA, 624 bp, Heterodera glycines
atggccatccccatcgatggtttgtgtagtaaaaaagttttataaaattaaaacacatcaaaaaacaatttattctaaataggtgtttttagcttcttttcgatggtcggcatgctctacacctttttgttctattttggaatgtaaggcgttgaaagtgatggagcacgcgtaacacgacctgacactgtcgcatggcaactttggcttgaaaaagagaagaataataaatatttaaaatgattttcatttaatttttgttcatcggtttattttgaaatttgtcatcctcaacccaattacacgttgagaccacgaaaatataccccctaatcggcaccgcatcgaaaatttcaaattttcgccgatttttcatattctttaaaaaggcatattttttcagaacgtttcctattttatggtaaatggatgtgccgaaagaaatacgtgttcatcaaggttggagaaactaagcaaaaagaatgatgagtttgcatcgtgtgttatttaccacgagccagtgcccgtgtgcaaaaacgataaaattgaattgaaggagccatcctccctccaataatgcccgcgcccaccgaaggtttgtgcagcaaaaatttttttataaaa

SEQ ID NO: 77116 - DNA, 484 bp, Heterodera glycines
atggaatatcgaagagaaaaacacagaaatattggcgaaggagttaaagcgtttggcatttggcaaaatgctggggctggcctcgaaatgggctttcactttctatgcaaaatgccgtcacaaaaatgcataacacaatccaagttgaatgtaaataattccaaaattcaattagaatccataactgctcagcaaatcattcacttctgcagatcaattggatcaagggtttcgtcgagaagcataaaaacacgaagactttaaatttttgactaagcatttgctgaaccgtcccctatgccatctcatttaattccaaaattggatattttggaaaaaatcaaatcatatgaaattctcttccacccttgtgcctgatcagagtgcagggccaatgtttgacacttttccctgcttggatatgttgccaaaaaaagaattgtgcgaaaactgtgttttttcaataatatcctgttgaaataaa

SEQ ID NO: 77117 - DNA, 703 bp, Heterodera glycines
atgaatggcggcgtttgcatttggtcaatgatagaacgaattatgactaaagaagaattacgcaggcgcttgttggtggtcagcattgaacgcagccaaccgaaggtttgcgaaacgcaattagataaaatgatggacgaccgaattttggagtaaacggtcaaacatttgtacagcaaaggagaccacatgacactttcttatcaaacttgatgaataatgggataggaaatttttctcaaaatttggtccacgtaccgcgcacttcaacccgaacccgaaatgctgaatttcaacagcaaataggaccattcccgtttgttgttgaccacaacaacagagcaccagccccacctttaaacatacggcaacaaattttccaccccgtaccactgatgcacaccgcattaaccaagtgtcggttaacgcgcaacgcaacattgactttcagtatttaccaaataatggcgttaatgcaccgacaaacttacaatgtcatggcgacattcagtacgccgctgttaaccctgtcactgcgccatcaaacgcgcaaaaatttttagctcaaaaccaacaaaaattcactcgccaggctttccaaatgccagaaatgaatcaagagcctagacatttccctacctacctatacccaccagggctggccgtgattgaatttccaatcacggatatccgtgagccgtga

SEQ ID NO: 77118 - DNA, 1350 bp, Heterodera glycines
atgaaaagagtttcaaaagatttgggatttgaatcaatcgattgcgctgcccatgtacttcaattggtaattaaaatttaaaaaatttcaatttcttttttaagtgtattaaggaaggacttaaaaaaattgatgaagaagaaagattgaaggaacttattgaaaatgtcaaaaaatttgttcgaaaagtacgaaagtcaagagttttgacagaaaaattagctgaattccaatccaatgaagaaatactacaaacggttttgctaaaaaacacagaggtaattatattattttttaaaattaattacaaaaaatcatttgaaggttcgttggaacagttcttacaaaatgttagaacgttttttgattaatcgttcggctgtgaatttgttggcaattgaacacgcggaactgccaaaattaaatgccgacgattggacacttttatcttctgttaagaatgtactcgctccgatttacgaagcgactctgcttttacagaaccgaaacgcttcaagttccattatcattccactctttaaagttaattatttaacaatatatcttaatctaaatagcatttaggctattacgtttgcattacgtaaagagggggataatcgattttcaaatatcaaaaatacaattgcatcggccattgaaaagagactaaaccaattcgagaaccaaaaatatttggtgatttcgacccttcttgatccacggtttaaggctgtttatttggattgcaatcgcgtagatggctacaaaaattggctaatcagtgaaatcgagagttttcacaatgaaaattacgtaatgaaatattttattttgagtttatattttaatttttagtataccgatgatttgttagttgaaaataatgcaagcgggtcaagttcaaccgacattttttctcaatttgaaaaagatgctgaattcgaccaattaattaatacagtaaagctttctttttaaacaatcgcattattgttcatttcacaggcaccatcacccagcccatcagcgttagaaataaaacaaaaggctgaagttgaagtgaacgaatattggagagatgcgaaaattaaggcaaaatccgatccttatgcttactgggaaatcaattcacaaaaatggccgatgatcggaagaattgtgcccaaatttctttctccacccgctacgagttcagaaagtgaacgacttttctcgaccgcgggccttatctctaatgatctccgaaaaagtttggcacccgaaaatctcgcaaaacttctgttcctccatcataatttgatattgacaggattttcaagcgaataaattttcgtttttgctaataaa

SEQ ID NO: 77119 - DNA, 912 bp, Heterodera glycines
atggaacaaccagcgggaaatgaaagcaaagtgccgcgtaagtgaatgtgaaaaattgaaaatttggcaatttcagggtcctttaaataacagtcagctatatcgattaagaaaaggccaaaagcttaaccaaaattccaacaaataaaaaatatggacaaagatttgggtttcatatgaaaaaccgataaattttatatttaaatttgtataaatgctcggtcaaaccaaaatgtgccacccacggcgttaattggttattagcgcactaattacacctggtatttccagcccatgaaattcgtggtattgcgccggtcggagtgctgctcaacgcatttgagctgaatttgagtgcggtgccagacaaagtgttccggcacgagcttcgcttcgtagccgagtacccaaatacgaaatggggtcaagcggacattcaggaattgacccgtgagcttcgcaatgagtgagtcactcattagcggagtgccaatctcaaacagcaaaaatttgcttaggctgatttttatggcgattttaaaattcgatttaaattcataatacctaataaaaaataaataaaatttcggctctttttttgggggggggagagcgtgcaaaatccggtgattcaattcatcaatcgcatttttaagcggtggtcagcgtgtgccgttggacaagcaaacgctgcaagccgaggcgcagcagttgttcccgctggcactcgccttcgccgcatccaatgagcaaattgagaaaattgagccgaccaaccgtggcagtcagcatatttataattaattaacgcatcattagcttttttgtttctaagctcttgttttttcttgtcctgaattttctgagaatttcatgaaaaaatatctgaaaaagatattttcttttttaaaa

SEQ ID NO: 77120 - DNA, 241 bp, Heterodera glycines
atggcacttctgctgctcaccttcttctccttccgcttcgcctccccccgccaccgatggtggtgggcccccgcagattgtgaatgtgttaagcatccatttgcgtcggctcagatgaatgtccaccaacacgtcgaaccggtcgcagaccaacgccatgcagaagccgagttcgtcgatgtacatgcatttgaaggtgtcgaacaggacgtcgtcgcatagagaactgtttagaaataaa

SEQ ID NO: 77121 - DNA, 1175 bp, Heterodera glycines
atggtggcacaaattgtcgtctacaaatggcgcactgtttggcgccaaatgccggcggcaactttggtggatggaggagaacaacgacaacttcaacaagttagcaagagaacggaccgaacactgcctattccgcaggggccgctgcccgaccaagtggtcggctttaagggcatttgcattcagtgagtgtgcatggcgccggcatgccatcatgtcgactggccctttgtactcgggccggggccagcctttggcattttgaccgggcatgcttaacggcacacacacaaaaaagaagccgttttccggcaattattaaactagaaaccaaataccaatgagcattttcgtgccaaattagcaaattttttatggctctaattagtagggcgtgtaattaaaagtagagttgagcgggaccgggaattttgggcaaaaccgggaccgggacttgccgggacctgagaagccgggacctcgatttttttcgggaccgggaaccgggaccaatcgggactttttaaaaattcaaaaaaattcaaaaaatttttaaaattcaaattttaattcatttcaattgaaaataatacaaaaataaatttttattttgttttttatttataaaatccaaattaaaagctaaataaattaataaaaactttcaaatcaaattttcagtcttattttgtactgattttcttaaaaaaatgataaaaatgtgtcaattaaacaaaactatgaggaattatattttgtcgataagaaacccatgagtagacaataagcaaattcaaaatattttaatttctgtagagggattgaaccaggggaaagaagaagggaaagtcaagggactagcactaggccatttgcaaatttaatttttttttcctttcactctaatttttatcactaatttttcactcagacccccattcttaccagtgcttgtttttcccggttcccggtcccgctcaactctaattttgacaaatgaatgacttaaaaaacttcttatttttcttagaaagaccaaaaatcgtaaaatttaacaaacttttacaattaaattagttaaatttttgaatttttaataatcctttgcattcaaaactataatttttaattcatcaggaattttcataatgcaaatgtttcagacgcagcgaaaa

SEQ ID NO: 77122 - DNA, 909 bp, Heterodera glycines
atggtcgacgtcgaacgtttgaaagttgccttcgaaacggtttttgtttattttcattatgagaattcttgggtttgaaccggttgactttttcagtgtcccccttcgtcggttcgcaatgtttgcattatcgctcacgttgatcatggaaaaacgactttggctgattttttggtgtcgtccaacggagttatttcgggtaactgcaaaatgttgtagtgattttatttatttatggcatgtttgttattttccttttgtctttcatttgcgttttcagctcggttggcgggcaaattgcgttacatggactgtcgggaggacgagcaaatgcgcggaataacaatgaagtccagctccatatcacttttttatgaaccccttctgctgaatttgatcgacaggtttgagaggacggcagatgaggaatcagaagactgcgttatttttcggacttttgttttgttttcacttttggaaccctcatttattattttcagtccaggccatgttgactttgtggccgaagtcagttcggccgtcaatttggccgacattgccatcctcgtcgtggatgcggtcggtttgactaacaatactatgaaaaaccaactcattattgctaatccatggcatctttcgaggtggaaggcgtctgttcccaaaccgagtcgctcatccgccaggcgctgtcctgcaaattggacattttattggtgctgaataaattagaccgactggtggtggagctgaagatgcgcgagcaggaggcccatcgccacttacagcgactgctcgaatctgtgaactcgtgcctttctcaggcgatccacggccaattgctggaggaagactggcacactttcgagcaggtcgagcggacaattaaggagaatcaatttatagcac

SEQ ID NO: 77123 - DNA, 1082 bp, Heterodera glycines
atgcgcacctgtgcaattcccacaacggctccagcacaaattgctctgaaaagggtggaaatagcaaaggtaaataataagcaatataaaacccaagagtggcttttttccgcgctgttctgcgcccggtaaaatttgtttagaatttgtggcaaaaaagtgatcggaagaaaagagattggcgttaagctgtgccttgacaatttctcggtggtcattcggcgatttatccccaattttttgctgtccaaagattcgtttggtccaaaggtcggcaaagtcttccgacgcaaaagcgtatccgtacaatgccgaagcaaacagaacattgcctttggaagggtcgaaatggagcagactttccatctgaaaccttcagaatgactggtcaaactacgtgcttataaattgaattctccttaaattgtccgctcgacctgctcgaaagtgtgccagtcttcctccagcaattggccgtggatcgcctgagaaaggcacgagttcacagattcgagcagtcgctgtaagtggcgatgggcctcctgctcgcgcatcttcagctccaccaccagtcggtctaatttattcagcaccaataaaatgtccaatttgcaggacagcgcctggcggatgagcgactcggtttgggaacagacgccttccacctcgaaagatgccatggattagcaataatgagttggtttttcatagtattgttagtcaaaccgaccgcatccactacgaggatggcaatgtcggccaaattgacggccgaactgacttcggccacaaagtcaacatggcctggactgaaaatagtaaatgagggttccaaaagtgaaaacaaaacaaaagtccgaaaaataacgcagtcttctgattcctcatctgccgccctcccaaacctgtcgatcaaattcagcagaaggggttcataaaggagtgatatggagctggacttcattgttattccgcgcatttgctcgtcctcccgacagtccatgtaacgcaatttgcccgccaaccgagctgaaaacgcaaatgaaagacaaaaggaaaataacaaacatgccataaataaa

SEQ ID NO: 77124 - DNA, 1779 bp, Heterodera glycines
tgtcccccttcgtcggttcgcaatgtttgcattatcgctcacgttgatcatggaaaaacgactttggctgattttttggtgtcgtccaacggagttatttcgggtaactgcaaaatgttgtagtgattttatttatttatggcatgtttgttattttccttttgtctttcatttgcgttttcagctcggttggcgggcaaattgcgttacatggactgtcgggaggacgagcaaatgcgcggaataacaatgaagtccagctccatatcactcctttatgaaccccttctgctgaatttgatcgacaggtttgggagggcggcagatgaggaatcagaagactgcgttatttttcggacttttgttttgttttcacttttggaaccctcatttactattttcagtccaggccatgttgactttgtggccgaagtcagttcggccgtcaatttggccgacattgccatcctcgtagtggatgcggtcggtttgactaacaatactatgaaaaaccaactcattattgctaatccatggcatctttcgaggtggaaggcgtctgttcccaaaccgagtcgctcatccgccaggcgctgtcctgcaaattggacattttattggtgctgaataaattagaccgactggtggtggagctgaagatgcgcgagcaggaggcccatcgccacttacagcgactgctcgaatctgtgaactcgtgcctttctcaggcgatccacggccaattgctggaggaagactggcacactttcgagcaggtcgagcggacaatttaaggagaattcaatttataagcacgtagtttgaccagtcattctgaaggtttcagatggaaagtctgctccatttcgacccttccaaaggcaatgttctgtttgcttcggcattgtacggatacgcttttgcgtcggaagactttgccgacctttggaccaaacgaatctttggacagcaaaaaattggggataaatcgccgaatgaccaccgagaaattgtcaaggcacagcttaacgccaatctcttttcttccgatcacttttttgccacaaattctaaacaaattttaccgggcgcagaacagcgcggaaaaaagccactcttgggttttatattgcttattatttacctttgctatttccacccttttcagagcaatttgtgctggagccgttgtgggaattgcacaggtgcgcattggttgaaggagacatggacaaattgcgacaaatggctgcgaaattgtctcttcctttgctgaaagggaggagagccgaagaggtggcaaagggagggcgggtgggtttaggaaagaatgaccgatgtgagaattgatattaagtatttaaataaaaattttaatttataaaaaaccaaaataacccctaaaagtcgaatttctgaattagcctcccccaaagccaagagtttggctacgcccttaatggagactgtcattgcttggactccgctttgttttcctttactcaattttccatgcctttttttttaaaggcttttaccgaaatgatgcgtcaatggcttccgcttagttcggccgtcgtccgcgcctgcgcccgaatgcgttcggctcagaaggctttccaaacaaacaaccgacttgagcagctgttgcccatcggatgcgaagttggcccggcccgtctttgcttttgccattcattctatgccctttcctcttttcgttctcttcgtcccctgtcatcgatgccttacgcaactgcgaccccatggacgaattga

SEQ ID NO: 77125 - DNA, 1521 bp, Heterodera glycines
atgtttgatttcgttgacaaagaaaaaagttatagtccaaaaactgggctggcgccgaaacgcgcggcgccgaaacgcgtgtgtccccaaattcaccggtccccataccattttttcctaagttttcaaaatttactgcatatgtacgatgatttatttatatacgcacaggtcgttcgccattgattgttgcgtgtatggttgggcaattgcaaattggtaatttaatgcaataattattatacatagcaggattttgtgctttttgaaatggtccaatgtgaatttttgtttcatttcttgaaaattcgatattttcatttaaaaattttgagtttctgattcaaacaaacatcaaagcaatcttaatgaattgcgttaaattcccgaaatttttgtgattttctccgcatttaattgctaaattaaaaatatttgttttttagtcaaatttcttgtggaaaacggcggggcggacatcgcaattgtcgcttctgatgggcttactgcgctgaaggccgcaatactaacgaacaaagttgagattctctaatatttgctcgagaaaggcgcgcgcattgaccgctgaacgagcttttgttggttcgatccagaaacagaaaaacagctttgataatgatctgatcagaaattatttatttttaagctggggataaaaatgagaatttattatttaatctccaggcccataactagaaaaactcgtgaaatctgaaatttttttacacttcgccttaaatctattcctggttatcatcgaaattgtgtggaataagacaaaaacaaaacaaaaaagttttagcccatttattaattaattttttgccaaaaagactacctaatttgggagacttctgtgattcattttggaattttgccttggctatgggcctgattttgtctgttatatttattattatttaattattttttttcaaatacatatatgccagggatgggccgaggtttcgcttttcgcatttcgcctttcgcattattcgcattttttggcgtttcgcatttcgcttttcgcatttcgctttttggcgcgaaatgcgacttttacacccctaagaattggattaaattcccataaaatttttcaaaattttacctataaattggctaattttcagtgaaaaactgtttataaatgatcaaaatttccaattttttcccccggcggcgcctatcggcaccgccgcgcccccaaaactcctattttttcttagaaaatggcccaaaatcgcaaaatttggtaatttgatgaaaaactgttctcagcggcgcgccaaaactcttatttctcattaaaaaatgatacaaaaatcacaaaatttgaagattttttggtgaaaatctgtcaacaaattttaatcaaattttcaaaaattttcccggcggcgcctgccggcgctgcctgccccctcttcccaaaatgttttttggaaaagcgcgcctcaaaaaagctttgtattgattttttaaatttggaataaa

SEQ ID NO: 77126 - DNA, 289 bp, Heterodera glycines
attttctaagaaaaaataggagttttgggggcgcggcggtgccgataggcgccgccgggggaaaaaattggaaattttgatcatttataaacagtttttcactgaaaattagccaatttataggtaaaattttgaaaaattttatgggaatttaatccaattcttaggggtgtaaaagtcgcatttcgcgccaaaaagcgaaatgcgaaaagcgaaatgcgaaacgccaaaaaatgcgaataatgcgaaaggcgaaatgcgaaaagcgaaacctcggcccatccctggc

SEQ ID NO: 77127 - DNA, 509 bp, Heterodera glycines
atggccggctgggacgtgcgaaaaccaaaaaaaaaatttttgaaaacgtaagaaaaaataatttctcataaaaccaaaaaagaaaattttaaatccgaaaacaaaaacgaaacgaaaaataattcctcacaaaaccgaaaaacttttttttaagttttaaaacgaaaacgaaacgaaaatattgtattatacaaataattttattgctatatattcttttattgatttcttatgattagagctccctaagaaatgacccgaaaattttttagaaaatacacccttaaaatctaaaaattttctcaaaaattaatcaccaaaatttattttattttttttcttgtaaaaaaaattttaggcttaaaaattttccttattcgaaaaacattaaagtatttcataatcatttaaatattcgaaaaagtcggagcattggagaaagaacaggagaaaggaaaggtgaattcagttaaatgacaaaaatcaattaaaatttattattccgaaaa

SEQ ID NO: 77128 - DNA, 445 bp, Heterodera glycines
atggacaacgtttgggtaaaaattatttatatagctggttaaatacagtcatggttaagtataaagtttttcagagtttttggctcataaaatatttgattctatttgcaattaaacaactgtccgtacacttgatcactaaaaatttggggcatatcacctaactttaatgcatttttatttttaattggttttcaacactaaattttatatactgagtgtccgtacacttatgaccatgactgtatttgaaaaactattcttttttgtgcatttgagaagaaaaaaaaaatttttttttctttttttcatagattcttccgattttattgttgctccatcgtttggaggccaattgtttccattcgtttctttggttcactccggtgccgaaattgaggcgaactttgggcctaattttcaattcgatttgaccactctttaa

SEQ ID NO: 77129 - DNA, 671 bp, Heterodera glycines
atgcatttctcattgggtttatttttatttttctttccattattaatatttggacaagatttaggtatatttaaaaaagtatattttaaatatttttaaaattattatataccttttttattttaaattatttttattttatagattttatgcccgtccccgtgagaccaatttcggccgtcaattcgtccgctggtggcggcggggaacacctgcagttgaggcaggaaccgcgttgtttggaaagtgttgaggctggaaccgggacggacacaggtgggttgggcaaataattattcaataattgcatttacgcctaattagggtgaggaatttttgggggaaaaataattattgtaaaaacaataaaattatttctataaaattttgttattatatacagtataaaaaaacaaaaaaatttaaattaaattaatttgattacttttgacaatagaacggtttactttagtaggggcttcgcggttgggccccagcaagtttttggactacaactttttttctttgtccaccaaatccaacattgttggtatcatcgaaagcttttcatgtttagaagctatttttatggtattgcttgtcggttagataattatcaaaaaagttatagcatgaaattgctaaaaatttttaaattttttcttaataaa

SEQ ID NO: 77130 - DNA, 62 bp, Heterodera glycines
gcaatttgacgaaatatccataaagataatgataaatatataaataaaaactgtcacggaag

SEQ ID NO: 77131 - DNA, 2253 bp, Heterodera glycines
gaacatttgaagcccgggcctccaaaagctgcagctcatcaacccatttattgttacatttgtggccgtcaatttggctcaaaaagcattggtaaaagaatttataaaaaatatttaattaagaaagccatttttgctaatcgttttaaattaaaaaattatttataaaccaattaataggaatacatcagccacagtgtttgaagaagtggaaaatacaaaatgatcaattgccaaaagaagtacgccgtactgagccggagcccccaaaaattgttagaaaaggtttgaaaaatgaaaattaaattacagttaaaataattataattaaatatttttttaaatctagcggacaattcaattgatgtgaatgccaccaatatggcggcatatgaagcatcgttagctcagcttatccgctgcgaaaactgtggtcggaaatttgcgcccgaacgccttcaggtaaaaattaaaccattaaataaatgaaaaatatttttgtgccattgtttgacttttataaattttattaaaaacaattaaatctttatagttttttaaaattttcttaatatttttaatgaatttaaagaaaaaattaattattagctaaaaaattatgttaactataaacaattaattaaagaaaaattaaattcttttttaaatatgctttaaaaatttaaaatatttaaatacatatatgaatattgataatttaatgaaaaaacaatttaattcattttaatttcactatgaaagtttaaatgaaagtaattatttttttctttgttaattatttaaattattttctttttgctttaccattacaatttattataatattttgtttttgcatttttcttggcctcaaatcggcaaattttcccatcaggcacatcaacgtgcctgcactaaagagaacccgggcgtgccgatcattgtgcatccgggccagcaccatcgtcagccacacttggccacaagtttagcggcaaaaaaaggcaaaaagtgaaatttgtcggaatttaaattaatttttttttttgatttttttatataaatagccaattaaaaattgtgatttagccaatgttctaatatgatgtaattacatgcatttcatatttatgtgtaaatttctcatggtaaataaaattattttctttaatttttaattctatttattttaatctgtgtttttttttctgtattattaaaataaaattttagcttttttttaaattttctttgtttatattatgttttatttaaataaattttatttttattttccttttattgtttattaaattaatgtatttatttttaattttgattactgtaaaattacagttttatattttattttattttattttaattaattatggaatgttccgtttaaattatttttttgttttccgttttctcaaattcttttttcacattgttcttgcgagttaaagcgtcaaaaaacaatttcttaatcaccaacaaaaaaccactcacgttttagcagggatcacaggatcaaccacaattgttttattttttcatcaaatgattttttgttctatgctccttccaaatgtgaaaaattgaatatttaaggaaaaaatttttcacaataaaatcacttagaataataatttcaaattaaattaaaaattattttcataaattaagatccattttcataaaaatgcataacttttattttcctcttctttcctttgtcatctttgtgtatttagcccatttctcagacgcaaccaaagtacaataattaaaggatttaaataaaaaaatttcacaaaaaacatttagcaaaaatttcttggcggcgcctatggtaacgatgtggacaatttggatgcaccaaagcaacacattctcggcggagttggtggtgaaaaacagctcaaaccggaagatgcccagccaagaagaatgcgtggagcatggccatggattccacctcggaacgacaccaatggccaagaacagcgaaaatttctcggaggagcgaaggttgaaacagtggtgatcaaaccggaggatgcccagccaagaagaatgcgtggagcatggccatggattccacctcggaacgacaccaatggccaagaacagcgaaaatttctcggaggagcgaaggttgaaacagtgatgatcaaaccgccggaggcggatgatcagaaacagcagcaaaccattcttggcggagttcatggaaacgatgctaattga

SEQ ID NO: 77132 - DNA, 941 bp, Heterodera glycines
atggctcaaattgtaaaagtaacccacgacttggccaccgatctgtgggattggcctttgcaagtgattattttccaattgctttattttcaaagcattttttttatttcggcacgaagacggcgttgtgcaagtgcacaatgggagggatggttgggaggtcaatttggacgtcgcctttttcaagccgaacgaaattgaggcaaattcgaacatatttaattataaattaataatattaatttagaataatttagaagtatttttttccaaattcacaaagttcagataaatctgtcggccgaccatttgttcatctactgccatcacgaggaacgagtggacgagcacagctgggtgaagcgggagctgcaccgaagttacaaagtgccggaggacgtggacgccggcacaatccgatcgcacttcacgcgcaatggcattttgcagctgaaggcacagaaaaagaacacaatcaggtgaacccatttgagcgaatttaaaaataaaaaaagcaattaacaattaattaagacgaccgagtataaatgtggaagtgatagcggaagaaacaccaaagaaaggacaaaaagcgcaaaggaaatacggcgcagcggcagaagcagcgcaaaaaagtggcaaaaaggtggtggtggaggtggagaaggagaaaatgcccgtcggtgagaagaaaggggcgattaatggcactaatgggactgtctattacttaaaaaattgtaccaatttaagctcgaccaaaaagcccccgagaaaatcttttcacttcggccgacgatttctgctcctcgcaaatgccattgggcccatttggatggtcagcgaatctttttgatttaaccgacaatttaaaagaaattttgttaaggagtgccaataatagcagttcaagtattaatgcgttggttgggaagagctaa

SEQ ID NO: 77133 - DNA, 735 bp, Heterodera glycines
atgcgtctttcgcctgtccttctgctgaccatcgttgtgattgttgtgctcgccaaaaatgccaaagatagcaaaacggacgaagccaaaagggcgaaggaaccgcgcaatcggccggcaatgagccgcaggcgtcgctcggcgtacagcgcaatttggagcgaactcaaattggccaaggaagcgaccagcatcggctgcaaagtaaggaccggagcaacaaattgcttggcacattctttaaatccttgttttggttgttgactcatttgtcagtgcttaaccatcggacgcatttttaaaattttaaattttatttctaaattaactttgcatggcccaagtcagacgcactaatttaaatgatttggccgttgattcgtttaatttgcttcttctcatcaatgctttttgaaggtgttgcacaccaaaacatgcgatgcgattgcgcgcagtgagcgcggcactccgacgacgcttgaggacattgtgccgagcgatgtggacgcattagtggaaaaagcgacggtggcgctgaaaaaggcgacggagacggacggatttaacgaattgagcgaagcggaacagagacgcgtactgctagaaacagcggaaaagcagggcgaaattgtgaaggtaaagcagcaggacggcacaaaaatgtcaacggagcaaagcggaaaaagctgcggaaatcggctttttgttagtagtacaaccaacaaaatgttctaa

SEQ ID NO: 77134 - DNA, 240 bp, Heterodera glycines
atgatcaaagttgcccagcccgtgcttaaatggctcaaggaggcggaagaagggtcggacgagtcggaggacgacgatttggacgttgcatttgacgatcgaagccgcaacattgggatgacagtggaggtggaaaagggagcaaaggatggggtcacccgtgtacagaacggccaaattgcaaccaatggcaaaatggacgatgggaatgcagacgacattgacattgacaatatctga

SEQ ID NO: 77135 - DNA, 368 bp, Heterodera glycines
atggaaatgctctgtcttttctcgaccgatgatttggcaaatgtcttcgcaacttattgctatgccaaaggtttcatttggtcacaggaagagccgaggaatgccggctgttgggcatttgttgggccgaggttccaaagtgcatttggacttacggtaagtagatgcaaaagcggtcgtgattgttttttgagggggggggggaatctgatcttgaatggttccaagatattatatactttcattactttttaatcttttagttaaaatatgcaggacgaacagaaatggaatggttcgcaacttcaatcatcgaaacacacaaagaagaagaaatgcatgtgatggattcgacatttgctcaatga

SEQ ID NO: 77136 - DNA, 2154 bp, Heterodera glycines
ttgcttgagctgtgtcctcggcatggcatctccgaagttcgtttttgcactattcccttcatcctcccgctctaccccccccccttccgagcagttcatttttgatggtgctcatcggggtttgtttttgtgttttggcactgtgttcattgccctcccccccccccccccctttctcatctcttcccaccaaaggtcgtctcgccctccaaacggtccttttccgtttccctcccggccaattgttccgaaaggttcccaaatccgccgcttttctttcgtaaagtccgttttctcagatgcgcggacttgccgaatttcccggagatgtgaaaggaattggcgatgtgatgaaaaaataataattgaagacgaatttgaatccaaaagtgccaaaatggcgtaatgctttaattgtcgaaggtgctcacccaccaacactcccattttgactacgaatcccccgccggtggtcgtgtgcatgtcagcacattgcccaacccatcccatctcgaagttttccttttttggacgagtgaattgtgtgtcctcccctttttcccccaaaggtttccctcgcggtttgctccggcaaagctcgggcccgggctcagacactcaggtcgaacagagggggggggggggggggagaaggcatggaaggggagggttggacggatggaggaaggggacagacagttcgtcggtcggacaaattcgaattcagagtgggcgattacggtcgagggactgttggcgacgtgagttgttcactcatcactgagcactctccccaatttccctcttcagcgggtccttcccgtccaccaccatggcgacggagcattcactgggcagggcatcgtttgggaggtcggtagggaccaattgtgccattggtcctcatccatcccctagatttccttatcttttaaggtgttggcattgtctcaggtcccgtgagtgtattactgcttccgttctcggcatttccctttgcctctcagtcattttcgggtcggcggtgccattcatttgattgtgaacaaccaaatcgcttttactgccgaaagtgccgttggccgttcttcgctccattgttccgacgttgccaaggccattgactctccggtcattcacgtcaatgccgaatcggtcgaagtcggtccacaaaatcggaacggaatgaatgtccgccggctaactttcccttaaggatgtgattttcgctgctcaattggcattggatttccggcagaaattccgcaaagatgtttttgtcaatttgatttgttggcggcggtacggacacaacgaattggacaacccgcggttcactcagccggtgaatcgaccatttccttcttttttggcaaagtgtttagctcatgtaccattcggttgatgccaaacgttgtttggtcgattcgttcgtcgatcgacttgccaacaaaggccttttttccaccgatcagtccgagtcgattgtttccggtcattctgaaatgctgagtgaacagttggaattggtcgactctggtagaacaccgccaattgccgagcatttgggcggcttatggaaggggtgcctgatcacacttcgcaccctttgacgacatgacacccttttcaatttgtgtccgtttgctcaggttttgccaagcgccagccgctgtcaccaaatgggacaccggcatggacatggacttgctccgtcaaattggggtcgcttccgttacaattccggagggatttgtgagtgaaaagctttggcaagaagtccaaatcaaaacccgagacagattgtacacccgcacctcaaaaagacacatatcgaagccaggcgaaggaaaattgagcagggccaagtggggaaattggggggagggggagaatggcaaaatgggagggtgactcaaacacggacagatcgattggagcacagccgaagcattggcaatcggaacggcacttttgcataggaaatgtgcgaattggggactctgcagaaggaagccaatcccaaaaatgttttaaggatgctctactaaacgctcaagacggaccgtgcgaataatgcacacaaaatgccaatgtcttgacaggtgggcgagcgactttcacccaccgccacgcgatgctcgtcgaccaacg

SEQ ID NO: 77137 - DNA, 954 bp, Heterodera glycines
  unsure (1)..(954): unsure at all n locations
atgctttcgctttacccccagttgactgaagcncaaaagttgagtcgtntacgcatcctcctgacaggacaagcacgtgccgaattggattcgattgacccgcacccaacaacattaggtgacgcacttaatcatttgaaagggaaatttgaaaatgaaaatacgaggtccattgcacgccaagcattatccatttgcagacaagcgcccggtgaaaaagtatatgaatttgcaaatcgtttaaatgaagcgattagaactgcattagctggagagaatgagggatcaattcgcaaacggctgttagaagaatttttagaacggttaaatcccgatctccaatttgaggtaaaagcaggccgtcctgccaattattcgggggcatatgagcttgcgcagcattttgagttattgttggcctctaagcgggaaactcagatctcggtcgccgattcaatggccgaactctcaactcgtgtggtgacattagccctaacccagcaaagggacggagacttcaaaggccaggacaggcgccgctgctattattgccgccgacaagggcatgttgtaagggattgtcggataaagaaaaaagatgaaaatgatagccgccgctggggatcaaataatgatggccgccgctggggatcaaataattggcatcctagagaaaactgggacaggggtagagatgacagaggcaaaattttacggcaaattgcagaggacaagggaaccaaagaaacgatcggcaaatggcgaaccgatttacaagagaaaggcaatactttaatgggtcagaaaatcaaagaaaccgccgaaccccgactccctttggtcggcaggaaaatgaaggatatgagcaagcaaattcaccatcaggccgagtacactttaggggacggagatttgccgccgcaagattggcgagtcctattttcatggccctaa

SEQ ID NO: 77138 - DNA, 348 bp, Heterodera glycines
atgaccgagcaaaatatgaataattcgcagagcggctcaaacatacaaatgcccgcatgctcaatgggttctgattttgatgcaatatatttttcgcaagaggaaaaccaaacgatggctaatttattaaatcggatgagaatatttgagtcatccgtttaccatcaattccgcgctgtgcaacaagaaatatcaaattttacagcggaaatacctaagcaaaaagctattggtcgattggaagagttggaaagatcgatgaatgatttggaaaatatggaagaaatggataattttgaaaacacagagaaatgggcaaaaatggaaacaaaggtggaaaatttgacg

SEQ ID NO: 77139 - DNA, 1090 bp, Heterodera glycines
atggccataaaatatggacaacaaattgcgaaatatagacataaaattgcgaaaatctcaaaatatggacataaaatgacaaaatatggacataaatttttcaaattgagggtgtaatttctcaaaatttctttaaattcgctaaatgtaaagtaaacaaaaagcgaaattttcgctttttttgcttatttttgacaaaaaaattaccaatttaaaaaaaaattaaatatattcaatattctcgagaaaattttgcaaaaaaaaaaagatttttcggtaatttttccgatctttagggggtaaaaaaaggctaatttagctggtggggccgttctgatagaggtttttttaaaatgccaaaatatggacataaaaaatatggaaatatgttcataaatcgcgaaatatggaaaaatagggaaaatatggatatagaaattcactctagatgcttctaataaagctaaaaaacaagattttcttgcgtttcaagcctcccacactccaggaaaaaatatggatttccatataattctacgcctaataattattatttggatgttttaagctccgaaaaaataaaaatttcgaaaaaccaaattggataatctggattacaaaaaaaaaaaaattcaaaaagtgagtcataagaacaggttcgtaaataaaaagtcacgatttgctaaatcctataagtattctcaattttttgccctgccgaatccattttgatctgcgcatttcaggacccggttcaacccgataccggacccggttaaaaaacttggactcggaccaggacccggcttttctatacccggcaatacccactcggacccggtttttggccaaatactcggaccaggcgtaccctacataaaagcaataaacgaaaaatacacccctaagaattgaccacaaaaaaaatttcgttaaggttcaaatagttatggccagaagatttcaaaaaacttgagtttccaacctttttagccatgaacttgttcaaaattgaagggattttttggaattttgcaggttataggctggccgaacgtttcgtcactgaacctttcgtcactgaaataaa

SEQ ID NO: 77140 - DNA, 783 bp, Heterodera glycines
atgccaaatccgttgctgttgctgatcatcgttgtccaactgtttcaagcaattcatgcacaaccagcccgactccgtgtgccaagtgccgatttcttcggcggcattggccaccgcctttcaggcgatgagaacgttgcgatggtgttcatgctgttgatgatcaccattttggcaacgaatacggccattctgatcatgcaaattgtcatgttttggacagttatctcacggccaagggcagcagcaggtgaacagcagacggagaagaaaaagacggacaactacaagaaaatgatgagcaacaccaatggaaaaggtgagagaattggttaaaaggataaactaatgagatagagtgggaacgagagagaatgagcgcgagagagagataaaaagcgagagaaagcgagagagagctaaagagagagggagaaaatgccaatggagggctaaaataggagagaaagatttacagcctttatttatccctcttaaattaaaaattttataattattttgttgaaaaatgtttttcattactccctttccttttaaaacagtccatttggtgtcatcgcctcgtaattcggccgaattgctattgtttgaccgcaaagggaatgccgtcgtctgaacgctgtgcctttcggcaatttgctagaaaattgcaaaaaaaataataattcatttttttgttttcctaaatttccccattttacagtaacctcacccgtttttttgtactgctattatcagtaatttcattaattgacaagaaaa

SEQ ID NO: 77141 - DNA, 744 bp, Heterodera glycines
atgcaccaatttatcattatttcgttttgttttaattacttgctactggttcattttgtagttaataaaagcataaattctcaaaacattaaaagtaattacttaaagattaaaaaaattatttgaatgcaatttttttttgcaaacgtccccggtacgaaaacggtggtacgaaaaggtctccggtacgaaagcgtcctggcccggaaaaaatgttttcttttgatggttttttgactaacgccaattttgatggtttttgagtaacatgatagcaccctactgatcggcaaaaaaatcaaagatggattggcccagctctgatgctaaaatgagtgatcagaatcaatgcaatagttttccacttctgttcttcgccttctcaggcgttaacactcgaatggacatgtcacgaccaaattaatccatttgtggtatcccaaattgcaaaatatgtcacatggaagcgtaaaaacatgcatattattttcccaaattgagggaaacatttctctaatccttaatttaagctaatgaaaatggctaagtaatacaatttttgaaatttctttaatattctcaatttccagaaattgagttttttaaatttcagtcttcacgagtaaaaagtgttactaatacagctgaccgtctaacatcagttttagcttaatgacgaaaaacctaacaaattattttttctttttgtgcttctctgcgaccacaacagtttgaccaaataaa

SEQ ID NO: 77142 - DNA, 821 bp, Heterodera glycines
atgaaatttcaaagaaatttgtgtcgcttttggcgacaaattctaattcaaaacttaatccgacagacaaattcactgatcagtcgaagtttgggcacaaaagagggcgttgttctggtcagttttggcacaaacgatgcttttactgggcccggcgatgcgcaattcgtcaaagcattggctggcacaatggacaaattcccaaacattttgttcatttggaagttgacccagggaatcgaaggccaattacaattcaaatgggacaatgtgatcacgcagagttggatcaaccaaaaggagctgttgggtaggcgacgaaaaggaagggcactcactcacttttcaatggccaacaaatgattgatcagcaaactctgccgatcaatcggcccacaatttatgagttgtcaaaataggacgaaagtagattcaattatataagcgaattaaaatgggcaagaacagaagccgggaccagtaaaaaaaaaagaccaaaactccgctttttaacacccaaaatgagtgatcggcacaaaggcaaacaccaatcaaagttcagcccatcccaaaacaaaggcatttgtgtcccattgcgggatgaacagtcttttggagagcgttttccacggagtgccaatcatttgtgtgccgttcatcggggaccaatattacaacgcggaattgatggcatttcggcacattgggctggcagttgacagggaaaatgaccagcaaacagtgcaaaatgatctgatcaacgcattatcagaggcattgggacggcagcaggggaaaaagtgacaaaaattgaaaataaa

SEQ ID NO: 77143 - DNA, 1273 bp, Heterodera glycines
atgttggtcccaataacagatgcaacttataaattaaccaacaaaaatgatgaagtccaactgaatgtgcggtattttgtgcagaaaaagacgaaaccgttgcacgagtttatcatggagggagacttaagcaaaatgaatgacagaatttaccatggtaaattaatgcaaaaaaaagacagcgctctaaggatttaaatgagcagtagcttctcaacttttttttaaaaattagaaaaaactatctaaaaattttctctttcctggcgggaaagtttagataaacaaagcatggaaagtgttagccgcctttcttacgcccgttcaatccatggggctttttggtgcttttcctatcaataattttattgtgacaaaaataattcaaatatactttttttaactccctaattagaaattgccgatgactttgaactgatggacgaattacgtgccgagaaattcgacgtgggaatggcagaggcattctgtttcacggagtattcgttggcacttttccactttctgcaaattgcggtcacaatctctacccaaagtcagccgatgtctccgtttcagctgtatttgatgggccatttgagcaaaatgaaccattcggagggaatgccgacgggtaaaaagtgccaaaaagcttaaatgaattaaaaagagagagggagagagcgaaagagagagagtagatagagggaaagagagagagagagagagcgaaatagagagagagaaaagagtgagagaaggggggggggggagaagagaaatagttagagagagagagttcgtgatcaggggccacgaaaaccacgtgaaaatcacaaaaattatgcaaaccaaaaactcttcgcacattgtttttggataaaattaaaaaatatttattattagctagcgcctaaatttatgactcatgacttttttttaatatgtgccaaaagaaattaaaattattttaattttgtccgttttttgttgcttctgagcaaaaaaaaaacagaaattttaacgggtcttttcatttttcgtcttacttttgaaaattttcagaatttatcggaatttctacaatgaatttttttcgaaatggtggggagcgtatgaaactgctaaatatgcgcacaaaagaacaaatggacgaggaattgaagtggagaagagacgaagtttggaagaattgcgtggagcaaacattggccaaaatcaaagaacacataaatatggtggaaataataataatttaaatatttataataaa

SEQ ID NO: 77144 - DNA, 361 bp, Heterodera glycines
atgacttcgaaggaacatgtaatttggttggacgactaatattttcaaagtgtttgccatttccgcaacaaatgaactcattagtaaaaaggttatcgtaattaaagcagccatttggattaattattttctgatgtgccaaagaaatatcgaaatagaaaacaaataaatcaagccatttaaatattaaaaatcattcgtaatttaaatttaattttagccaacaatttccgaatatttgccaattttatgaaaaccaaatccgcctcatttccactttaatgttccacaattttcctttcctttccatcatttgccacacttttgcttcacttacaacaaattccccccccccggaaaa

SEQ ID NO: 77145 - DNA, 921 bp, Heterodera glycines
atgccaacggaacctgcattggatggcacggaattgtcccgaagcatgtgccaaaaaggaggacaaacgacgaacattgctggacaaatgcaggtgaacactaatgaatagggactccatttttaggcacaaaaaatcgagaaataggcactaaataggcacaaaaatcctcaaataggcaaaaataggcaaataaattttttattaacgctttttaggtagcaaaacagataaaaattttaatttgtaaatgaaattattaaatattttaaagtttttttcgaaaagaacaaaatttaaacaaaaatttttattaagaaaaaaatattaaatttttgtcgatcaatttttgagaaattttcaattcttaggagtgtattttctgaaaaaattttttcggttcatttcttaggggtgtgtttttcgtttttattgcatttttgttaaggattttttcaaaaaccctaaaatacgcacattaggcacaaaaaccccgaaataggcaaaaataggcattataagagtcatcgtagacacctcaaaccaagcggaaaatgcgttttttgtgcttatctatgcgtattaaatgcgcagaaattttaggcatttgcctaaaaatggagtccctaataatgaattatccaataatatgaaattcagcttaattttgatatttttttattcaaaaatacataaaataaataatatttcaattttattttggggttggacgcggcaaatttttataatttcagcaaaataatgccaaaggatttggaaaatccttctctggacgattaattcaatgtcatgcttacaaataaccggtcgaaaaaaagataatgacattttttcgtttttttcataatccattcgttggcagtaatggcgaatattttgatatattcaaagctcaataaa

SEQ ID NO: 77146 - DNA, 296 bp, Heterodera glycines
atgatacaatttttccattttagtaaatttgaaaatttgtgtggtaatgctttttaagtgttctgctggcgtgagtttctttctcgatactccaatggtcccattcattgaccctccgcttcaaaatcgcggttctctcttttttatgattttacaattttattatttttaaatttaaataaattaattttcagttggactgagcaatgcctacacttcgtatttgtataactacaaaatgaggccaacttgcagttccactggtggctgtggatcaccgtaatttactcaataaa

SEQ ID NO: 77147 - DNA, 1459 bp, Heterodera glycines
  unsure (1)..(1459): unsure at all n locations
atgggcatttattgcgaatatttgataggcaaaaaatttaacatttctattccactaacagccccactaattacaaccgaaggttgtgagtttcattgattgtctgcctcaaaaaagatggtgtttaatggaaggtgctcaaggttggcacgtgcgaatttagaaaattagcatttttattgcaggcaattcatttagagaagtcattaatttatttgttatgaagttctttcattgaaattagtttaaccnccgccccccccgcccttcagaattttgaaaaaaaaataaaataataggagactcagaattttgaaaattttttataaaaactgatgacaagctaatgtgataaaacaggttaattcttttcctttcagtatccctgcaaagtttggggcgcttctgataagtttctgaaaaaaaagttaagcctaaactttttggcctgtttaaaaaggaattaaaaatttttaaaaatttattcatctccctttttgatagaaaaagcatcagagtgcctaaactagcatgtaaataaaatttggtgcgtttcagagcattttctgaaaaaaatatttatgaattaattatgcaaaaataaataaaaatttctaaaaatttgatcgtccataaataatttgtaattgatcaggggctcaccaaattttgcagggatacgtatcggaacactacaaatgcttactaattttcctagattttttaaacccggtgaaaattttttgcagacaccaccacttttgcacttaaaaaaatttcaaaaaactttaaaaattcatagaaaatttaaattcataggtactactgctaaatcaacgcagagacgcctttccttgacctttttaggcccctgcaaaatctggtgcgcttctgatcactactcgaaaaatgagtgattgaattttcactaaaaagttaagcctaaactttttggcctgtttaaaaaggaattaaaaatttttaaaaattttattcatctccctttttgatagaaaaagcatcagagtgcctaaactaacatgtaaataaaatttggtgcgtttcagaaccctttctgaaaaaaatatttatgaattaattatgcaaaaaacaaataaataatgaactctcttccttaataattttcctgcaccgaaggtactcactcggccgcttcgcggctcgggtgggggccttccccccccaagcaacagttggtcaatctgttgggtggtattgatggtaatggcaattagtgtcgcgtaaatcgggagaaaacgttttgatattttaataatttcttccactaatttcagatgcccaattgactgcctatacaaatttgccatcaaacaaatgtaaaaagattgaggaatcggatggcagcgtgttttacttcattcacaaccacgaagaacacgttaaaagccgaaacattgaggagaaacttcaattttga

SEQ ID NO: 77148 - DNA, 483 bp, Heterodera glycines
attttttgcctatcaaatattcgcaataaatgcccatctatttaaaaaatattctattctattaaaatgttctgtattttgctatatattaagaatagccgtacatctaaaggcgtcagtaattgaacaaatttctcaaatttcaagaaaggttcaggcagtcgccgtaaaaattgtcatataaaaacaatggcgatacgcatttcttcactaggtcctttttcaaaattgatgtgcttttattgaaaaaacatgtttaacgggccacaaattaatagacaaattcaggcacattcttaaaaaattctgcttttaattagttcatttaatagattatgcttttgctttgtttttttaaattctacaaccgcgattatctgataggacaatgatatcaataaattttcttctgaagaagcgaagagttagcccaaacgttttccttcctttctatttaatgatctatcatttcagatataacag

SEQ ID NO: 77149 - DNA, 484 bp, Heterodera glycines
attttttgcctatcaaatattcgcaataaatgcccatctatttaaaaaatattctattctattaaaatgttctgtattttgctatatattaagaatagccgtacatctaaaggcgtcagtaattgaacaaatttctcaaatttcaagaaaggttcaggcagtcgccgtaaaaattgtctatataaaaacaatggcgatacgcatttctgcactaggtccttttacaaaattgatgtgcttttattgaaaaaacatgtttaacgggccacaaattaatagacaaattcaggcacattcttaaaaaattctgcttttaattagttcatttaatagattatgcttttactttgtttttttaaattctacgcccgcgattatctgataggacaatgatatcaataaattttcttctgaagaagcgaagagttagcccaaacgttttccttcctttctatttaatgatctatcatttcagatataacag

SEQ ID NO: 77150 - DNA, 2589 bp, Heterodera glycines
atgactcaaaataaaattgcacctcgaaaacagaggacacatgagctcagctggctccgggacgacgaaatgcgcgctttggccaagctgaccgacgtgcagtccatctggtcattgctgcggccaatccttgtcgagcgccaagttggcactccgcaacacgacgcggttgcccatgtgagcaagttcggcagggtttttggttcatttcgttgtaattgccttggctacattaattaaggaattactaattaaagggagtgccaaacgttttaatcatattttcagctggaagattaaacaaaacatcttttggggccttattttgaacaaaaaaaggaaacgagttctttggagcattaattcggtttattcacaattcgcccgcttaaacctgaagagattaaagcaataaattggcaacaattaaacttttttatgctctcaattagcggcttaaagtgcaaaaattctacaattgcccattgtttcagtatttgaagacaaaggtggaggagttcggcttcaccgccgaatgggacagctttatggcacacactccgatgggggtgaagcggtttcacaatttggtggccactttcgatccgctcatccatcgacgactcgtgttggcctgtcactacgattccaaaattaattccggggtttgcacaaattaattcttggattaaaatgatgaggctaaaatttcgtttttctgctatttttattggggttttacctattttttagacatttttgaatattttacatttttaaattagtgtccatatttatccttattctaagaaatggaacagcttcaaaatggtccatttttggaaaaaatttgaaaaaaatacattaaaaaatgctcaaaaaaattctttgaaaagacgggacaaatattatatttttttgacaaatcatacccaactcatcaatctcacattacgtgccgtggcattttttgagttgcgcggtcttcattgtgacttttcctggacggattgggttgggtttggctgtctgttgggtttacccactttttaactagtgctagatttattttggcgaattttcattccgatttttttttaaattccctaaatttcgacgaaaaaagggatttacttgattcctttttttacaattaaatgattttatacatagaaattcgggcttcttttcattgaatggaaaaattaacaaaaaaaggccataattagtccatttttctattcacaaattcccccaaacagaaaagttttcattggcgccaccgattcggcattgccttgcgctttgctgttggacattgccaaaacgcttggccctttgttggcgtccagaacaaatcaggttcaagcaattgtgttttttccattggtgggggaagggatgaatcctgaaaaattctcaaaaattcctaatccaaaattttaaaaattttcagagaatttttcacgactctccccttcccccactatttggttgcttacttgagtttgggaaagaaaggtgtgagtggagtgagtgagtgggatgccgtgttcgggacaaacacaaaacaaatacaaattaaaatttattatttactaaaacagactttcaaattacccaaaatgcctcaggcatttaaaaacttttcaaattgcttgcattgtttgcttttgcatattattcggcatcatattaatattatttcactgcttctgctgacactgaattcgcatattcttctaactttaaaatgctttttagttttgttgcttttttaaatatttatatggcctgaatttcgcattcattgttcaatcaacttgattttgttcagttggttcgttttgtaaaagttccaattttacagacttttcgagaaaattttgtcataacttttattaatcacaatcaattaaaatcttgctatcatagaatatctcttggatagttctattaagcacaaaagattttcttttattccgtttcaaaatgattgtgaccaaaaagcccaaaaaatagccataactaactaaaaaatgaataaaattttcaaaaatttttcatgctaatacataatatttggttgtgtttaagaagagttatgacgattttttctcggaaaatcttaaaagtggcattttttacgaaagtcaatgattgccaaattttagaattttactaattgtgagcattctttttcaaaaaatttggccttctttccatctcctcatttgccaatttcctttgtttttgccgccgtttaccttaaaaaggaaaagcctttcttttcgagtcactgctttcccaaaacagcgccagcaattccaatttcggcaccctcagcaatggccagttggcccaccatcgtcgccgacttggccaaacattggccaccgtcgtcgccggcggcgggcgacactttttgtgccgcccccaccgccgccaacatccagcggtggcggtgccattttagcacagttgccacaatcgcgtgccagcgttgtgccaaactcgtggccgattccgccacagtcaccaccaccaccagcaaacacgaggagaggaggaggagaaaaagtggattcg

SEQ ID NO: 77151 - DNA, 884 bp, Heterodera glycines
atggcaccgccaccgctggatgttggcggcggtgggggcggcacaaaaagtgtcgcccgccgccggcgacgacggtggccaatgtttggccaagtcggcgacgatggtgggccaactggccattgctgagggtgccgaaattggaattgctggcgctgttttgggaaagcagtgactcgaaaagaaaggcttttcctttttaaggtaaacggcggcaaaaacaaaggaaattggcaaatgaggagatggaaagaaggccaaattttttgaaaaagaatgctcacaattagtaaaattctaaaatttggcaatcattgactttcgtaaaaaatgccacttttaagattttccgagaaaaaatcgtcataactcttcttaaacacaaccaaatattatgtattagcatgaaaaatttttgaaaattttattcattttttagttagttatggctattttttgggctttttggtcacaatcattttgaaacggaataaaagaaaatcttttgtgcttaatagaactatccaagagatattctatgatagcaagattttaattgattgtgattaataaaagttatgacaaaattttctcgaaaagtctgtaaaattggaacttttacaaaacgaaccaactgaacaaaatcaagttgattgaacaatgaatgcgaaattcaggccatataaatatttaaaaaagcaacaaaactaaaaagcattttaaagttagaagaatatgcgaattcagtgtcagcagaagcagtgaaataatattaatatgatgccgaataatatgcaaaagcaaacaatgcaagcaatttgaaaagtttttaaatgcctgaggcattttgggtaatttgaaagtctgttttagtaaataataaa

SEQ ID NO: 77152 - DNA, 312 bp, Heterodera glycines
cggaacgggccaactccgtctggccaactccgtctgagccaactttgagtcaatataactcttgaagttattgaccgaatcaaacaatcttgatatcattcgaaagctcttcacaggctctattagcctactaaaaattacaaaaaatttcgaactataaaaaaagatagaaataaaaaactttgaaaattctgccttttttgcggttttcaactgacaacttttttgagagctgattaatcactgagaaatagcttataaatatcttctaaacatctagggctttcgaatgataccatgattgttgaagtt

SEQ ID NO: 77153 - DNA, 230 bp, Heterodera glycines
atgtgccaaagtgagttaagaaaagtcaaacaaacctcaaaagaaaaattcgaaaaaatgaaaacaataaataaaagcaaagcagtaaacgaaaaaacaaacttctagcaaaaatacagaaaaatttacgtaattcttttttttaaaaaaattattcatttaaagaaaagcaaagaaaagaaaaaataaaaagaaaagaaaaatctgccaagtgaattaagaaaagtcaa

SEQ ID NO: 77154 - DNA, 846 bp, Heterodera glycines
atgcgctacgacgagctgcgcttcccatgccggcgccagggcggcgacggcagcagtggcacgttctgccaacagtgccgcttcgtgttcccgaacgcggactgctttgaggcgcaccgccggcgcgtggatgttgcgccggcaccgcctccgggcgtcgccgccgctgccgccgctgctgtgcctcacggtggtgaggaagcaacgggtggagacggtgacgacgcggtttctttagctgctgctgttggcgccgctgtcgcgccagcgtttgcggaccgccgtcgcgggcggccccaccgttcaatgtgtgaggagcggcgcctgtgtgagtggtgcaatgtggttgtgtgggcgcgaagcggtccgcacgtgtgttgccgccgtccgcagcagcaacagcagcagcagcagcaagagaatcgcgcagttctgcagcaacaacagcagaaccaccaccatcagcaaccgtcacgaccaaaatgtgaaaagtgcggcggtccacacgatccggaacgaacgccgcacttcatccagcccaagcagtacgcgcgccagtgccagtggcgacgcggtgcggcacgtggcgcccacgacaacgctgacgacggagccgttgctaatgctgcgactgctgttgaggatgacgacgatgatgataatgtcagtgaagaggaaggggcggcagctgttgccgagcgtgatggtgctggcgatggcgcacgcggacgcgttcgaaagccaaagccggtgcgcttcatcttttgggatgttgaatgcgcacaggagcgcgtgggtgagcagcaggagcagctggaggacggtaaccaattcgtttttaaatga

SEQ ID NO: 77155 - DNA, 1456 bp, Heterodera glycines
  unsure (1)..(1456): unsure at all n locations
atggatgcagttcaacagcagcaacagcagctgcctgaactgttgaagcacgtgccggtgttggtgtgcgccgaggtgatctgcgagcgctgcatcgcctacggggtggacattgagcgtgagccgttgcgccgcgcgccccagtgccagtgcggtgtcccgtggcgtggtgcgaaccggcgccggtggtgctctcgcatcggcgaggagctgtttgacgacgacgacaccggtggaccagcgaccgcacaacaacaacaacaacagatgccgccggatggattgaacccgcggcggctgcgcttcttctgcgacggcgagccgggcaccggacgtggcgcaatggcccaatttgtggactttttgctccacaccggccccaaagggacgcgcaccgtgatgttggcgcacaacggggtaagagcagcgagggggtggggggtggcaaccgattagtagtgaaaaaaataacatttttcagggtcgttatgacgttcacctgttgttggaggagttgcagcggcggggcgagcggccaaagaaggcggttcagcacgggctgcgcgtctacatgctggagctgcgcgggacgcaccagcgccagctgatctgcaaagactcgctgaacttcttccacgcagcgctcgccaccctgccgcgcacctttgggctgcacggggtgctggacaagccgtttttcccctaccatcacattcgggagcagaatctggatgttgagctgccggccggcactctgccaccagcagcggcctacgacccggaccggatgcgtgccgcgcagcgtgccgatttcatggcctggtacgagcgcgagctgcaccggcccggacggcaaccgtttgtgctccgccgtgagctgttgcgctactgctggaacggttagttgttgtcggaaatgggggtgcgggagtggtggaaaaatgtgctgtgcatacagatgtccgtatcctgcgtgccgcctgccttcgcttccgggagttggtgggcgaatgcgcggacggcatggagcccttcctggcagccacgaccattgccagcctggcgatggcggtgttccgccaacaccatctgcgcccgcacacaatggtccacacgccggagggcggcttcctgcgcgggcgtcgcgcgtcggccgagtcgcgccgcttcttcgcactgctcgccgccatgcgtcctgacttgggcccgttgcgcaccgcccgctggtcagtcggagagatggtggtggacaacagcagctggggcggcgacgacgacggtttccgcctcgactgtgtggcctacagacggccaccgttgcgtcccctctgcatcgagttcaacggctgctacatgcacggtgagtgttgttgttgttgttgttgtcaattgcggcaattttttcccaattacgccattgtcttcaggctgccgtgaatgctatccggangcgtga

SEQ ID NO: 77156 - DNA, 675 bp, Heterodera glycines
atgactaaacgacctcgctctcaaagtgaatattcgccaatgtcaaaacaaagcgacattcaccaacttattgactcacaaatgaaatttgccaaaaacaccattgatgccctaaacaaactccaagattccttcacccttgaccaaaagccaattctctcccacttaatctccaccttgtcgactcaatttgaccttttgaactcatcgattgttcatctccgctctgctgacccaactcaaaaagacgtgcccatttcagcagaggagttagaacgacaaagaagtgtcgtgataataggcctgcctgaacataatgacatttcaccatctaagcggggggagatggaccggtccaaaatcaattgtctattcgattcgctggggatcgaatgcggcaccatatcgtaccgaatgggccgtccttacaacccagcacaaaaaagtgcccgcccactcaaagtgctcttgccttcccgtgcttttcaaagacaagctcttgtggaatggcggaacaaatcgaacacaattcgtagcaaagacccatcgcttcaaaacgttcgcgtccgcgagtcattgaccaaagcacagctggatgaacggcgtcgtcttcatgcacagtgtgtcgaaaagcgtcagagagacggtcaggattggattgtctatgcaggaagc

SEQ ID NO: 77157 - DNA, 310 bp, Heterodera glycines
atgttaaacccagccatatactgtagttgttttgttgaacaaatgtcgcacaaaatcgattcaaaattgtcgcaaggctttgaagcgcgtatcattacgccaacattgttaagaatggtcaatgattttgaacgaaatttgaaaaatggcaagtgcaaattttcgacgacacctgctatttcagaatattttctgcgcacaattgtggcaggcaaaaatcaaatttatggccaaatgaaaattggtcattcaaacacatttcgtctggcattatgccaactgctgcatttgaacaattttttggcagaaa

SEQ ID NO: 77158 - DNA, 628 bp, Heterodera glycines
atgaaagtgctcgacaaattgaaagtgattggacaaatttttggatatatttttaaaaattaattggggccaagataaaaacgggaaaaagccgacaaaaagcgaggaaaagccgaaaaaatgtggggaaccggtgaacccatgccattcaggaatggacgaaatttcgtttccttttcatttcttcccccctttcggcactttttgagtttcgaaaaagcaattttaaattagaaaatccggtattgtttctgttgcaatttaagtaatcatttttaaaacttttttgcatttttaacattaattttggcgatttatttgtcatttttagtttcattccttacgctaagttttgggtgttttttcctataatatgcgtaaaattcatttactttttcgaataaaaaaaaattttttttttaatttcttaaattttccatttttaaaatttaatattttcaaatttcagctcgtcaaaaactacgcctgcttcaagccgccgcccattcgcaaaaagaatgccaatccgcttcatctggcggttcatcgtaatccccttcaacttgtccagcgcgaaattgccattctgaaaaagctttcacatcccaatgtagtcaagctgatcgag

SEQ ID NO: 77159 - DNA, 671 bp, Heterodera glycines
atgagcagtgatttggccccgccgaccattcaggtgaggcgaggaatgcgaggaatgaatgaataaaatggggcggggcgccggacggaccggtctcgagactggagaacccaatctgatgacgagagcctgaccgcgtctcatgtagagattcccggactcgtaatcttgatctttttgaaaaaattccgagttctacccaaagaaaattgaaaattttcaacaaaaatactatttttttctttaaaatttcggggtggaatggtcttgggtcgggggggggggagaacgggggtgggtaaataaatactctgtgtacccctccccccacccacctgggaccgtcccggggtttattgtcggatcagaatttagcctgattctgtctggtcttgatcaactaccgatttcaatcccgggaatgattaggacaaaagaaaaccgggagaaaaaaaacgaaaagaattaaaaaattggaaattcatctcccatcccgttaatacttatgcagctgatcacaaacaaaagcatacaatgctgctttatacttgataaatttgattcaaaattttaaacaaaaattaattttcagacaaatcctgtcgagacgggggacggtgccgagagttcgtacattcagctgaaccaggcgagccattagacaaaataaa

SEQ ID NO: 77160 - DNA, 1835 bp, Heterodera glycines
atggtaccatcgacttctatcttagaaagggatcggataaatatatttcatttgtatacaaagtcaaaattgttagtaatctgcaattttacttaaaattcagatcatttttcttggtttttggaaattttccgttctgttactcgaaaattggtttgtttgtttttaagttcgactttcatgccaaaaagagatgctctgttctaaagctggtgatttctggtttgattttggtggcatttataatgacgttgagttttctgtttgttttcactgagttgagtgagcatgtcaacaaaatcagttcttatgtggcgcagaaatgtaaagaaaatatttttattttatttaattatgaagaaaatattataattaaccccactgagcatcacactaaaaacctcaaaaaatctaaaacaacttttaaaaattgaattcttttttttcttacggacatttcactggttatttcgactgaatgttagagttttatgatttaactaggtgttccttaactcaagtcgtgaaaaattcgtatccaagattttgaaaattttcaaggccttccccgcaaattggacctgggattttatcgccgaacctgacatttcattcaacgaaaatcgcttaaaaacaaaccctaatttagataaaattgaaatttaaacttattttcttatgcttccttcttcagggtttatttaaaaaaacatagagagatggcaaaagaacccaaattaaattattcaagagattaaattaatggttttatgcgcataataaatcgaagaaaccggcactaaaaatttaattttatttatgaattaaattttattttaaattactttttagcgccgtttactgcatgtagtttgtgtacagacataaaagtgattggtggcgaggaatatacaaaatttgaaaaatggacggatgggaatgggtgtctccgtttgacaatcacttgcggattagaacaggagacagaagcaattatacaggtattaatagattttttaaaatttattgatttaactcaattatcgatttgcaaaaaagcaaggatatttgtttttaaaattttaatgattatttaagcaaatttttgaaaaatatcattcgctggcttcaaaaatttcataaatcgcgttgttattatcccaaaaaatgaagcaaattggggtttggaagttccaaaatcaatgaaaaaatagtaaaaattttgtcgagaatattttgcgatagaaactttttgctaaaacggattcatttaggttgtggtgccaaagaatttgctaaataaatttcatggcacaaataatttagtggttcaatgaggacaagaacatgggtgcgtcatttatggagcgatttggacaatcaaatgtgatcagatcgttggaatgcaatgcccgtgggcgttatgaacttttcgagaatggaaaccgaggcatttcaaaatgaaagttcatttaagttaataatatgtttcatatttagatgaaattactaagattgaatgcattgttgtgttgaaacgcaatgaactttgatcattacaaaaaaaatattcatcaattcattactttttatatcaaatttttttttcttaaaatgtgactaacagtttaattttttaaaatttttattaaagattttatataatgcttaggatggaatttggctaacatttcaaaaagtttaaaaattcattttaaatttatttgtagaaatttcggtctgctctctctcaattaatttcattatttaaaaaaagtcctcaaaaatgctaactaaaaattgcaattttttcattttttattttaaacaataaa

SEQ ID NO: 77161 - DNA, 73 bp, Heterodera glycines
atgaattttgatgccgccgatattgttgaacaaggcaaaaatattagtcgttcaccttcaactggcacagaaa

SEQ ID NO: 77162 - DNA, 288 bp, Heterodera glycines
gttacatttttattcataaattttgagcaaaacacaaaaaaggtcaacataggttttgttaaacttcttagggttcaaagaaaataaaaacgataaaataggtgctaataactcgaagagttgcttaacaatcaccaaaaaacatattttccatgctttagggccactggaagttcaggaaaaataggtaaaatctaaaaaacatatttctatgtagtaatattatttagcaatacacattatatgttaattaaaaagaaatttagtaaaactgacaaacaataactt

SEQ ID NO: 77163 - DNA, 888 bp, Heterodera glycines
atgcaatttgaagatgactccattttgattgcatttatcgaggaaatatttttaaatctgctcaacgataaaaattttgttgatgagttacagggagagaacaatttcaacaacatgagattaaaaatgtgagagggaaattgcaaaaatctatcattaattatatgaaaaataaaatatatacaaaatccataaccagtctttcaaaaattttcaaattttatttcttatataaatatgttcgagtttaaaaaaataataatataaaatataaaaaaataaatcaggaaataccaaaaccaaccgtaaaaatagtgtgttaatgatgatgtgaatgtcagacaaagaaactagagttaaataaaatagtacatcattttcaccaatgtctcaccctttttcatccccagacaaaaaaatgcataaattttatcattccatataaaaatagaggcaaattagggtttgctgtacaatttgctcgctcacgccgtttgtcgctgcgggacagtttctctgtcgcaacaccgaaacagccgttatccagcggcctcagtcgagggtcgcggcatttcctggtgccctggcaatggactccgaaaaaacagcaaaatatgcattcggttggagttggcttgagcaaaaatcgtctttttaatgatttatttattttttttgtttttaaaaattaagaaactctttttttaattttagagtccattggaaatgcagtccatcgggcacggactatgatgcttatgtggcttttcttaaaaaaattttacttggacggaaattttgtaaattttgcagactattagcgcttatactaaggtatttctttgcaaaatattcaattattctaaaaactacggattaagtaataaa

SEQ ID NO: 77164 - DNA, 558 bp, Heterodera glycines
atgtccgggataacctctgccgtcgttaaccttgaacaaactgattctcaaacgagctgtgcagtgaagccaaatttgcacccaatgcttcacaacgtgatttggcatcttttgaattggcaaaattttctgcgccatgtgagccataaaaagtgaaaacctatacaaaaaaaaatttctgaataataaaacacactaaaaagttgcaaccttaaaacaatttattccaatttttgaccatccttcctcacaagaaaatctttttgcggaagtcattgagcagcagcagccaattagggcaaaaagaattgaaaagtattttaaaaacatttgttatttatatattttattttttattttcctaaaaataagcgcaccttttatatttgtaaattcagagaaatggaaaaattaattatttatttcaacaattggtttacacattttttatgttattcatttatttttgtcattcttttattccttcaaactaattgcttctctgactttttcttttgttattttgctttaatgaaaaattattttataaataattaa

SEQ ID NO: 77165 - DNA, 180 bp, Heterodera glycines
atgagtttgactcgcgcgagcaatggcacaattttgagtgccaaatggtcagacggcaccaacacacactacggtaatcccctcaaagttgccgaccgtacgccgtggtacacgcccgaacatcgtccgaaacaggacagccccgaaagcaattgtgtgttcatgttgttgaccaattca

SEQ ID NO: 77166 - DNA, 298 bp, Heterodera glycines
atgaagaatgtgccgccgaatcattggatagaaagaatggagtggccccctgggaaagagaacgaagtggtcctcactccatgccgtaggggcgaacaaaaaaaagtggcaccaaagtgctgctttctattggcattttggccgaaggcactttttgaatgttatttatcaacggatgagagaatcgatgatgcaccagcaggacagaaagttttggaacaaaaatatgaacaatgccaaaaaatttgatgcggaaaaaattgtgcattataactcgaaaaaggacgccaaaaataaa

SEQ ID NO: 77167 - DNA, 1690 bp, Heterodera glycines
tgctttataggtgtgttaataatattacatggattggcaaaaaaaaaatcaataaatttctggcaatttgcttaaaatctctgtctgctattcggcataaagaatttgccaatattttttgtttcccttttcttctgggcgtagcgtccccaattttcactggtcggaagcacaaaattggttccctaatgacaaattttacataaacccacataacatttaagcgaaaaatgacagctgctgtgccgtgccgtgccggcttttactgctggacaccaatttaaagaaaatgtttgtttacttgaggacgaaatttaaaaaagcgacaaaatggactattttttccaataataatttacattatttattattttatcgctcgctattctttatttattgatttttaatttattttaataataggcatttttggcattagagcagggatgtgtgatttgttatgatttatcagattttctgatttggagggttcaaatctgacaaaataaatgtcctgatttatctgataaaatattctgatttgggggtagtgactaaattttattttgatttcttaaacaggctcataattttgaaaatttatggcataatttcatttatctagaattttttaaattgaatgaaaatcggttttaagtgattttaaaaattttctgatttttgacccaaaaatctgatttttttgtagcccgaaattttgataaaataattccaatttttttaaatgaattttatatctaaaattaggtccaataagaaattttcttgtaatataaatgccattttgaaaggaaagaattaaacttttaaatgccatcaaattttcggcattttattttttgtttggtcccacattttttgttcagccggttcggctttgtcaatgcacatttggcggttagcaaaaatacgccatgcagcatgcagtcatcacaaagcaaaagcatcatggccgtactgctccaagactatgacaaagcatcgaacccaaccggtggagtcatagaggtgcaggcggaggtaaaatccaattgtttgggttactctttttgggcgcaggattatgggtgaaagaaaggcatgtcccaaggtcggcacatccgtttttaataaaagggccaaacatttaggatccaccagggtttggtcatctgctgattagattctgagggtcagatatgtcggaggcggataagttggtgtcgtggcttggcccaaaatttggtattctggagcgccctgggtaaaaccacagcaaggctgggcgaaatttcagattcgttacgtcagatttttaattttgaatttcgagttacaggttcgaaaatatttactttagtgtcgagtttgggttgctcgatgagttattttgatcagccctaatgaccagacagagaatgtgcctattcgggaattacttccgccctaataaaaatcaattaatctctctaatcccattgaacagataaccgtgcaggatattagctcattatccgagacgagttcctcctttgtcgttgatttgtggttctcccaaatttggtctgatcctcgtctcgtctactcccatctgtcgtgcaaatccaacctatcgcttgatgagtcgttggcacaacaattgtggaccccaaatttatgctttattaacagccatgacacttacatacac

SEQ ID NO: 77168 - DNA, 873 bp, Heterodera glycines
atgcgtgcatggacgaaattgtaccagtacaatgtcaacggacaacgacagtccatgatgttgccagcagttccaacaggaacaacaacagcaacaacaacaacaacaccagcacatttgtgccacaatctagaacagattcggtaaaaagcagttttggtgctgatttgtaaacagactacttgagagagtaaaggaggatttgcttcggtagttcaatggtagagcagtccacgggctaggtggaaggcatgggttcgattcccacccgccgagacattatattttgcacatttatttgatattcaaagcactttaaaatctcgcccaagtgtgtatggaaaatgagtgtttgagtatcgctgattattttggcaccggtggaaaagttatggaagaaaaacccctactaattttgggaacataatgccaaacattttttaagcaagccccgttcttgctgacaataagcaaacgattgattgaaatggaagcgcaaacacaaaagtcagaaaatggatcagttgtataaagtgtaaatgcaaattttattttctgccaaaatttaacagatttattttaataaaaattaaatttaattaaaaatcttaatcaaatatattttcatgttaattttataaaattcaacagggcacttaacttgtaaaaatgatttcacttattaatgggattggtgaaatttgctacaaaattattaatacttttccagaatttactatcttagaaataaggacacttatgaagcaagtataatacaaattaattgatttatttaaaatttattaatgttattgcctttttattaaacaaatcattcttaattttatctgctcagatagtaggcccaataaa

SEQ ID NO: 77169 - DNA, 68 bp, Heterodera glycines
gtctcgggatcggacgacggcatcacatttctttagcctactctccaaccctgaaaatggaagactag

SEQ ID NO: 77170 - DNA, 1705 bp, Heterodera glycines
atgaatttctgtcagttaaaaaaatcgctttaactctgatgggtggacttcaaaggataatcgccattctttgatttcagttactgggcattttttggaccaaaaattcaagccaaaattttttgttttgagcaccaaaccaataaaaggtttttaatatagtcagagttcgaacattttatttttcagggcgacacacagctgaagcaattgtggcatttattagagaagcattaaatgattttcaaattcaagaggagaaaatttcggccttgacgcgtgatacagaaaatacgatgaaaaaggttggcaaggacttgggttttgtgtcagtggattgcgcagcgcatgttttgcaattggtctgacaaaataatttaattaaatattaaaaacaaggattttagtgcattaaagagggactgaggtcaattgaagaggaagagcgtttaaaaaatcttttggaaaatgtcaaaagatttgtacgaaaggtgcgaaaatcaagagtattgacggaacaactcgctgaactccaacaaaaggaggaagtaccaccaacagttttgattaaaaatgtcgaggtgctgttcttctatatttcaccattcttataaaggcaatcaatttcaggtgcgctggaatagttcgtataaaatgattgaacgttttatcagaaacagatctgcggtgaatttgttttcaattgatcattgcgagcttccaaaatttaacgctgatgattggctgcttttgtcatcaattaaaagcgtactttctcccatttacgaggcaaccattcttttacaaaacagaagttcttcatgctcaattatcattccactttttaaagttagcgttaatttttttcctatttattagaaaatttaggcaatttctttcggtctacgtgaggacaaggacaatcgtttttcaaatattaagaaaacaattgcgaatgccatcgaattgcggcttaaacaagccgaagaacaaaaaaacctagttcttgcaactattttggacccacgttttaagaccatttaccttgacagcagtcggctgaatcagtacaaagactggttgataagtgaagttgagagttaccatgcaaagactgatgtgattttattttttctatttttgtaacttaatttttttaggaaattgatttacaaattgacgtaagagactgcagtggttcaagttcggctggggatattttttctcgttttgaaaaggacgcagaatttgagcaaatactgaatactgtaaataaactttatatacccctcataataattaatttaaggcaacatcccccagtccatctgccttggagacaagacaaaaagccgaagttgaagtaaatgaatatttgcgggatccaaaaattaaatccagggccgatccatcattatactgggaagtcaattcacaaaaatggccaatgattggtgacgttgtacggaaatttctttctccacctgcaacaagttcagaaagtgagaggcttttctcaacggccggtctaatttcagatgacttgcgaaagagtttattaccagaaaatcttgcaaaacttttgtttcttcatcacaatttgcttttaaccggtttctcaattgaatgattttgcttttataaatttgctttttaatatgcttttaaattgctttaaaagatttataggattttttaaaataaa

SEQ ID NO: 77171 - DNA, 1287 bp, Heterodera glycines
atgtcaaacttaaatcctggtaattggtggtattattttgagcgtcaaggcaaagcaactgctaaatgtaaagccgatggatgttcctactcaaagacattaaatgcttctctcagtacaactgtactgacttttcacctcaaaaatcaccaccctgaactttacaaacagcgtgaagattttgttcaagcagagaagcaaaaaacagaaaagaagggacaaagtggaataaacccattaaaaagggcttttgcaaatgcattttgtggttcaagtcaacaaattactgatgacgaagaaaaggaagcgccgatttcatcaaaatcacctattttaattgggctaaatgcaaaaagtatgatctgatttttttttctatgcgttattacattttgattaaggccagtggagcacggacggagacgcaacaattggcgcaaatcgagcactaatggaaatgctggccactcaattactgccatttaatctcgttgacggtgttggatttcgacaattcgttggaaaattacagccaaaatacaaaattcctcggcgcaatcatttcgctcaatatgaactgccaaattgttttgaagcgatgaaagtaataatcaaatttgcgctttcataattctaaaatttagaaaatagtaactgatgaatttctgtcagttaacaaaatcgctttgactgctgatgggtggacttcaaaggataatcgccattctttgatttcagttactgggcattttttggaccaaaaattcaagccaaaattttttgttttgagcaccaaaccaataaaaggtttttaatatagtcagagttcgaacattttatttttcagggcgacacacagctgaagcaattgtggcatttattagagaagcattaaatgattttcaaattcaagaggagaaaatttcggccttgacgcgtgatacagaaaatacgatgaaaaaggttggcaaggacttgggttttgtgtcagtggattgcgcagcgcatgttttgcaattggtctgacaaaataatttaattaaatattaaaaaaggattttagtgcattaaagagggactgaggtcaattgaagaggaagagcgtttaaaaaatcttttggaaaatgtcaaaagatttgtacgaaaggtgcgaaaatcaagagtattgacggaacaactcgctgaactccaacaaaaggaggaagtaccaccaacagttttgattaaaaatgtcgaggtgctgttcttctatatttcaccattctatataaaggcaatcaatttcag

SEQ ID NO: 77172 - DNA, 939 bp, Heterodera glycines
atgcgccgcaacgcgtcctccgctggcggcggcagtgttcgcagtgaacgcggcggcggtggtggacaaaaggcgacgacgccggcgggcatggcacaacaaaacagcaacaacaatcggcaaacgccgccacaattacggccggagcgggaggaggagggcggtaatgtaagcagcagtaatgggacggcggcatctcaacagacaatggtatcgtcgacgggcaaggacaattttagtggaggtcaattagtgccggtcacttacccacccaaaaaaaaatatatatatcactgcccccaaatgtcaatgaacgaacgattcgttaattacaaaaaaggttatatggcaaatgtggcggcaaaaaaaagctttggtcctcttttgaataataattttttttttggtttgctatttgtcaggtggcattttgtccactccgcgttttgccaattgatttctcaatttatcaatgatttttttttgcctttttagataattgaagcatgcgagcttagaccgacaaagaaggactatgtttaaatttttgtgtaatcatatcatatgtatactgtatatcactcacatttttgtagacggtgcataaacaggcatagacagttaattttattattagtggcaaagccggtaattttaggcaaaaggctattttttttggggggggggaggggggctttgttatgccgaataggtatttcatttgccagaaattgctctatgactcatttatcgcgatttgaaaatgcatatttttgacttttcgcgactttattattattaatttaaacatttcctttataaaagcgttttctcttttatatttcggtataaaaaaatttattatcaaaatggatggcaaaatgagtaaaacataaaaaagcgtgaggttttaattaatttaacctatacaaaaataaa

SEQ ID NO: 77173 - DNA, 515 bp, Heterodera glycines
cagttttcggaaggaggaagcaatggagaaaaatgccaaagtgttgacgacggtttgagctgtgtgccgtcccggtccgacaatcgggcacatcgtgtgaatgcagtgaacaaacaacaacgtcggacaaccttaatcttggtcaccattgtgctattcttcttctttgcttggcttccccataatgtaaatgtgacaattttaaattgtctaattaaataatttattaattttatttatttctaaagcatatgccaatatttgttgccgctgccattaaaatttaaaatttcattttttaactaaatttaattgcctatttttaattagtcacttttcaagatctaggctttttttcaaaatgccgagatatactaattagacaacataattaggcgcatttcatcaaaataagtttccttaaagattcgcgaaatggttatcgaatatgacgagcaactgctgcatagggacgggatcaactacacatatttcttatcgatggtcactcacag

SEQ ID NO: 77174 - DNA, 191 bp, Heterodera glycines
atggctagagatcgacattttgaaaaaagcctgtacctggacctggacctggattccatgttggacctggacctggatttcctggacaaaaatccaggaaaatccaggtccaggaaaaatccaggttcctcgggacctggatccaggcctggacctggattttttgaaactcattttaaaatcaaaaaaag

SEQ ID NO: 77175 - DNA, 1189 bp, Heterodera glycines
atgacgctgacaaatgagggtgcaaacgtaaaaaatctatttaggaggcataaaagtaattattgtatctggtgttaaaattccactaaatggttccacgttccgcttcttcaaaaggcaacttgtacaattgcttaggctagaccaaggcttaggcttgggcctaagcttaagcttgggctatatttttgtaaaatacgagttgtcttttgtacgagttcccattgactctttttttttgcacactcagcgccctttttcttgccttttaaaaaaatctgtgagcccataaccgaaaagtgcctaaataaactggcatggatcaaattggcaccttgatctttttaactagctcagagcccggcttttcacagtgggactcggcatcattgtctcacgccctcaattccctattttcaaggcatttatttccctgacacctgtcgtcctccgcccaaaaaaaaacaatactgaaagatcgaggaggttcctggccaattaattttaattattccatcctacaggagcgacagcaatgccttcactatgttgaccaacagccggaccccagcaattcgcagtgggcaattgccctgtttctggggctgtacagcaacatttttgtgcttggattgctcggcaatttggccattgttctggtcacggttcagtgtcgccagttgcgcagtgttcaaaacattttcatcctgaatttggccatctctgacgtcattgtgtgcctgctgtcactgccgttcacaccagtctcatatatttacaagggagtgggatgtttggctcggccatttgccatctgttaccgatggttcaggtaatttataaataattattaagactgatcgagagtacaaattttccaagattctcgaggaccgagaccgagaaaaccgagagacgagacttagagcccaaaaagccgagaaatttcttgactcaagaactgagaccgagaatctcgagtagccctaataattatcattttagttgcttcttttttaagaaaaggaccctacaaattgctccttaaaaaagaattcgtaaaataggttaacattgactattagttcttacagaatgccaaatttttggggccaagtgccgccgttttcatttgaaatataaagtaacttgaaatttttcaaagcaaaaaaaaaagaaagaaaataaa

SEQ ID NO: 77176 - DNA, 529 bp, Heterodera glycines
atggcagaattatgggtcaaccactcccccgccctcccggccccagcatcggataataattggtcaattaatggattaatgatgatggcgtcgatgagagagagagtgtgtattggcgagacggacgggttggagaagagagggattttgagtgcaattggcacagaaaaaagtggcaccggaaaaggtgccgtggcgaggaaggacggaatgggcatggacaaaccacataaaagcagcattgggggaactaacccatctccaagaagcccatcaaatgtaattaaggcatcacatagcaaaaataaaaaataaacaaaaaaaaatagaataaattgaaaatgatgaataaaatttaaaaagcggcttaaaattaattacttaaattttcaagtccaataaaaagaatttttcgaaattttaataaaatattaaagaggatataaaataaattttaaaattaattacttaattttagagaaatacaatttctatttaatttttcttagggtattaattttcaagtcca

SEQ ID NO: 77177 - DNA, 280 bp, Heterodera glycines
atgcttttggatacaattcatcagccgctcagcttgtgtgatggccataatattgcaattgtgcatcggagtggaacgattaatggccgtttcatttccaatttggtaattttacagcggtcaaattttggcacagaaaaaatgtcgatatttatcgcattttcaggtacaatatgagcggaaagtatttagttttcaaagtgctggtcattatctctacaattaaagtgattgttgataaatgcgtggattattacggcagttccaagcattgggaaaa

SEQ ID NO: 77178 - DNA, 774 bp, Heterodera glycines
atgtgtcgtagagtaagtgataaaataaagttgatcacaggaattaaaaaagacaaatatgtgaaaataaattgaggtcaaagtcaaatgaggtcgaaataccaaatcacttagaaatttgttacattctagctttcccggtcttacatattaccctagtgaactttaagttttattttaaattgatttaaagaatttgttttgattagttctttatcgagttgattccacttaccctcccagcaaagggaatgaattttttgcccagtttgtattttgtgttaaatctataaaaggggatgttaaagcgtgctgatggattaaaaatagaaaatagtttcagatctgttcggccataaacaattttatgcgccataaacagattaaacagctttcgcctattctcaagtgttggcagttgcaggtattctaatcgattttggtatggaattggcggaaggctgcagtgatcagcaatttgaaaactttctcccctattttgggattttttgcccctacaaagcctcggcttaattatgagattaaatcgtagtggcctttatcacttaacacacatattcattcaattgcattttccaattatagaggattcgtatgattgcgtccattgtttatcataattggttgaagctgcaagttctgtacaggtgtcacgtggttataatttggccaaagcacggattggtatgcttgtcggtacacagaactgtaggcaattaaattagctaatttatttgccaaactaaaatttaa

SEQ ID NO: 77179 - DNA, 482 bp, Heterodera glycines
atgcttttggatacaattcatcagtcgatcagcttgtgtgatggccataatattgcaattgtgcatcggagtggaacgattaatggccgtttcatttccaatttggtaattttacagcggtcaaattttggcacagaaaaaatgtcgatatttatcgcattttcaggtacaatatgagcggaaagtatttagttttcaaagtgctgatcactatctgtttgaccaaagtgattgttgataaatgcgtggattattacggcagttccaagcattgggaaaagttgggcaattcggcaaatgacccattttactttaattgatgtttcttttttcacagattagtcagatgcgaactttccgacccggcaaatcaatccgaaatcattggttacacagtttataacatactgattattgaggttgctgaagttttgtgctacgcaatgctttggctgatcagttggtggaatcagtgtcagtga

SEQ ID NO: 77180 - DNA, 639 bp, Heterodera glycines
atgcgcccgactggcaataatttcattcagtttatatttctttacatttctttcgtgtttaaattttccaatttgaataataattatgtcatcaaatgtaactgatcaacaggtaaaataataataataattaatgaggtgccaaaattaatataaaataataataataattaaagaggtgccaaaattaatataagctttttgaaatcaatcattcattgtttgtttagtcaaaggatgaggctggttttgtgttcatcgaaattgcaattagtgggatcattacggtggtttgcttttttggaattgcgctaaatacgtcacttgtttacatcaccgtcaaatctaagtgcgcctttttcgtaaaatgatcatattattttctagaaaacattaattagcaatcatattggcatttcctaccaaatatttagtagtgattcgagaaaaattctgattattgcatctcatctttgggtaaaacttccacgggtgtggacattttccgtggaataatgccaaattttcagtttcttaaatttaaatacatataatattttttatttggcagatcgcttcgttccaaatgataatattttttatttggcagatcgattcactcccaatgcaatattctga

SEQ ID NO: 77181 - DNA, 968 bp, Heterodera glycines
atgtgtgacaatgttccaagaaaaatatggcgcccaccattccgccgtaatttgcccttggggtgagaaggtggaaatttaaaaaagaattaagaaaatcctaggagtttaaatacacgccattccaagcgagaaataattaatgttcgcaaaaaatggccaaaagacgggaaggtacaacgaacgaaaaaattctcatagaccttaaaattaaggtctaggcctcaaaaaattggaaaatgccagccatttcggcagaaaataatattccgggtttggtttcagggagttgccgccaaaattggcacttccgtgccattcccatgcactgagaatgatggcactgtcatcgaattgtcagcccattttccgtccaatggccgtgtggtggacacattggcggccggcgattgttttgttgccggcactgtacattttttgaatgccggcgatgggcttcgccaagcgctgatcaaagccacttttttggccggcgaaagtgtcggccagcgtggcctaatgggcctaaaagttccatctgatgattcttcaatttgatttagcagaaaaaatgctgttctataattttctctttatttgattgtcatattttgtgcagaacaatccttgttaatttgaattcaatttaaaattgtttcgaatttaaaaattttggtcgagaaaaaagaaattttttgaaagattttcaaaaattttaaatcctaatgtatgcaacttttgttatatgggtatttttggaaatttctcagaaatacccaaatttggcttcaaattatgcttaaatttacttaatgaattttacatttaaatttattttttttattaactaaactttttctctaatttgtttagcctaatgcattgatagcttctaaaagaaattgcaaaaaaaattggagcaccaattttaagaaattaataatttaccttagaaacaaagtaataaa

SEQ ID NO: 77182 - DNA, 97 bp, Heterodera glycines
atgtccacttggaccattatcatttattgtgcagcatcggcaattagttctttgttcatcctcgccattgtgtgcgagattcgcaagtctttaaaac

SEQ ID NO: 77183 - DNA, 2567 bp, Heterodera glycines
cggttgatcattactttgcaaattgtccatttgctttgtctgatacttttctacgcatttgcttatcaccgaatttgggtgtcacatatttattgaaaattatttttaaaaaataaataaaaatgatttaatattcgaaataataattgcatcataatcatttgtactattttagctgatggaacgcgaattggaagtcaaacgggtggagcagcataaggcgcggggaaagcgcgaagtgacgtcagagaaaacaaaagcagcagcaaagtcggcacgccaattggacagtccgggcaaatggagcaccgtactgctcggctacgacacaatcattccggtagatttgccagaaaaacatcaattctatggagaattgccattttcagcggcaagtatttgaaacgtcttgccaacgtgtgcatcggtattgcgcagataagggccaaaaattacgcggtgtccgtggcccctcgggcggcaaagggccccccgggccagtgggacccccaggtaaagattttagattttattaggtaattttaatttcttttatttcgggtcgtcggggcccctccggtcgaatggggccaattgggccggtcggagacattggcgccgaaggaccgccgggaagcgatggtaaatcatttatcagaaagcaaaggcattcaaaagtaatttaaacaaaaaattataatttatttatttttaaatttatcttttattgcccaggccgttgcaattgttctctgcccgatttgtatgttcagagagtgcccgtgccggggcctccaattcccattgaaaagcttgtgccggtcccaataattgtgctcaaagagatggaggtcacaaagctggtagcgtttatgaattctttaaatttcaaaaaaaaaatttcgaatttttattattccataaaatttttaggttccttttgagccaactcctccaggctttgcagtaaatgattaatttctttttgagaatttcactgatttctcagccccccttgggttgggtgccaggcatgccgatgccggatctgtcccaaacgcgacttgtgcccccgactgtccgtccaaccgcttcgagccaatatcgccattggtggtcgcgcccgtggcggcgtcgctccaccacaagcgcaacggcaacaacgacgacggcgactctaacaccaccgccagcgcatttaacaggcaaagatgaaaaacaaataaattcaaattaaaaaattaaaaattcaaatgtaaatgtaaaatttaattttataaataattataattaaaaacaaaatagatttgaaatatttaaaatagtaagaatggaaagcgcgtgcttacaattagtagtttattttctgtttagcctcccaaccgaccacgccaacgccgtacaccgggccaccaacactttccgagaatcggagaggtatttttaaaaataatatcaaaaatggaaaaactttaagatataatattaattcaaattttacaaacaaaaacagaatgccgtctgaatgcagtcgggattcccgtgctccatgccgagtcacagtatggcacgacaggatcatggtaaaattgagggagaagcatgagtacggaaaatgtgtaatccgggaatcgggtccgggtccagtgcccaaaccctgattattattcgtttttcattgaaattactttggcaccattggacttgtgtgtctttttttattaaaaactttgtctctgatgtcaatattcaattcttaatctgcctggatatatacatattagttgaacaatttaattaataagctaaataattaagatttatgtccttaatgattttattttgttttgcatttttgttattctaatccaaggtttcgcgattcaatgcctcgttcgggcaaatggaaagaaaagcggtaacaaatcataaattgttattatgattaaatgaaccgtaatcgttggtactaattagggatagaatgaaaaatatataattgtttttgtctatttatggcctttttcaatcgactttttgggtgtaacattatcatttgtttatcaattaagctgcaagttgttttgccaattagtttaatggctttagttgggtcaccgatggcgacgcgtcgccggtgctttatgaatatgcaaatgaacgggagctaatgaacaaaaagcagaacataaagtaagttgcaggctaattaataagctaagttgcatttcataaaattattaattaattaattggcaaaaggacgaagtttaattagctttcattaaggtattacgttgactttttggcatcgggaacgggcagtaccgtgaacaatggttcttatttttaccatcgtcatggttcaaatattttggtgcgctacgatttggagagcaatgatcagattcagagcgacgccttgggacctatcgcatcattggactgtgagaaataatgccaaattaatggtgccataattttgaattaaaggcccatggaagcctgaccaaacattcacggtaaattaattaatttttgctgttaattaaagctttactcttttt

SEQ ID NO: 77184 - DNA, 348 bp, Heterodera glycines
atgatcagtgatcactcaattagttatcattttacatggcattctgaagctccgccttatcggactgatcgcggccagccgaggtcaaaaattgctgttcaatctgaagcaaagcaaatccgggataagcgaaaagctaacgaagacgaagcggaaaagcatgaaaatggaggattggccatttcagcaccaaaccttggaaaactcagtcccgtccaactgagtatattgacgaaacagcgaagtgttctccgaactgtccctcggcatttccttcttctcatggacacaaacccatttgtgcaattcatgcagggccaaatggtcgaacgattcattggccaatga

SEQ ID NO: 77185 - DNA, 406 bp, Heterodera glycines
atggccaatttctgttccaaggattccaccagcgccgaaatgcgaattgaaattcattttgacattactctgcacaaactttcatgtcccttggttaccatagacgtgatgagtcaatctggagagagtcaagatggcattcagcacgacgtgttcaagcagaggctggacaagcaggggaacaacatggaaggggcacagcccgagaagcagggtcagcagttggtcaaacatgccatcaataggccaaattgacaataaaccacgagtttaagttgtgaacacaaatgcatccaaaagtgctaatgtgtcaaggaggacaagcagtgacgaggagtgcggcagctgctacggggccatcaaagggtcagtgggccaattgggacggtcttccgactcatcgtga

SEQ ID NO: 77186 - DNA, 1140 bp, Heterodera glycines
cttcgccaatttttatgacattccttccccaatttttatgtcattctttgccccccccctcgctttggcatgctttttgtctccaccttttcctctcttcgtattggaccatcaaaggcgagagttcgcattgtacaaagagtccgggaatgccactggccccggtcataatgtccctctccacgcgagtgatcgcaaattgatggctgaccaaagtctcttccttccgcgtcactccgtaaatgtaccgagtaggcacaattttcagttgatattggtgcattatgccgcctttttgttggtttaaatgcttttgcgttttaaatggcttcaccaacctttgttggttatgaattgtttcccgtccaaaggatgcgttttgccggggaaaggctttccgaaggacaaatggtttatggtgtgagaagcatcaaaacgggcgggggagacggaatggaagtcgtggactaaaatggcaaattgagtggggggagggggggggcgccggaaagaatgaacgaaatggggtacagcttcaagtcggacatttggtccctcggctgtgtcctttacgaaatggccgcgcttcagtcgccgttctttggcgagaaacaaaatctgctggcgttggtccgcaaaatcagcaaatgcgagtacccgcccatcccggccaacatttactcgcaacaggcaataaataaaatagagaacaaagcggcaggagaaagccggggaggggggacggggattgggtgccaggaaaaccctcggccaaaacagaaacaccaccctcaaatcgtattcgttcagttgcgactgacaattgccaattgcatctgcacaaatccctcgagacgtttcgatgcgcaggatgtgctgacaatttcaggtgagtggcaccaactgacgggggtacggccaatggaaatggagccgtttggaggaatcggccaaaacagccacgggaagtgccaatgcatcgatttttttttgtgaaatgattggcacacaaaaaagcggtccccctatactcatgcttataattttgaattttggcccaatttcctacgacttgcagaacacatgcattcccatttctccgctctttccaaatcggcgcccgtttcttccgcccattta

SEQ ID NO: 77187 - DNA, 425 bp, Heterodera glycines
tttccggcgccccccccctccccccactcaatttgccattttagtccacgacttccattccgtctcccccgcccgttttgatgcttctcacaccataaaccatttgtccttcggaaagcctttccccggcaaaacgcatcctttggacgggaaacaattcataaccaacaaaggttggtgaagccatttaaaacgcaaaagcatttaaaccaacaaaaaggcggcataatgcaccaatatcaactgaaaattgtgcctactcggtacatttacggagtgacgcggaaggaagagactttggtcagccatcaatttgcgatcactcgcgtggagagggacattatgaccggggccagtggcattcccggactctttgtacaatgcgaactctcgcctttgatggtccaatacgaagagaggaaaag

SEQ ID NO: 77188 - DNA, 247 bp, Heterodera glycines
atggaaaggcagtgcaaatgtgcggagattaagccgtgcaaagaccgctatcagaagacgatggagccatgcttggacacgtgccaagtgcgcatttttcaagaaaaaaatcggcggaattcgctgcttttcagtctcatatcacttcgctcggtggcaacttccgccaggtgaaggcgtgcttcaccccaaaagagagtctgctcaattcggcgatgcgatgcaccgaaagacagcacgacaacgc

SEQ ID NO: 77189 - DNA, 1251 bp, Heterodera glycines
atgaattcaaaaacaattcttcatgtttttctgctccttttccttttctcttcactttttgtcattatttccttggcaatgcaaatagaggaacaacaaacaaagagtattcataatggagatgatgatggtaatgagaatgagaagaatggcaatgacagtaattttatgctaagcgatgcgtcagcgttcaaaacgtaccaaaagcgcgaaaacccaaaaagcgcaaaaacgggcaaaaacgacgaattggacggtgccggcgccgaaaagtctaaccgacgagggaaggcaaatggggtggaaaaagcgccgcaaaagcaaaagaaaactgaccgcatcgcttctaagcagcgaccgatggataaaagtaaggcacggaatgccattaccaaacaaagacggctaaatgaagaagaagccgctgctgtagccgtcgatcaaatgagtgaacccgcggggattgacggggaagaagccgagccgagtcggcaccagtcgctgacaccgagcaaaaggcaacgctcggcacgaaagaagccaaacaaaagccaatgggatgttcaactgacgccgacgggcaccgtttcggatgcggaaatccccgcagatgacaacagcacgcgcaatttgtcacccgcggccgatggcccaagcgaagagccgtcgtcgtcaaaaggcgtgaacaattcgccgttggcacttgtggacaattggcaacggccgcaaattaaaaaccgaattagagaacaaacacggcgcattgatgaacttggccaagaagtggcggaattaaagcaatggaaggcgcaacaagaacaaaaacaactgaaccaatcgcaggaagaagcgttgcggcaacaatggcactgttttgtaagcatacagcaaatgatggcactacaggtacaagcacagcaaatggcacattttcaatcagcgaatatccaagacttggaacaacaatcggagactgatcagcaacaaacgctgtttcgtccaatcgcctcacatggaagcgtaacggagcgaacagtaacagcagaagagaaagaaaagcaacatgaaatgcaagaaaatggacaacatgagcaaggaggacaccaagatgaagaagtgcagcagcagcaacaatttgaagaaggaaagcaacaacaaacgacgaatgcactgatgagctcttaccatggcttaccacgggaagcacaacaagaggaagaagaacaacaccaaatgcatcaccaccaacag

SEQ ID NO: 77190 - DNA, 4052 bp, Heterodera glycines
  unsure (1)..(4052): unsure at all n locations
ttttaagttttgcggtgaatacaatggcnntgagggacatatgcagttgaagcttgcttacggggtaggttttattcaaatagatgcaaaaaaaaagaattagtatgttaattcgtagaatatgggcttaatctcatatgaagaaatttacgaattaaaagaaaatcaaaatttttctgccaaaattcaaaatttttacgatattgaatttcgttttcaatttcgtcacatttttttgaatgaattacgtcaatttttcagaattatatagccatgaaaatttgttaataaaaatttatgatatcggctagtaaatttgtgcatttttctacaaaatctgttagcaaaatgcataaaatttaaaaattttctctactggtgctggtcatcaaaaaatttttgagcgttttttcaatttcgtaaaaattctgagggggggggggtattttcgtaaaggcaattttctgaccaccccgccagcttgtccatgtatgcggatttatgatgataaaaatgtgttgaagagtggcatcccctcaaataaataattttaaaaaattgacctttgacttttcattttgaattgagatcagtttgttcaagatttcgcttcttgtcatccaatttctgatcccaacttcaatcatggcttactgctactggaaaattctacaaaaggtctccctccaattcttaaccatttaaatttttatttttaggttcgtcaggattggatggtgccagctagcttcagttccacaatgaccgttgaacaacaggcgcagaccgcaatgcgcaaacgccgtgtgatgttcgtgctaagaacgcctcttatttgttagctagtgtaaatcagtgccaaaatgaagcaacaaatattttcaatcaagaaatttctaatatgtaagaattaaaatattctaaaatagaaaatctcttttttcaagatcaaattattgctaagaaatttttgcatggaatcttttttaaaagttgtgattagtcctgatgaaagctgcactctctaacttaactttttcctttaggtacgtgctcatcttgatggtacggattattaattcattttttgatattacaaaatttcaattttcaaattaatgatctcttcacaatttccaattttaaataaggtgctcattttcatgggttcatggatgcctttgaccattgtgaatttggtaggttttttcaaaatttaaaacccatgcgatttgttaaatttttgggcaccatcgaatattgacaattcctttaccgcggactccgtattttttgaaaaattttcaaaaacttaagtatcttaggtcgcacttttaattctttgaattttttattgaatacgcgatacagtaaccaattatcgtaatttttgtccagcttagagacatggatttcttgcgcgatgccaccaacatgtatttcaagctgttaaatgtccacgccattgcgatgacttcaattgtgtccaatccattgctgtacttttggatgagcaaagtctgttcgttttgttttgtcggattggcgctgagccaagggattccaaaattaatttaaataataaatgacaacagtttttaaaaaataaaatttatttaagtcttctaatagtacaaatatgggcaatgatttttcttaaaatcacaagaagagatttgagaactaagcatagattcatgacccttgatttctcgacttacaagggaacattccgaactgtatgtgttaaaatcacttttaaaccacttttatcgtgtagagagcatagtcaatttgatatttccaattttcggcttttttggctccggcgccaaaaatgatcagaaaaaattgatcaaatgaaaagccgggattcgggcattgatcattaattcattcattgtctggtggttcggtctcattcctctaaacccgcgattagactttatgttctttttctagcggcatcgtcgtgccctccgggatgacatcaattggttcaccaatatgcgcaggcagcaacagcagaatgtcggcggtttgttgaacaaattcacaccaagtccttccatcggattgctgtgccgaaaaaatttggagcgccatttgctaatgaatgcggcagccaaatacaaccagcaaaggtacagtaaatgcgccaaccaaatgaatggaatacggtatatcaaacgtcaattaattcaacttattagacgctcccaattcaatcgcaccaattcgcatcactggttgtcccagttctaagtagagcccgaatttgttcggactaatcgggtttttgaactcggtttatttttttagaatattctttattctaccttgatgcatttatatttacccaccagacactttggaaaacacaccgtaccaagtccaatgtttgttttttcacagaactcaaattctttatctcggtctcgagattaacgaaactaaaaagccgaactcaggcaggacaaaagaaacaccaaacttttctctactttgtgattctcgggcattaatcactgtcatttttattttaaataacattcattactgctgataataaattaactttttttgaatttattttccttaaagaagaggcacgttggctgaccccacttgcatttcgcgtgaacgagcacttcaggaaatgcacgcaaattggtgaggaaaaaagaagcggggaatttataaaaatatttaaaccaattatgtaaaaatgtattccattggactaaaaattgttaaaaataataatgtttcattaatatttaattgcttttgcatttttttcagtttcctccttgtccccctaatgcctctctgtgtcgcaaatccttcacccccaccaccaccagcgcaacaacgagctcgaacgggcacacgcacttcactgctattgacttcccgagaaagaggagcaacgcttttttgactattaaacccagccaatctaatggattttgtataatatgtgtataattacgtaattcaataaaaaaaataattaatattaattagaaattattgtgcggtgccaatgtttgcatgaaaaataattacaccgctttcacctttcatcaaatcgtattttgtgtgaaaaataatttcatccctaaaaaacggggaacaaagatcaatatgcttcggttccaaaaaaggttatttggcaaataacaaaatttgttcaaataatttttgtgcaaatttgttaattaattgggtaaaaattctcaaattttttgtcggcggcgcataatgtcaacggactccaaataaagcaaacttatcattaaataataaatagagctcgcaaaaaaggcaccaaaaatcgcgaaaaaggcactaaaataggcaccaaaaaattgaaaaaaggcacgaaaaaagactttataatgttttcgaataaggaaaatttttaaacctaaaatttttttacaagaaaaaaataaaataaattttggtgatcaatttttgagaaattcaatcttttacggttcataataggtctaaaattagtaaataaaaaatgtttagtaataatgtgtgaaaatttaggagttaccgcttgaagactaattaattttttaaataaaaaaaaattggggacgaaacgactcattttggcttaggggacgaaacgacgcagggacgaaatgacagcgcgccgtcacctaataaagcctataaaagtgtttttatgcaattttgagtgtgggacatatgatggatatttacccttttttaacaaatttccaaaactcacaaatgatcaaaacacggaaaataatgaatttcatgcgcaacggcgttcttgagaagaaattattaatagatataatatttttatacctttatagtgatgttttttaacaaatcatatttcataatattttaattataatgggtaattttgtggattttaaaaattaatatttttattttttttagaaattagcataagataagacaccaggccaagaaataggaagttaagcacagtgagacaaaaaatgcttattggggttctcttttttaatcat

SEQ ID NO: 77191 - DNA, 519 bp, Heterodera glycines
atgttcaacaatttgttgccgcagcgccgccattgcctcttcctgatgcgccgtttacatttgaaaacatttttgaggtgagtctcacaaggaatatttgggatgccaagcaaaaatattcgaaaaagggtacttttctgttttcagacccccccctgaaattttcaaagaaagtcagtttctgaggttatttgtgacgctgatcacgaatatgacatttgttttgctgaattccgaaacttggacccgaactcgagcaaaaattcaaattcattaatacacaaggaaaatcatattttggtagaagttcagtttgtccctccatttttgaattttttatttttattttaagaccataaaaacatgttttaaggggttttagagaaagctgatcacgaatacaacaaaaattttgagcaattccgaactccgaacatgaactcgaacaaaagtcgaaattttaaactttcgagttacgcattttcggttcaaacaaaccagcttaatgcaaggaaacaa

SEQ ID NO: 77192 - DNA, 961 bp, Heterodera glycines
atggacagagaaacactgaaacgattgcaaacgatggaaattgttgacgcaatgtccaattctggcggacaattggtcacgcaacaaatcgagaaagtgatcagaagacaccaacgccttaataaggtaattagcgagcaaataaattgacattagtaattaaaaatatcaagcaatttaagaaaaattatcatatttaaattgacaattcaaataattggaaatgatgcttttgaacaaaaaaaacaggcgttgactcaaagcgaaacgcggcacgaattacagacggacgcatgggacggtaaagcatttgttggcaacgtatcatcaacaccgtgtctgtccacagtatgccttagcgagcagcacacactgtgcaacggccatttgtccgcgtttgcccccttttggcattgcgtatgttccgtgtcgcccttccttcgttcctccgcttccgcgactcttcggcgttgctcatccgcttttctcattcgaaatgttccctccaaagtgctcaccgtccccctgcttttccccctccccgctctgttcggcttccaatcgcttttcccccaactgatggactcttttctcgcccattggctttcgaccacttttggcggcaaaatcaaatttgtgagaatttacaaatcgccaaaaattgcgtacaatgcaaattcaaattcttttaggaccaagtgcttttgctgagaaagcaatgtttggatgaacaatttttcgttgttcaatttgcttttctgacgaagctcagatgggccaacagaaaggtggcgaaaaatggccaaatgacagactccgatcttttggacattaaaaatgcgcaatttcgcgcgggtcgccgcgccctatggacggatcagacagtgctggagatagcagatgttgaagaagcatgcttatatcaaaccaattaattaattatatttaaaattcgaataaa

SEQ ID NO: 77193 - DNA, 569 bp, Heterodera glycines
ctccgtttcgagcccaaaaatgtgttggtcactggcgcctgcggtttcattggctcaaattttgtgaattttgcctttgaaaagtggccgcagagcaattttgtgaacgtggacaagttgatactgaacagtgactgtaattacgtggcacggaaagtgcgcaattcggcgcggtacaaaagcgaattggcggacattcgcaacggaaaagtgctgaaaaaagtgttggagcaaaatgaggtgaaaaagggagaggaaactaagaaaattgaaatgaaataaaacattcatgattaatgaaattcatcattattaaattgattcaattaagaaacgacgaacaaaaattgaaattagtaaacgaataattttttttaattactgttaatacatcaaaaagaaacgatttaaacaaatttaatttaattgattttttggtaatgcgtgttaattttgatttgtcaatttaataattgctttaattgattgatcagattgatacgattgtgcacttcgcagccgattgcaccagcaagcgatgctatgaacaacccaatggaaagcgttgg

SEQ ID NO: 77194 - DNA, 941 bp, Heterodera glycines
atggttggtttgtttgccatttgtatttcccctgttaatattttccattttccgatcaccgcttctcacaatccgaaggaggacaacggcttcaaggcttattgggccaacggtgctcaaattctgagcccacacgacacggaaatttgtcgaattgtcgcggaggagtcaaagcccgaagaagcctattgggacacggtccaactcggcacaagtgcctttctccactcggccgactcggttttggagaaatattttgccggggagagtgccatttgctgccatcacaagttccatgcggcacacttttggttctcccttccctttccattttcggtcgctcaaccaaacttcgtccctccgtctcacttattccgctttccatggcgtcggctccaaattcgtccgccgaatgttcgctgagtttggctttccctcggagaacatttcgtacgttaaggtattttgtgtgtattttttataacagttgcgcagtgtgtcctgttgactcatttccattcaaattttcaggaacaagacgagcccgacgccgactttggcactgttccattccccaaccccgaggaagggcaccgggtcctcaaactgtgcattgagactgcaaatgccaatgactcgactttgctcctcgtcaatgacccggacgccgaccgactccaattggcggagaaagaggcaaagtccgtaaaacgggaccaaatttgaattggcatttgactgatttcgattttgctttcagcggagagtggcgcgtgttcagtggcaatgagatgggcattctgctgacgtggtgggcgtggaccaattggcgtgccgccaacccaacggcggactcttcgcgggtgttcgtcctccattcggccgtctcttcccaaatggtcgccacaatggccaaaaaggagggtctgtccctcaattaa

SEQ ID NO: 77195 - DNA, 358 bp, Heterodera glycines
atgaaacaaactccgatgcgacaacaccagcaaaggtcgcgaatatcggagcacgaagagcagcaacataaggcggaggaagcggcggtggacgcggttacccttcagtaccaacaacaaattggcggtccgctttcacaacggggcaccagcgaacgtcgttcgtactattccaaaacaacacacattgggcccagcaccgaaatggagtgagttttatcagcattttcgatgtaacataatattacaatattatacaaatatttgaaggaaaaggaagcgtgtcgaacgactattcgccacttccggcggcagcaatatcgtttttgaggatgggacgctgcagacgcaagtttaa

SEQ ID NO: 77196 - DNA, 344 bp, Heterodera glycines
atgacgcagcaaattgtccaactgagcaccaccgggaaagcacaagcggcgaatgtttggcgcaaaaattggccaaatttcacggacgaaaacatcccaaattggctggtcatctgtgccgtatggggaaagccacagacgcaaatcggtgcctcttccgtcaaaaatttgctgattggaacggaggaatgtgatgacggaatgatcgatacacctgaaaagcaaatgctttacataaatatcagtgaaaatcctttgatttactcaattcgaagacgattaaattgataaagtttccaattcacttaaaataggtaggttaaatcagacgttttttagatata

SEQ ID NO: 77197 - DNA, 388 bp, Heterodera glycines
atgtttgccggaacagtccaaacaaatccaaatgccgtaggaaacgctggcccactgcgggttggccgcttggcactcaaaacaggacttaaaattaaaagaaatcatgaaatgtaagttggaatttttaagggtttctgtccccttgtttagtttttcatagggttcactaaactgcaaaaataccaaaaataaaatttaatttttttttttttgaaaacgcacattgttttcgtcaattggtctcagctccttaagcacttttagagttcgcgggcttgccattttgaccaagcggaatgaatacaattgtgatatgtataaaataaatatgtgtatgcgaatgtaagggatttgaggttgtgtatgtgtgtgtgaaattaataaa

SEQ ID NO: 77198 - DNA, 635 bp, Heterodera glycines
atgtcttcgggattttctttctttccgcttgaatccgatgtttcagtcggcaattgtgaggtgggagttgacaagcgaggttcttgaatcttgagaaaaaagagacgtgattcaatttcagcaataggctgagaaaaagctctagtgcactttaggcgttcaatcaatgaccaccttcacccccccctggcctttagatcttctagagccgaaaagagctaggaatataaaatgttcgctataagtgcctttaactcatctaaaagtgatcaatttttggataaacttatttcataaaactacctcagattcgttagatgttacagacatacaacgaaaatcttcgtcaccactcgaaactgtctcattcaataattcctgctgatgctcaaagaacacagtgctcgaaatgccttcgggattttctttcttttcgttggattccgttgtttcagtcgacatttgtgagtttggatccaataaaatggaccgcaattcctgtataaattcatagaataagtgcgtatatatatatacttgacatttaaaaaaataatcgattaattaactctgcgcattagcattttctgcacatgatgctgggtaatagtggagaattggtgtcccggcgaaaa

SEQ ID NO: 77199 - DNA, 521 bp, Heterodera glycines
atgtcgactgaaacaacggaatccaacgaaaagaaagaaaatcccgaaggcatttcgagcactgtgttctttgagcatcagcaggaattattgaatgagacagtttcgagtggtgacgaagattttcgttgtatgtctgtaacatctaacgaatctgaggtagttttatgaaataagtttatccaaaaattgatcacttttagatgagttaaaggcacttatagcgaacattttatattcctagctcttttcggctctagaagatctaaaggccaggggggggtgaaggtggtcattgattgaacgcctaaagtgcactagagctttttctcagcctattgctgaaattgaatcacgtctcttttttctcaagattcaagaacctcgcttgtcaactcccacctcacaattgccgactgaaacatcggattcaagcggaaagaaagaaaatcccgaagacatttcaagcactgtgttctttgagcatcagcaggaattattgaatgagtcagtttcgagcg

SEQ ID NO: 77200 - DNA, 940 bp, Heterodera glycines
atgcattctgggattttcggagtcgctgatcacgaatatgaccttagttttggccaattccgagtcccggacccgaacttggacccaaaggcgaaaattaaaacagatttttatgtgtgtgttttgaacttcgacttttgttcatgttcggtccgggattcaaaattggtcaaaattaatgttttatttgaaaacacctctaagaaatttagaaaagttaaaagatttgttttttgttgtttttctggaagtggggcggtaattatcagctccagggtctgaacagcaaagagaagcagttttcaaccagtttttcggtattttagaattaaaaaaaaagattttgcggaaaagcattatctttgcttcattgttgagctgaactgcgcatgagcgaaaccacacgtatggatggcccaatctgttgtggtgcaatttttgatttacagcgaaaatccgtcgtttgaacacaaaagggaacaccgtttggaatgcctgctggcgatactccgaactaaaataaattaaattattttttacacattttagtggaagactccaattttagtcatattcccgaaaaaattttcaaaattaagaatttctcaattttatttttattataaaaattttggcaatcccgaagaatcgggggttcctaatttaggtaactttttggtacttttcggttttgtgaccccccctgaaattttcaaataaaaagtcatttctagggtaatttgggccgctgatcacgaatatgacatttgtttttcaaaattccgaaccttaattcgaacaaaaatttgaaattcataaattacaatgaaaacatatttttgggggttttagaggtcgctgaaaacggttatgacatccatttgaccaaattcgaaacccggactctaacaaaaaaaaaaggaaattaattctcgacaaa

SEQ ID NO: 77201 - DNA, 1853 bp, Heterodera glycines
atgtgcacattctttaaaattgaatgtttatttttgattgactacaaaaatagtattttgccaaataataccgtattccgtacaaaaggtaaatttgcaacaaaacaaaaaacggatttatggaaagaaaaaaattttcatggagtaattgccacttaatttggtataaataccgtataaatctacggccatttcgataaagtgcagtggtcaacttttaatgacgatttgtcccttataatcgttttatggtaaaaaatacagtacccaaatgcgtaatattttgacacaaaacaaagcgccaaaaatttcaccggtaataccgtgccatgtcatggtaactacaataacaaaaagtgcccctcccactgtttaccttcattttgcgcgagttgcaactggacgcaccggaagtcacttggaggccgtgggccaattcctgggcctgaaattatggcacaaaaatgccaaaaacaaaaaaaaagagatgactcaccctcagcttaagcaatgcttgctggtaggatggtgaaattggtgaatagtgtgaagcattcttccggtgcagccaatgcagcaacgacgaatggtgatcagagtttgcgtagcgatggtaacattcttcgcgcatcgtaaacgcttgatcagtggtgatcagcgaggacgactgatcggacgaggatgaaccatgccgagcagggacagcactgtttgggtggggggggggagtgtggagataggcattttggtcggaaaccctcagatcgagggggacaaatgggcaaatcattatcggaaatcctgataaagcaccgagtcgagaatggtcaacagaggcatcacaaattaatcagttggatgagactctgatcaaagtaaagcactgatcggagtaggttgtgggatcatggaactacagaatttcgccattattaggtttgggcttagactagacctgggtttttcaaaaattggaatcctgaaattcagtcggaaccttttctagcggcatgctttttagtcgcattttaatcacggttaaaagtatatccggcaaaggattttggcacacaactttcccaagaaatacctgcagatgaacaactgagatgtgcacaataaaaggaagagaagcgtgaaactgaagtgagatgggacagaaacagcagcagcagcagtattagtagcaggaagcacgggagaaaaacaggcggagaagcacgacaacggcacgggatgtgccaaaaaagatgaagccgaagacgaagccggggagccaactctaaaaatgttgtacccgccggatgaagaggggcaaaataacgaagcagcggtggaggataatgatgccgaaccggaagaggaaaatagtggtgccgaagatgaagcaacttcatccccgtggtgatcggccagcagttgtgccgttgctgctattttttgtcttgttgttgaatctgttatgcagcttctttggcgatgaatcgtcttttcctcttccccctcatccgcctcatcctccactgtttcagtaaatgccaatgccgtcgtcgtcgtcgtcgcacagccaatgaagccaaaagctttcaggcccccagctaagcggaggcggcggctgtcaatgctggcaccaccgctattccggaaacgacaattttcgtcctgtttggcaccacataaagccgcttttcctcctccccgtgcagcagaagcagcagcagctaatggcatttgttttgccaatgtttttgttgaactcattagttaatagatgtgcgcgagcgatatggctaatggtggtagtggtggtggtggtggtggtggtggtggttggtgatgtgccgatcaataaa

SEQ ID NO: 77202 - DNA, 1265 bp, Heterodera glycines
atctgagggtttccgaccaaaatgcctatctccacactccccccccccacccaaacagtgctgtccctgctcggcatggttcatcctcgtccgatcagtcgtcctcgctgatcaccactgatcaagcgtttacgatgcgcgaagaatgttaccatcgctacgcaaactctgatcaccattcgtcgttgctgcattggctgcaccggaagaatgcttcacactattcaccaatttcaccatcctaccagcaagcattgcttaagctgagggtgagtcatctctttttttttgtttttggcatttttgtgccataatttcaggcccaggaattggcccacggcctccaagtgacttccggtgcgtccagttgcaactcgcgcaaaatgaaggtaaacagtgggaggggcactttttgttattgtagttaccatgacatggcacggtattaccggtgaaatttttggcgctttgttttgtgtcaaaatattacgcatttgggtactgtattttttaccataaaacgattataagggacaaatcgtcattaaaagttgaccactgcactttatcgaaatggccgtagatttatacggtatttataccaaattaagtggcaattactccatgaaaatttttttctttccataaatccgttttttgttttgttgcaaatttaccttttgtacggaatacggtattatttggcaaaatactatttttgtagtcaatcaaaaataaacattcaattttaaagaatgtgcacattggcactcaaaaataattcataaaacgtttttacggatcagaaaacatctaccgtaatccaaattttttggagataaagtcatcaatcactgacttacaccgcttaccgtaatccagatttttttgaaggtaagtgatcactcactgccttacacagtgctaatctctttcactgatcgcttgccgtaaccaaaattttcgggtcaatgcccacatttctgcaaacctgatcactgatcattgacacacagtaatacccacattccgtttttgaaggtgatcagtgccagcactccgctcagggaacgggcattgtgccaatttgagtacgtcctcaactacaagcccaatgtttgttgtgcagcgtgcatttttggcacataaatatcccatatgatccgttcagagaatcccgtccacattcaccgaagtcaaatgttcatgtccacggccctccattaggatggtgggcaaccgtatgttcgagtgcgagccgttac

SEQ ID NO: 77203 - DNA, 159 bp, Heterodera glycines
atggttacggtaagtgtcgggatcagggactgggcgaagctcggcttagcactcgaagccgaagccgaaggcgaagcccaatttttttcgaagcacgaagttcgaagttcgaagcccaaaaaccgcgaagttttcgaagctcgaagcacgaagctcgaa

SEQ ID NO: 77204 - DNA, 1958 bp, Heterodera glycines
atgccatttttgaaaatcatggaccaacatcattcattcatacaggtgcactggaacttcttcaaagctataaagaaggtgaggagaacaatgggatgactttatttaattggtgggatttcatattatgccacaggacaaaacgccaaaagaaaaaaaatgcaaattaattacgttaactgatcagtagggcttcgatttttaggtgctaaaaactgccaaaataagtaggttttaggttctaaaaaacccccaaaataggtgctaaaaatgggaaaataggtgccaaaaagttccgaatttaggggtgtaaaatcgaaaattttcatcaaaaagcaaaaatattttgccaagtcattaaggatatacataattttcaaaatcaaaaattatcgtcaagaaaataaaataaataaattttggagataaatttttgagaaatttttcatttcttaggggcgcatttttgaaaattttctggtcgattcttagggatgtattttttgaaaaaatttttgggtcggttcttaggggtgtatttttcttttttttgcatatttttaacaaattttgggcaaaacgccaaaataggtgaaaataagtttttttaaatttttttaggttttttaggtgctaaaaataaaaacctagaaaataggtgctaataactcgaaaagtagcttaacaacagcccaaaaaaacatgtttttcgtgcgtttcaggccacggggagctcaggaaaaaaatatgtaaaaacctaaaaatcgaagccctactgatcagtagggctggcaaaaataaatacaaaaagtggtaaaatatgtacataaatatgtaaaaaaaaaaaaaaaattttggtcatttttggaaaaaagttcttagtaaagggtgaaataggacctaaatagtcttagaatcacatttttgtatatttaaatattaatttttggtatctccttttttgaaaaaaaaacaatttttaggggtacatattcaaaaaaattttatttttttcacaagaaatttttataaattttaaaaatttctcaaaaaaatttagaaaaaaatgctaaaaagtccaaaatatgtaaaaaaaaaaagcccgaaatatgtaaaaatatgtaaataaaagtcccaacttttgttcacaaacacaaaaaagaaagtgtttttcctactatttagagcatggttggaaaatccaggaaaaaatatgtatttacataaaattgacattacaaaaaagcaaatttaaattccattaactgatcagctgatcattttgccataattaccgtatttgtttcttttctcttttttatgatactgtcctgtttccgttataacaaattagtgaaactaattaattatatgagctctaaatgtaattgactgaccataataccaaattcggccgtccctcattcattttgtaagtggacaatcaaccattggtttcggttttccttattggtaccccctcgaagacatctctcacccaaattttccaaaaaatttcgctaaatttttccaaaaatgccacaatattagcgcagttttttgtgaaaatctgataaagaattgagggaaaaccaacaaaaaaaaattcccggaaatccgaaattctcattttaaatccaaaatctttgtgtcagctttttaagaaatttttttttttggcaggctttcaaatatcataaatgaaactggtttttttcagtcccaattgtgcccaaattcacggaaaagcggaagaacaaattcgagttcatccgattcgggaagagaagacgatgatcaacaagagagagagagagtggaaggacagacagtcagacaaaaccatttgagtgatcagagagcggtgatcaatgatacatttttaacaaatacacgtacaattttggtaatattatcgctggcaatgggacattttttgcttttttgatgggcattga

SEQ ID NO: 77205 - DNA, 231 bp, Heterodera glycines
atggcactgctggaggagttcaaaagtctgtcctttttctgctacaagtgcaacgggttcaacgcgtccaaaaatgagttgacaataatgcataagaaaagtgcggcaacagcagcagcagcagagacggaagaagtggaagaggaagaagaagaggatgaggaagaggagaacaacaacgacgacgacaacaatgaggaggaggaaaaagaaaagggcaaaaatgaatga

SEQ ID NO: 77206 - DNA, 1055 bp, Heterodera glycines
atgcaacttggcacgccggtgccgatgagtcacaacgtttgcgctgacaagcccgactacgcggtggagaagccagcgctggagaagtggtccattggtaagtcataaatggataaaaaaaaattggaattttttttaatttcacgcaattaatcatttttctaaacttattttgtttttattggcggggactacagaacagtcccgtggtcggaaaaaatatcggagcgggcaatccttcattttttgtttttttttttttgctctttggtcaaaaaatttttctcgtgttattttttaaagtgtcgttgccgaggagaaaaacactaattttataattttagccgtttttcgccaaaaaaaagacattgatttttgccattttgggattaaattccccccaaaaaatatgaaaaaaagacccggcagtacctttattcgtcgcaaagaaaatttttttttattataattaataattctaatttttgtaggtattcaagcgttccaacaccaaccgcccgcctcctccaccggcttcttcaaacggatgcacaaaattgtgaaaagtgtgcgcaaaaatggccccgcaggcgttgaggacggcgcagacaatgaaaacaacaacaaaaaggacaacgaagcaaatggaaaaaaggcgaaagaacaccaaaagagatgataattgggagaggacagaattatgagttatcaatcaaagcaaaacaaagaaaaactgtttttagttcaatttttttggtgatttgtgtgaattttttgcttgccaattttttcaatgcatttaatcgagccaattctggaaaaatttcgaagatgccgagaagattgtatgtcgaaatttttgatttttaatgtgccaatttaattgcgtttgaaatgcgcttacaaattagtgcttatttgttttttacggcccattaagcgcttaagctgccgattggttcaatcaaaaaatgaattgcaatttctttcaaaaaaattttcataaaatggtaaaagcaataagaaaacaaaatgttaagggggggaacaataaa

SEQ ID NO: 77207 - DNA, 102 bp, Heterodera glycines
atggtccttgacgacgattttattaatatgagcatggaagagcatgcagcgatgctgcaaaataaaggactgattcagcacaatgtcagctcaaagcggaag

SEQ ID NO: 77208 - DNA, 1166 bp, Heterodera glycines
atggcgtacactgcaaacgtcaacactgctaatttccatggcacacttccgaagaacaacacgcaccattcattggccacaaaattggtgaaaaaacatttttatttaaatctaatttattcatatacttttaattcattattttgaaattaaataattaaaaatcaattttgacttctacttttactcttctttcaaatttcagaacatttctcattttttgactgatcatttaccccactaaaatctgataagcatgcctttcaaaatgattttctattaacttttctattaaacataaagtttaattaattaattgttaataagttttcactatcaataattggattaacttatatttcatacagaaatataaaaattttttaaactcaaattattcaaaaaattttgctttggacagccaacaattcgctcttcccaaccatttgaaaaaatttcaaaaaaaaaacacagaattttaagatgttttgctgcaaaaatgcactttaaaaaattttaaattttaaaattattttccattcggggaaaggaaacaatttcgtaaaagacaatatttgggaaaaataaaaaatgaattttttgtgccaattaaataaatataaaaaatatatatataataattcctttccacttgccatttcagctcaattgccttccatcggtcgctattcctttgccatcaccggatacgacctcaaccaaccaacgaaaacaacaaaagcaacaacaaccggggttagtttctcacaaaatttgttcccttgagctaaattaattgcaatttttcaatttcctcagcctcaatggcctgctgcgcactgcacaagttggacgcggcacaccagtgtctgagcatgatcaactacgttgttcgatggcactgaacgacggcacagaaaacgaaattggttggcaaaaaagcacttacacacaaacaaacacattgttaccctttttccatgctcataattaaacaaacatgcttttacataaattgctgcacccaaatcaacggcttttgataaattacattactgcaccaaatatacacttacacatttttaaattatgctgatttttaatttactctaaacaatgaaacatttctaaaatatggcattttcagacggttaaaaaagttataa

SEQ ID NO: 77209 - DNA, 1287 bp, Heterodera glycines
atgaatttgaaaagaaaaagaaaaagagaaaatgaaattgaaaaggaaaaggaaaaggaaattgaaaatgaaattgaaaggaaaaggaaaaagaaaatgaataggaaaaggaaaatggaattgaaattgatattgtaaaggaaaaggaaaatgaatttgaaaagaaaaagaaaaagagaaaatgaaattgaaaaggaaaaggaaaaggaaattgaaaatgaaattgaaaggaaaaggaaaaagaaaatgaataggaaaaggaaaatgaaattgaaattgatattgtaaaggaaaaggaaaatgaatttgaaaagaaaaagaaaaagagaaaatgaaatggaaaaggaaaaggtaattgaaaatgagaggaaaaggaaaataaaactgaaaatgaaaatgaaattgaaaaggattagagaaaaaggaaaagtgaaaatggactggaaaaggaaaaggaaaatgaaaatgaaattgaaattgaaaggaaaaggaaaagggaaagagaaagggaaagggagagggagaggggaagaaaagggaatgggaacagaatttttttaaaagaaatatggaagagaaatgaagaaaaagaaatatttgctctacagaaggggaaggggggaagggtttggatgtccgactttcggctcaattgaaagtcggaacacgggccaggaaacccgggcgctgaacaattcatattatctaattactaatttttgcaattgttttttttaaaactgcacttttttgtttgcttttgttaaactaaaattttttttcttgcatgcgctttttgccataaaatttctattttttctattaattcaacatgtctctttttaagtgaattgttcagacccgggagcgcaaggggcctggtaaatccagacccgagcgcttggggcctgggaaaccgtaagccgcgtagtggcagaaactaaaccacaggtgcaatacggttgttccacggtggggggcaccaccgtagcagaacgggacaccgggcccgtggttgcccaagctacactggcacatccctaccaggctgttccacaaagcgctggacgtgggaagtgttgtccagctgagttcaaccagctcggaagccaattggtgacccgcggccccagcttggtaggtaatccagtggtgcccgagcacccacatgtcgcggggccaatggacaatacaaacgaaaaagacattaagacaaaatctgtgtgattttgacgtggacaaaaaaaagtgaaagtactacaaatacaaattcgcgcgcgcaataaa

SEQ ID NO: 77210 - DNA, 883 bp, Heterodera glycines
atgaataggaaaagagaaaatgaaattgaaaaggaaaaggaaattgaaaatgaaattgaaaggaaaaggaaaagagaaaatgaaattgaaaaggaaaaggaaaaggaaattgaaaatgaaattgaaaggaaaaggaaaaagaaaatgaataggaaaaggaaaatgaaattgaaattgatattgtaaaggaaaaggaaaatgaatttgaaaagaaaaagaaaaagagaaaatgaaatggaaaaggaaaaggtaattgaaaatgagaggaaaaggaaaataaaactgaaaatgaaaatgaaattgaaaaggattagagaaaaaggaaaagtgaaaatgaactggaaaaagaaaaggaaaatgaaaatgaaattgaaattgaaaggaaaaggaaaaggaaaatgtaaatgaaatttaaaagaaaaaggaaaagagaaaatgaaatggaaaagggaaatgaaattgaaaggaaaaggaaaagtaaaaagaaaatgaataggaaaaggaaaatgaaaatgaaaatgaaattgaaaaggaaaaggaaaagagaaaatgaaatggaaaaggaaaaggaaaaggaaaatgaaaatgaaattgaaaggaaaaggaaaagagaaaatgaaatggaaaaggaaaaggaaaatgaaaatggaattgaaaggaaaaggaaaatgtaatttaaaatgaaaatgaaaatgaaattgaaaaggaaatgaaaaagaaaatgaataggaaaaggaaaatgaaaatgaaattgaaaatgaaaatgaaattgaaaagaaaaaggaaaagagaaaatgaaattgaaaggaaaaggaaaaagaaaatgaataggaaaaggaaaatgaaattgaaattgatattgtaaaggaaaagggaaattaaa

SEQ ID NO: 77211 - DNA, 1467 bp, Heterodera glycines
  unsure (1)..(1467): unsure at all n locations
atggctccaccaaagcgcaaacagaaatttcacgctgattatgagcgcgaatttcaggccataaaaaggagcaaaaagggcgatgaatatgcgtattgtgtgccgtgcagttttgatattaatttggaatcgatgggaaaggcagcaattccggtacaccaaagatcggaaaaacacaaacagaatttgcgagctatgtaanccagccaagcaatccaatctttcatgccgagtgcgtccacagcatctgaagaagaccgacataatgctgcggctgagggttttattgattccaaaaattgtgtgtaatggaataattgtttgaggtgtatggcgtatcatctctgtaggcacgcacaatcattcaagtcatcggattgtgtatcctctgacggattgttcaggactatgttttcagattcagcagttgcaaaaaagttcggatgcgcacaaaaaaaggcatcgaaaataataactggtaactttagtaaattcaatgtggtttttgtatccctttttaaaggcgttctcgcaccttattctgtccaaaatatgctaaatgaactcggtgatcaattctttttcattgcgctggacagttccaatcacaaaacaacaaagctttttcctattgtcattcgctatttttgtgccaaaaaaggaatacaagttcgtttgcttgacctgcaagcactcccaggagaaacgtctgaagaggtgaatagcgattgtatcattttttgacttgttttccaatttaaggtttaccaatggatcataaaaatgctgcaaaaacatggcctgaaattcgaacgaattgttgctttttgtgccgacaatacagctgcaaattttggctctgctgagcatcgcggagaaaacaatgttttttacaaattgaagacacacaaaaataatctgatacccgttgggtgtccggctcatttgctacataacgcagagaagcgaggagccgacaatttgccgatcgacattgagtccattgtcttcaaactgacgagtcatttcaagaattcaacaagagagttgaacaactgcagcacatttgcgatgattttgaggtacataaccaataattagaaagttatctgcctgtgacattacttttttttgttttaggctaattatctcacacttactgcgcatggtccgactcgatggacaactctttctaaaattgtcgacaaaattgtccatttctgggaaattttggagaattttttcagcggagatggcccattggttctgcgaaattttttcaacgcaaaaattgcaaaagtagttcttcattttttgagccatattttgccaatttttaattcaacaatcgatgctttacaggttaattgaaatattgaagaaaatagttttttttacttttttagaggtcaaatgccatactccctgaattgctataagaaatggaaagattcaagtcaaaaataa

SEQ ID NO: 77212 - DNA, 2705 bp, Heterodera glycines
atggcggcgtcgacagttgcgcttgggaaggtaagaatggtcaatcatcgctggggacggaagttgaacagctttttggcaggtcgaaatcgcaaaagtgaacggcaatcggccattccgtccgcttggggcgcagactccgcggggcgtccgtcgactgatccgctggcggtgctcgacggtggcggactgttgccattgggcggagtgtcggaggaggacggctcacacaaaggcaccggaattggtcggtggagattagcatcattgtgccaatcagcagaataaagggcattccaaatttagcgatgatgggcgaacttttttgcggtcttttgggaggcgcaagttttggcaaaaacgtgcgatcgtggcgagaagtgcaaaaggcagccaacctggtaaatgccgactttgcttgaacagtcgcttgtcggacaaattgccaaatccaatggcattattgtcaatattttgtcccccagggccaatgcttcgtggccattgaccccgaatgctttgctccaacatttgtggacaatttgcagttgttcctggaccaaacgcgtgggcttaagccggtgatcactgctcttcctccatggcattcgatcgcctcccttccctccttttagcgcgacccctccaaatcggtgttagtgcccggtgaccccgaaagaatgaacagcgaacggagcgcaaaggctggcggagttatttactcagaaggacaaattcgggatttggtcagtcggaggagcacttaacggcaaattatcacttttcaaattaaggagaaattggcaaaaaagcaaaacgttggcatgttcccttacaaggcaaatttgtagcagaacaaaaaaactgttttctttttgttccaaagcgatgactttcaattgaattggcattcatttccattattgaacaattaattcgttcccatttgctgctgctgataaagaaaaaagaatgacaaatatttgcattaaatgcagcaaaagtaacggagagaagagatgagaagactaatgggtgaacagaaaagggaaaatgggaaaaaagggaacggaccaccggcggcacttttaaacgcattcacaattaatttatgaaccgcggcaagggatcggcctattttttttgtttacagttttaacatttattaataatcattgaacagtcagtgtttaccaatcacagtcaatcattcctttcccctctctccgtccttttgccgatgagtgattgcccctctgctgtccctccccccgtctcttctctctgtcccccttttcctccgtctcttcccctcgtcctcgtcacagaaccgacctttgaagtgagcagaattgaacaacagtgagtcattctgctggagttcttttaaatttccattgtaaataaaaaaaataaaagtgcgcgtgtcctccaattccgtcccaaaaacgatgggtttttctcggaagatgaacagcaaaaatgggtcaaagaacatattggagaggctgaggtgagaaaaaaaagattttcgaaaaaggtttgtgaaaattaatttcggttgagataatttacacgatgggaccaataaaagtggacgcatcgcttttggtagttgccaaagcgttaaaagcagtggtgggcatttttggccactatttgttggcccttaattaagacaattagtcaaattttccgaaggtgaccatttctgcgggccatgaaaacatcgacaccgtggaatgtgccagaaggtggtcataatcacttacgctcaactccccacctctttacaaattaggggcatccgaatgggctttggcggtgccattctcactgaagcaactgccgaaacggcgatggcacttttacttacggtttcacgccgccttgtcgaagcagtacaaatagccaaagagttgggggagcggagttaaagtgcgggaaaccaccaaatgttaagaggaaaatggccgaacaattggtcaccaaagttttgtgttgggaaagcattggaagggtcgacggttggtatttttggaatggggcgcattggacgaagcattgccgataaactaagcgcatttcgcccgtttgaaatcatttatcacaaccgtaaagccaattctgaatatggtcggattgatggaagattaaacgattttgctaattaaatgaattatgttaattaatcagagggtcgcttccgttatgtgccatttgaagaactcatcgaaagaagcgactttttgattctgtcggcgagtgtcaatgatcagacgaagggactgttcgacaaagaaaagttcgaacgaatgaaatcggacgcaattttggtgaatattggcaggtggggaaagaaaaaggcggccaaaattggacggggaattcgactcgcccatttaagggggtgtttggtccgaacagacgacctttacgaggcactgaacgaccgcaagttgggcggcgccgcgttggacgtcactgagccggagccattgccagcggaacatccgctcttctcactgcccaactgcggtgccaagaatgaattagaaacgatgaattgcctgtctttcttcagtaataacccctcacattggttccgccaacggcgtggcccgaaaacggatgatggaaatgggacaggcgaatgtaatcgccgcgctgaagggcgaagaaatgccatcgccaattcgaattga

SEQ ID NO: 77213 - DNA, 284 bp, Heterodera glycines
atgggaaaagttagcaaaacaaaatccgcaaagaaatccgccggaggcagcggaaataaaacggtgatttgggcggtggaagacattgtggacggaccgaaatacgaaacaattgggacgaagagacagaaactctacaaagtgcgatgggggtcagaagagcacaaattgtgtgaggaaatgcgaacactttgttaagagagacgtacgaattggccagcaacattcccccgggactcatcgatttgtacgaaaagcgggaaaaggtcattaccaacccatag

SEQ ID NO: 77214 - DNA, 689 bp, Heterodera glycines
atgaaaatgatcaaaattttaaattttcctcaaagtgatcgaaatgatttatttggtctgattcaattggcaatgatcagaacaatgagcaatggtgctacgtcatttcgcgacaagtgcaaaaagggcactacgcgacagtgcactaattgggcacttcgcgaaaaatgcattaagtgtagcacttcacgacagagcagaaatgatgtaggaagggggtgctataggacgactggagaattatgaaatctaaactcgatttcggacaaatgataacaaaaatatttattattacgatattttagttgttatatatactaaatattttatgaacgatctatccaaggaatatcataactcggaaggatctcctgattccgtgagcctcgatggatgaacaaaaatacacgtagatgaatgaagaaactgacgaacaagatgatgatgaccgcgaaacaaatatatctccgcctacaaaggacaactgaatgcttataaatattgaatttacgagactataaaaactcaaataatatgttattatacgatgttaatcatctaagtttaaaacagaactagaaatgtgccaaatgttctggaatacatgaatatacgcaagacaatttaatcaaaatctgcaaatgtttgagtgaagagcaaattctataaaaaaaaaaaccgacaataaa

SEQ ID NO: 77215 - DNA, 1946 bp, Heterodera glycines
  unsure (1)..(1946): unsure at all n locations
nttttacttgaacaaaaaaaaacaacacaaattttgaatatcagaaagagcaaatattaagcctcgtgtttttgagtcaattattgtaaaataaaatacaataatttttttttggcagttcagtacattttttagctaaaagtgatcgaacatttcgaccgattacttcttgaaattgttgctcacagtgaaaaagggacagtttttccttcagtgaaaaccatcggcggatttttttcgcgacttttcgcggataaaaatttgaaaaggcaacagcaaatggacgcaccgatgggcatttatttacatggggccgtgggtaagtgaactgatttataattaattgttcattttatgttttttaatttttcgttttttccggtggcggtaaaacaatgctaatggatttgttctttgagtcggttcaaatacaaaggcgggagagaatccattttcacgagtttatgcagcaatttcacaaaggtccgttcttcctaatggccaaatccgtcgaatatttctctctttttcagatttgcatcgtctgaaaatctcttcggctgtcccttcggctgatttggtcccaaaaattgccgaggcgataatcggtcgggcggtgcttttctgtttcgacgagttccaagtggtggacatcgccgatggtagccaaaaatgaattggttggactgaccaccttttccattttaacaataagcccttttgtctgtccgttctttcacacttttcctatcttttttttgtgtccaatttcaacatttttcccttttttcagcaatgattctaaaacgattgttcaccgaacttttctcccgaggattggttttggtggcgtacgaatgccctttttcactcaaaaacaattcaaaatatttgaaggacttcgaatcgaccgcccgtcgatctgtacaaaaatgggctccaaaggcatcaatttgtgccattcattcgtttgctggaacaaaagtgccgtgtgatttgcctcgattcgggcattgactacagaaaagtgaacgtgttgaaagcattttgccaataaaagtgccttttaagcaaatttctgacaaaatggcagaagactctttttttgttggcagtgggcctgaaattgatgccaaaatggacaattcctttaaacttttgattttgcatgagaacgacggtgagtgccggggaattaatgtgccaacaaatagagcaaataataacaataatattggattgttgaacaaatgttcagttgtcggtccaaaaacgctcaacattttgggacggaccctcaaaattgagcgatgttgcggaagagtcgcggatgttcactttgacgacgtaccatcaaaacgattaatcaattactatagcaattgtacggctaattgtaagtgccaatgtttttagctttgcaaaaagccattgagtgccaacgattacttggccatttcgagcgttttccacacggttctcatccgtcgaattccctttttcacccgtgcaaaattatcagaagcgcgtcgtttcatcactctaatcgacactttttacgaccaaaaggtgaaagaagaaacaaaagttttaatttctgtcgttcgaaggtccgtgtgatttgctcggccgacgccgaaccggacaaactcttccaatttgaggaagaggccgaattgagcgacacgcagcgaatgctaatggacgacttgagcatgtgcgacggagaggtggcactttctgttggccatcgcttaacatttctcaaaatgacattttaatgctgccgtattgcattcggtcttaaggaatccgcgactgccaatgtgttcagtggttccgaagaaatgttcgctttcgcgcggacggtgtcgcggatggcggagatgcgcaccgaaacgtttcagaaacaccgacgaccctcctgaagaaaactttcattgctg

SEQ ID NO: 77216 - DNA, 539 bp, Heterodera glycines
atggatttgctgtcccgtgcaaatgccctcgacgttctgaatcttactgacaatgtgcagaaaaagcggtttgtcgttgaggacagtgccggtcaatgcgccttttatgtgtgcaatgaatcaaaatcagtccaatgccaatgccattcaaacggtggcatttgttaatgtgtccgtttaaaataaactttttacagatcaaggctttcatctctgtgagcacattcttgccattgtattaaaagacaattgtttcgcgaggaaagtcagcgaaataatcagccaaaacagaggacggacggcgaattcggcgacgatggtcaacggactccaattggacaggtccgaccggacgaaccccccttaaaggtcgaacaaaacgcaatccgtcaccttttagttcccccgtcgttgagattatttgctgctcctccaatgggtcaaatacctaattgacttgcagacattctgcattatttatatcatcctatctttttgtttattattttatcgattttgtttttaattttcttaataaa

SEQ ID NO: 77217 - DNA, 606 bp, Heterodera glycines
atgcaagggggccaggctatacggtaattagaatttttagcatttaaaaaaaattttcagccaatttttgtcgttttgccttttccattattggtttgtttatctaattaaaatattttcaataaaattttacctctcaaaaaaataaaatttttacaacaacagtatcgaccggcgttctgaccaacgcggaagtgattagtgtgtttcttttacactcaattaaggacataaatttgccggaaaatcattacaaaatgccattctctgccgctccatccggcaacacaaataataataatttatccggccgttgttggatacgcagcgggacaatcatttttacaaatgacaaattaagtgaattttggaaaagcgtggaaacaagagattataattactttagagggtaatagttccgattagggttcagccccgagccctcggggcaaaatgtcaggggccggggacctcgggggacgacatgtcgggtgtcggggcggggaggagctcaattgtcgggggtcggggaccccgatcgggtagtgatcaactaaaatttttaacgaaaaatccaatttttctttttaaatgcacgtaaataaa

SEQ ID NO: 77218 - DNA, 782 bp, Heterodera glycines
atgcagagtctcggaattctaagaaattacccccattctttaatttttgaggggtcgatggacgaaaaagaaattgccgttgacgaactgaagtgtccatatgcattgggaccagcaggactggcgactggccgtgatcacggatcacggaaatcacgagatttttggggtgccgtgatcacggctcacggatttccgtgattgcgaattcaatcacggccagccctgattgggactctttttcccagtgctcttatggcgtcggtttcaaaaaatttttatttaaaatcttttatgggtaattttgggtgcaattttagtgatttaaatcggttaaaaacagattctttgaattttccgcttagaggtcattagagattgattacaactaattttaggcggttttttaacgggcccacttaatctaaagcctttaatttttacgataattttttttaaacttggaatttttataatttttgagaattgagttttagcattcatagtggaatatgaagctttttttaaggctccaatgagaaggtgggggggggggggtgaattttgtgaacttttgtgttcctaccgatatctttaaatatatgtatttgtattatgttattacagcatgccaaattgcaatttaatcatgagtttctaattgatcacgttgcaaaatttggcacaaaatctgttgatcaatttccaaaaattcatctgattgcagcaatgataacgcattttggtcaatgtaatcaaaacagcgatcagcgaacgcctta

SEQ ID NO: 77219 - DNA, 909 bp, Heterodera glycines
aaggtcactcggccgacggcgaaagtgcgaaaaatgggaacgaattgcaaaagaatgtgaaaaatttgagataaatgtatgctatctaaaaaaagctgaagaaattcaatttgatgatggacaaactctaaaatttggttgcaaatgggacattgaagcacagaaatgcgggccgaatgatgaaacggagaaagcattgaaaggggaagagaaggaaaagccgaggaatttgttggcatggcttatacaatgatttgatcgttgattgatttaatcattgatcatctgattagtgttggtgattaaaaagatttgttgctgattttgcattaattttcaaatgtattctttggggtagggatttgttaattagattctgacgaaaaatggcaaaaaaagagtgaaaattgtgattaatttttttttggtaaaattaattataaaacgtttttcaactttttttttgcaaagaaaaagcgattttttcctttgtttcatttttttcaacggaacttattgaatttaactttagaaacctgtaaaacaaatttggctttttggccaaatatttgaacatttttttgcaagttacattcttaggtgattattttttcctttttatattatcaaaaaatagtgatgtccaaataattattcctaatgatgcatagataatgacgttaaaatgaaaaagttatttatgaaaattagaaaatgtttaaaaatagttttttaaaaaaataattgtaaattttgaatgtttttttgaatgctcatttgcaaggacatccttggaaaaaaggactgtttcaaatttccaatagacgaggccctaatccaaggacgtccttggcatccaaggacgaatagcagccctgacctatcacaatttgcactataatatattca

SEQ ID NO: 77220 - DNA, 682 bp, Heterodera glycines
atgttcaccaatttcccattgcttttctccctcaccttggtttttctgctctctttgaccctgcaattccctcttaaaatgttaggaatgtttgctaattacaatgctcagaaaaatgacggtaatactttaatttataataaaataattgcttttgtgtttttctcatttcttttttgagtaaaataacaaaaactcggccgaaaggccaattcagccaaggatgacggaaaataaaaattaaaattctacatatttaaattgaaaaactagttatatctcaattaaagaaaaacaaaaataaaaatgagtcgtccgtcctcagccgagttgtccttgcctttgctgatttgtcctgaccaggggtgggcgaagctcggcttaccactcgaagccgaaggcgaagcccaatttttattcgaaggcgaagtccgaagtcgaagcccaaaaaacccgaagttttcgaagccgaagttttttcaattttttttaattccaaaaagttttaattttggttcaatataaattataacggaattgttaaatttgcagtgaatttcctttcgaaaaagggaataattttgaaaaattagaagaaaacaaatacttggatgggaagtgatccaaagcaaaaataaggaatagaaccaagagcgtaaccgacaaccatatatttgaacaa

SEQ ID NO: 77221 - DNA, 726 bp, Heterodera glycines
atggtcgacttttcgattaattattgcgtcgatttgaaaagtgctgacggcacagtccgtggcggttcgttggaccgactgatgtcaatggcacagaacggtagctacaacggcacaacgatggaatttgttgacaaaaagctctcgggacaatccgatgtcacaatggtaccagacgaagaagaggcgaagaacgaggacacaatggatggtggtcagagagcgggctgttcaaattaccaaatcaaatttagaagtggccactaccaatttcgtttatcgtccgtcctgccctccggcgcttcgaccggttgaatttgacacactttcggaaggcgacaaagccgaatgttacgaggaggaggaagatggaaaccagcaggcggaagaggagggggaagaagaggaagaagaagaagaggaggaggaagaagaggatgatgatgagtatgaatatgtgtatgaggaggaagagcagcagcagcaagacgagaacggagacggacgacagccgggggcagtggcggcaacgatcaaagaggacgaagacggcgacatcaaagtggtcatggaactcccgcccaagaagcggaccagcattcgtcgcaagaagttttccgcgtcgcgttcgcctgcgcccgaacgcgtggacggagcacaagcggagttggacgcagaggtgcgaatttgacaattgatggtcagcaagcattttggatatgcaaa

SEQ ID NO: 77222 - DNA, 579 bp, Heterodera glycines
gcacttccgtttgtgttgatcgacaccgattgtgctctttctgggcttcgcttaaggaatgcgagacaaatgcagtttggatggtggttaactgtgctcggtcttgcaaaatgtgtaaaggtgaaaattaaaaataaattattattattattatttatttaaaattaaaattgcaggtaaagctgcggttcgggctgcgaatggtgaatttgaggaaacggattgtaagttttggttgcttaaataattaaaaatttaacatgattttaataaaaatccgaatcgctttgagaccatcgaattattttaatttaaaaaaaaatttttttttaattaaagcattaattttccaggcacatttgtctcaacgcatgaaggtaaatttaaaaaaaaacatttaaaaattaaaatataaaattctaataaaaaatatataattttaagacatttccattcgtcgaacgatttcaacaaccgatgttcgcatcagcaacggcgcgtttggttgtgtgccaacacagacggcgacaaactgcaagaaaaatttgtgctaccatttgaaattccgcagctttgacg

SEQ ID NO: 77223 - DNA, 1322 bp, Heterodera glycines
atgctgagttcagcctcggaaattccggtgcgttggaatgcgttgttcatgcaatggggccaattcattgcgcatgacgtggccaagacgacaatgcttaacaaccaagtaaaaacatcattatcatttcaatattgactatttcagctcgagaattaacatcaaaattacatacaaaaataattttgaaccaaaaattattttaaaaagtttaaattcctataaaattacatatgtatgaaaaaaacccttttgtccaattaagatagaattttattgattttttaataaatatgttgttgttttttaagatttgcgccagttgtaagccggaaggtggtcaatgtttttcagtgatgttgagtcgaatggacccaacgtaacttttttttttagctaaattatttttttttaattatttaaaaaaaaattataaaattttgttaatttagttttggacgatttttgtgcttaccagtcgccagatcagcaccggtaggtttttttttgaatttgcattagcttttttatgcattttcttattcaaggtttgtggaacgggcagcgatcaaacgcgagaacagtacaatgagaacaccgcattcattgacggttcaatggtatagttttaaacaaatttaatttttatttatttgatttccaattaataaatcccaaaaatgatgaaaatttcaaacccattttatggcaaaattcggcggtgctgctgatttgtagagaataaatagaatatagaatattattttaataattttgtaaataattttaaacaaaaatttaattaaattttaaattatttccagatttacgggagcagcacgcgtgatcaattcctgttccgtcaaggaggcttcatgaagacgaacattctgcgcggtcgaattttcccgcccgttgacaacaatcaaaatttgattgcgggcgatgaccgagcaaacatttttgtcggcctcgccgcactgcacacactgtttgttcgagaacacaacaggtgaattgatgtgaaatcactgaccttggtagagttggacaaaatcattcaaagtttatagatttttgtaccatttgaattggtcactgattaaacagataagcgtttgttattaaacaccataaaattgtgtattcaattcggaatatcaaatcagaacgctgacccgtagcatgtgatccagggacggtcggtctattgacgaaccttttttgctagccaaccgacaaaactttttcccgcactatttattttttttccattttcccttaaaatttggagccaccgggtcttggagggtggtactaaa

SEQ ID NO: 77224 - DNA, 1955 bp, Heterodera glycines
  unsure (1)..(1955): unsure at all n locations
gaatantctgccacagttgtgttgggcaaaaaattcaatgaactaattgggccatacagaggatacaacccaaaggttgacccttctgttttggtgagttattttttaaataaaattaaattttatgatatttttaaaatatcatttttgtagaatgaattcactggctgcgcattccgatttggacatggcatgatacaggtcagaaaatttttagtgagctgataaattattaagaaaagaaattcgtaaaatttgaactttaaatacaaaaatttatgaaaaacaattgttattgtttgtgcttaaagttacaataattaattaattgcaaatacaaaaattaatttaattaatttatgttaaggaattttatccattcttcaatgagaaatttcaacaaattggtatgtttattgtttatttgtatgtcgatcagaaaaaataaataaatataattaaggtggaatcccattcaacgatggaatgttcaggagtattcatataatcaacaacggcattgatccattgatcaggggtaaactgattagttggcgggcactgatcagctttagcacaatcaacattttgaaaattttaaggccttatgacactgccagcaaaaatgccgcaacgcttaacaattgcagtaacggagaaaatttttgggaattccgatcttgggtgagtttttttcatgttgcggcataaaattcaatttaaaaatttcggatttattttaacaattataataaatttatttattttttcatcaatctttgcttaagttcaatcaacattcaacgtggtcgtgaccatggcatccctggttacactgcttggcgcgaagtgtgcaatttgccgccagtgcgcgactttaacgacttgaacagcacaattacgaatccggttgtgcgcgaaaatttgcgtattctttacaaaagagttggtgcgtgagtgttattaacatttttagggggtgggggattttatgtattttataaatttttacctagagaacggtgtacaataccaccacaccctgcaatttataaatttgggaatctgaaaatcacaaaacaaaaaaaaattcaaaaaatttgttaggaaataaaaactttcgggcttgtccttatcttgaaccaaaatgttcaaaaccctataagctccttagctttgcacgaattaaattaaaaattaaatattaaaactaaattttttctctaattaactatctatccaaattaaacaattatttttaactattattaaaaaatctttaaagaactcattgacatgtatgttggaagcattttggaagaccccgttgaaggaggaatgattggtgagcaatttttaaagaatattttgctcagaatttccaaaatgatttaggtccaacgcttgcctgcattattggaaagcaattcagggcactcagagatggagatcggtaaaaatttcagcgttttccaacttcaaaaaacaaaataaaaaaatccagatttttctatgaaaaccgaaaagtgatgtccgaggagcacatacgacaaataaaacgtgcctcattagcacgaatgctgtgtgattctggggacggaatgaaattggtgcttagttttattcagttggaaatttcaattatttttaaagatttaaaatttaatttaattattattcaaaaattattattaaatttataggattgtttcgagacaaataacaaaaaaatactaatttaaaaaaccaattcttatttgatcattgcttttgaatttaaaaatgacaaatgatctacagtatgatcattattaagtattgaaactttaaaattcaaattttaggtgccaaagcacgcattcaatcaaatccaaggacagaatgagctgttcacatgtgaccaaatagactcaccaaattacttcaaatggaaagacacctcatttttctcataa

SEQ ID NO: 77225 - DNA, 334 bp, Heterodera glycines
gtgcagagggtgacgatgatgatgaagaaggcgatgatgatgacgaagatgccgagggggatgagggcggtgaagaggaggaagaggaagaatgagcttttcgcatctgttttaagctaactcttctggcgacaatgttttgtttgtttgatttcttggccaattccccccttttgccctgctgactgagcaacatggttcaatcctctggccaaactgatcggatcacacacaaacacacacacaacctttttggccaacatcaccccatcccctcgcccatgttatttatattatgaatgtgtcgtggttggttgaacctctgcgcaataaa

SEQ ID NO: 77226 - DNA, 234 bp, Heterodera glycines
gaccccctcatgtctctctgttccttcctctctcacgtgtgcccccccccccactattttgtccgtcttcgccttctctctgtgttatgctgctctctctctctcttttctttatgattgcccgtgccgttgttcgtctccatggattgtcgtgccccttttgtgcgtgttcgtccgtcgtcgtcgtcgtctctgccgtggtgtcccacaaatcgccgtcatatccttgggcca

SEQ ID NO: 77227 - DNA, 607 bp, Heterodera glycines
atgcatgttagaagattcaaacagaatttagaacacactttttaagtcattttatgaaaccatttagagtcaacaaaaaaagccatttgacttaaattcccagtcctatttaacaccaaacataaattgcccacccatacggtttaacaaaattgtttcttaaacataattcatcgtttcaaatggttccaggcttttccccaaaaaagttgacaaatatgtgttaccgacgggcggaggatgtttaggactgggcaatcaaatggtaatttttgtgaacaagccgggatgggattaccgttcacaatatttcaaacaaaacaattagggaataaatgattttagggactggtccaaaagttttaaaattcaccccccaggggcaaggaaatttgagttttacgtgttttattaatttggtttttgtttttagttccgttttgccgcattgtacggaattggaaaaccttatggacggaagccgatttacaaggacagtcaaaaatgcaaaaagtcaagcgtaaatgcggtagaaaaaggcgagaagaaagagcatcttttcccgatctttgccagccaagaaaaatattttgtaattttaatttaa

SEQ ID NO: 77228 - DNA, 739 bp, Heterodera glycines
atgaaactgtttgtgtacagaatttattcattcgatgtttttcatatgtaaacccacaaaagtttgcctccttttttgattaatttcaattcattttgcttaagttttgctttttcgaggatcaagcagaaatatttggaattggatgtatttattaataaacaaaaaataaataaatttaaaatttaagggcgacggttgttttcaatcttataaattctttgaaagccgaagaatggaaatacgtcaaatatttcagtttgggcatcaactttgtttaaatgtgacggcattcaaaaatgaattatttgggtaagtatttgaaaaaataaataatattattattaatatacaatatatatacaaataaataattaaatttttttattaaaattaatatataataattgcaatcatttcagaaatgatcagtcacacaaattttgtgtgcacacccgcaggggagattttgttaaaagaggttgggactcgaagaaggaacctacggagaaaggaattgatttgggatttgaatatttaaaggcgactcataagttgtcgatacaagacactttgagatgaaagtatgaaaagttaaaatgggctaagtacgaaaagctgttcgaattgcctcattaagtctgtcggcaaattcacactctttcgtctgcttgtaaattgagaaagcttgtctcgctattgagcgcatattttggttttcttttttttttattcaaaa

SEQ ID NO: 77229 - DNA, 376 bp, Heterodera glycines
atgccaagggctaatgatttggcttttgccgtgttgggatgcgattctttgtttttgtcggcacagacatcaacttttgcttggtggattgcttatttgatgcccgacgatgctaccattttgtacaattcagattttcttccgggtcagtttttttaatttaatttcgttgaattttaaaataatgagtaattctgttttaggccttcatacacgtgaccattttttgcctgaatggattccgataaaactgatcaatggctcaatgactcgcgattaaatccaaacggagtgttctcaaaaaatgcttttattgttttaatatttttgaaaaaatttatgcttttgcaaaaatggatttgaaactccgaataaa

SEQ ID NO: 77230 - DNA, 678 bp, Heterodera glycines
atgaaactgtttgtgtacagaatttattcattcgatgtttttcatatgtaaacccacaaaagtttgccttcttttttgattaatttcaattaattttgcttaagttttgctttttcgaggatcaagcagaaatatttggaattggatgtatttattaataaacaaaaaataaataaatttaaaatttaagggcgacggttgtttccaatcttacaaattctttgaaagtcgaaggatggaaatacgtcaaatatttcagtttgggcatcaactttgtttgaatgtgacggcattcaaaaatgaattatttgggtaagtatttgaaaaaataaataatattattattaatatacaatatatatacaaataaatttttttaattaaaattaatatataataattccaatcttttagaaatgatcagtctcacaaattttgtgtgcatatccgcaggggagattttgttaaaagaggttgggactcgaagaaggaacctacggagaaaggaattgattttggatttgaatatttaaaggtgattcatatggcgaatggtcattttttaatttttaattaaaaatttaggaaaaatttgacaacatttccatttctgttgttttgcttggagaagacaaacaatttttggcgaatttatcattcaatcggcaggcaaataaa

SEQ ID NO: 77231 - DNA, 1269 bp, Heterodera glycines
atgacggcgaccggcgacactgccgtgaacacggtacgccgtcggtgcgtcgtcgccccgcgcgcccatctcgttttgccattaattaccgcgtctccgtcggcggcatttttctatgccttggggcgttttgtttggcgcttcaatgctttaaaagcaggggacaaacacagcaaaatcatcacaacgcaacagcaacaaacagcagcaaagctcctcactgtgtttattaacaaataagtaatattttcaaaataataaatattattaacaattaatccaaaatcaatccaaaattttggcacatggaatccctctttcgaaatttattattacactaaattctcttatatttttaaaaaatgctcattcatttaaaaataatttataatcaattttcatttttaagagctcaacaaataaaatgaaccaaaaactcttcctgatcgctcttttcggcgtcatcgctctgttggcactgatcgatgccattggcctaccccaacagaaccaatgttgtcagcagcagcagtgttgccaaggcggatgcagcagcgggtgctgcggaggcggcggcggtggctgctgctgctgccaaggcggagggggcggcggacttggcggcctcggtggactcggacgccgacgtcgccgtcgcggagccaaggagctcggacaggtgaccgattttttgaaattctgcatgaattttctgaaatcgacaactgggcgacaacccgttttttgagtataacacctttcataatacatagttgtccgagttcaaacaatttattaacattagatagtcctttgttttttaattagctgcaaatttcgaaaatttttgttgtggtttcaaaaaagttataaacaattaataaggaaatatttcaacaaattaatgcattttttccaccaggtctctgccattcagcctcattacaaagccgtcgaaacgccgtgcccccaaacggcatggcaagaaaccttggaaaaggtgaggcatttttcgtcattggcactttttgggcaatcactggcatttcccatcatttcattataacttaaaacaatcttcagagcattctggcgggcgacgccatcggctcagtgagtgccatccaaagcggactgtacgcgcgctttggccaaaagttcttggtcacatgcgctgacgccaatgagacgaaagagggccaatccgtgcccaaccgtgtgcacttcagctcgtccggcgacggctactgtaacatggtcaaggagaaa

SEQ ID NO: 77232 - DNA, 1637 bp, Heterodera glycines
atgccattgctgcatgttcacctcttcaaatgcttccatcggctgcacttcttgcggctgcgacattttgccgttctgttgtccaacccgacactgctccaatcgcagctgtgcatgccgttcggatgcgaagtgaatgttggccaagcattggatgcgcgtcaacgctttttgctgcgggttggccgcgctttgttctgccgattggagtccggaggcaatttgggcgttgtagatgaagctgtactcggtgtccttctgctggaacggctgcagcagctcggcggcgtcgttgtcgcccgacgttgggccaacccgtgccgtgccaaagttggcattcgccgaagacagaaagccgccaaaactcatccggttggaatggcgtattccgctggtgccaacactgaggaaggcggtgaccagcaccaaaagtgccgcggtacgcatttcgtttcttttttgattgctgtgttgcgatcactcactaatcagtcggaatggtcggttggggaaggaatgaatctgagggaggggagattcgaatgtgctctcttctgcctccgatgcgctatttatacggcccattttcggtccgttttgcccccggcggcgtcggacagtcgccgcaagggacagaaatttgggaattgttttgctgataacagtcaaatgtacaaaaaacagctagccaaattgacaggcgattgaccccaaattgacagctgctgctgctgctttggctgactgattgtttggtgctaatttaatttccccccggcgcattccgccatcaatcatttcgcatatgccattcaattttttttacttttttataaaaatattttttggtaattattttttaatattacattttgcttttattaaatatagacaacaaagtctattatgggagaccctgtcagaagttaacgaaattttcatcctgattttgtgcaaaatccaaggactaagaccccctagggcataatcacgaaaatccaatccattcacagactttaagctggattcttgaccgattttcggtattccctttttttatacttatttcaggttcgaatgtgatggtgtaaataattgtaacaccatcgctaccgtacaatgtttttttttttgctctttttgactgtaacaattggcaaaattttaaattgagaaacaacgcaaaagtttggcattttattcgttaaatttttttttaattattgcactttttccaattccttttcaattttccgcattttctcttttagcaaacgtccaaattcgtttagcatttttttatggaaactctgctggacaaaaccattttttcggtcatcgacccgcccaatttgcgcattaatttgccgcgatggtttacggttttgaaatgtttttttttaattgtcaaaatttgcctttttcagttcccctcgcccatgcaaacctttttcttcattcttctcacttatttcctcgtctccggtggcattgtttacgatgtgatcaacgaacctccgtccatcggtcggcacatttcactgatttctcccattttacaaatttgtaattttatactttactaatcggaaattccgacttttgtcaatgaataatgaacgttttagttttatgca

SEQ ID NO: 77233 - DNA, 728 bp, Heterodera glycines
atggctttaaaaagtgacggacaaatgcccaaagagacacatcgccagaggaattcggcgcgaaagggaaactgcccgatgatgccgatgcttcttctattatcacttttggcaattactgtcattttgtcggagggaaggccaaatatgtggagaggggacggagaaaggaaacagacggaaataggcagagagaaaagggaacaggaaaagcagagagacaaagaggaaaagttaacggaaaggggagaaggcaggagaaggtacagaaggcaatcactgccaacggacaatgtgttggtcagttattggcttattggcatttaaatttgagagaaaaaagcggaaaaaatcatttaatcttataaatttatttgatcattctccgtcttttcaggtgtattcttccaattcgaatgtgtccatcgccgatcggatccaagttttgtccaaagaatcgcaaattcgaattttggagcgaaatttaaacaccaccgtttggtcaaatgcgtcgcttctgcaggcaaaaaatgcttacgatattatgtcaaaccttaattttgtgatcagatgtcacaaaatggtgagcaaatttcgatgagtgcgtcgcaagcgatcgctttggtaatgaaattgggcggaggagcgcaaatggaaggcacgggggacactttacaggtggagagactaattaagggataaatgggaagaaagggactaattaagaa

SEQ ID NO: 77234 - DNA, 1039 bp, Heterodera glycines
atggccgacccttccgagctgttcactttccgtcactctttcccccctccttccgtttcgccctcttccgctggtccctcctccaccgaatttgaatcgcttgtgacacataatgagtcggcgtccgcttttccttcccccgactctgaactgttcactttccccccgtctcttgtgcccgatgccgactttctcgtcggccaatttgaaactgtgccctctcagcggaccacccaaagtcttttcccattgtcagcgaccatttcggcactccaattccccgaagaaacggcagaagaacaacagcaacacattgccgaacaattcccgggcattcgacgggaaaatttgctaatttggagaccggaagaaaacgaaggaacggagggaaaggaggggggagagaaattggagacgtatttggtggatgaaaaggaggaagagggagaggaagggaagaggccgagaaggacactgaacgacgacgtcaatggaagaaagacggaagaacgaatgccgagggcggagatggaagtggacattgctgtggagggggaggaggacgtgagggcggagagactgaggagagagttgggggaaggcatcgagaggatgttggaagagtgtgaagagaagaggacgaaaacaatggaaagagaaacagatagagaagagacactacggaacgagacgaacagagaggacgaaaagataacagaaagcgacggagcgagtgcagtgagagtaacggaagtgaaattgaaatatttgggaaagatggactcaagcaagaaggaggtgatcagaatgcacttcacattggaaggggaacagaatgaattggagaagggcattcgaagaatcggacagatggacagagaaacggcggacaaaacactgaaacaccaagtgactaatgaggggagggagcaattagggggtacggataaacagtggcaaaaaataaatagcattcaaatttcggaaaaataaatgaaaatctgcgaattttttcacatacctattcaattgcaaacaa

SEQ ID NO: 77235 - DNA, 1280 bp, Heterodera glycines
aaaacaaaaaaatcgattttttcaagtgtccgtttggggtactcaaacaattatggggagcaaaaatccaacgcagaaattaaagtacaggctatagggaagctattcccgaaggattcggtctccccataaatctgagcgcatcggtagggggacggcccgaaaagcaaaaaaatcgattttttccgtttggggtactcaaacaattatggggagcaaaaatccaacgcagaattaaagtacaggctatggggaagctattcccgaaggattcggtctccccataaatctgggcgcatcggttcgggggacggcccgaaaagcaaaaaaaatcgattttttccgtttggggtactcaaacaattatggggagcaaaaatccaacgcagaattaaagtacaggctatggggaagctattcccgaaggattcggtctccccataaatctgggcgcatcggttcggggggactgccccgaaaacaaaaaaatcgattttttcaagtgtccgtttggggtactcaaacaattatggggagcaaaaatccaacgcagaattaaagtacaggctatagggaagctattcccggaggattcggtctccccataaatctgggcgcatcggtttggggggactgcccaaaaacaaaaaaatcgattttttcaagtgtccgtttggggtactcaaacaattatggggagcaaaaatccaacgcagaaattaaagtacaggctatagggaagctattcccgaaggattcggtctccccataaatctgagcgcatcggtagggggacggcccgaaaacaaaaaaatcgattttttccgtttggggtactcaaacaattatggggagcaaaaatccaacgcagaattaaagtacaggctatagggaagctattcccgaaggattcggtctccccataaatctgagcgcatcggtaggggggacggcccgaaaacaaaaaaatcgattttttccgtttggggtactcaaacaattatggggagcaaaaatccaacgcagaattaaagtacaggctatggggaagctattcccgaaggattcggtctccccataaatctgggcgcatcggtttggggggactgcccgaaaacaaaaaaatcgattttttcaagtgtccgtttggggtactcaaacaattatggggagcaaaaatccaacgcagaattaaagtacaggctatagggaagctattcccggaggattcggtctccccataaatctgggcgcatcggttagggggacggcccgaaaac

SEQ ID NO: 77236 - DNA, 912 bp, Heterodera glycines
atggcaatgtcagcaattccaattgaacatgatgcagcatcacaatgggactgtaattttttaattgttttttgaatctattttcttccattatgaagtaaaacttgataccatttttaattcaaaaattaatatttttaatttaatagggccgctacaacacactgacggagttgtcaaagtgcacaacacaaaagataaatttgaggttggattagacgtgcaattttttgctccacaagaaattgaggtcagaatgccaaaagaaaagagaaaaattatccaattaaaaaaaaaaacaaggtcaaagtgtcgggccaagatgtgatcattcattgtctccacgaaattcgcaaaggttggtaatttctgccaatattccttaggcaattgagaaatcggcattttgaaaaagcgttcgttttggcagttttttaaattaaatcggttttccgtttccttataccgccaaatagcataaaaacattacaccacatttcttttaaagcatattagaatgacgatcaaaatccacattctgtctccattttctccattcatagagcaatgcattggttttttggtctgttttttaaaactaaatttttctatttcgattcaaaaatttagaaacgcttttttcccctccgccactaccgctgaaagaaatcaatttttgatttgttttgtcaaaatttcagatcagcacggaagtgttaagcgcgaaattcaccgtcaataccgactgccaaatgacgtcgacgcggcaacattgaaatctcatctgtccacccgtggcgtgcttacattgacagcctcgaaaaaggactaactgagaaggaaaattgagtgaatttgatgggaaattaggacggaaattttgctcatcttgtgagctgctgttgaaataaa

SEQ ID NO: 77237 - DNA, 1050 bp, Heterodera glycines
  unsure (1)..(1050): unsure at all n locations
atgccgtttcggttacagtatcnccttctcccatttagtggacatcaaaagcaccacaatacggtattcaccaaacatgggcacagcgaagaagatggtggtgatcaacagcagctgcaggacggcgaaattacgctacacaacgaatgctattttcgttatgccgaaacggatcaccactacgcattcttgcgttggttacaccacaaaaatgtgtcccattacacacccatttcgccgtcatatgagcaaattttgcgcagagttcaagtacagcaatttaatttgattagtggttttgccaccattttttttattaacttgtcaatagtcctcttgacaatttcgattaatgagattttgtgcagatgattttacacacacacacttttcagcccgatgacataaagaacggactacagataaccatgggaacacagcaccgacaacagccaagctgtgacatcagacatcggagaatgaaggttcagaatattaattaatttttttgtataattttaagaatttattttcaaatgttatgagagggactcattattttataagaagggtaaaaaaataaaactaaatttttgggcccattggtggcaggccagcattaagcttgggaagggcgccgaaaatccaccccacccccaaataaaaaggtaattttttgaaaaattaagcatttcaattacaaaaattttctaaaattttgaaaatttaaatcttcagagtctttcattgcaactatttgctgaccaatacttttgtttgtttgattttttaagtttaaactaaaaccctcaaaataagtcatttttggcaaaaattaatttctctctgaagcacctaattggtaaaaaatacgctgggtttcatcaatgtgttattttaaattaaacattttcagcctgttcacccaaacatgccaatcattgaccgcgccttgtgccaatacgagtacattttgaactacaagccaaatgcaagtggccaaattacaaaaaataaaataattatttatgattaataccaaataataaa

SEQ ID NO: 77238 - DNA, 1845 bp, Heterodera glycines
  unsure (1)..(1845): unsure at all n locations
atgattggacctattcctgctgctatggcattgctgctgctcgtcttatgctcgtttttaaatagtaaaattaaaatatttttaacatttcgtaacagcgttgcctcgggttgataaaaagtttgggtcgggtttagggtttcgggaagccaaaaataccggattttttggatcgggttggcagaaaaaatcccgggtcgggctttgggtcgccaaaaagagcgggtttcggttgggttggcccgaataaagttcgggttaggtttaggggttttgggtcgccaaaaagaacttgttttgangtcgggtcggtcgaaaaaagatccgggttataagggtttcgggtcgtccaaaaaaccgggttctcgggntcgatcgtaaaaaagctcggacngcttattggggggtttggggtaacctacggtaacccttgttttatatgtatttgataaataagaattaaatttttagtggagaaacgggaccgatttcaaatgtacccccacaggcctcaattcaccagcttcatcaattttgcaccaaatgggaaccgacaatctgttgaacaacaaccaacattaacaaacacaaaattgaaaaagagcgtagtagcaaaagtggtgatttaggtatacaataatttgtaaaaattaaattttgaaattattaattttaggcaaaaacagcaaacacccgcacaaaaaagagtaagtaaaattagattaagcaatcggcaaccgaatccattgaactgttcgaatgtgttgtatcatatagcaggaatggaatcgggttccagacctttttttcaaaaaatcccggacctgtctggagtttttttttgaaagtaccccaaaggtactattagaggaaataaaattttttaggtgagattttaagtgatttttgacggaaattgacccaaaaagctttagaacaattattgctaaaaatactataaaaattcactcgctcaataatacaattttttaaaaatctaattcaaacatagttaaaagagaagaaaaaaaaagaaaaaaagaatttttaaaaaaccgaacattttcccttttttaaggttagtttttatcctttttttgattaaagcaaatccattgaacttttcgaataagttaaatgcaaacattgatagattattttgaaaagaaataaaaactaaaaaagctttttgataataccttgttttttaaggaattttaattgaaaggcttgtgcttaggtatttgctagtcatattttaatcggaacacgttctttggtttatatcaattctgtcaaaattggtcgaaagcctacctatgcagtttttcgcattcagaccgaatcaattgttgcaattcgaattttcatggatttcaaaattagaattaataaaacaattttatagatcagcaaccaaaaagcctcatagaaaacttggagttgagagtaaggtgaaagtggaacaaaaacgcaaaagcaaaaatttaagtgaaaagaaagggcgatttgggaaaatcatgtaagtggggaagacaccaataattgagcaattatgatttatttccttgtcaaggttttacgtgttcatgttgatcactataattgtgccccatgtgccgcaaaatgtgacgctcagtatgtgtacaataataaatagggctgccaattttatgtaaatacatttttttcctggattctacgtagtctaattagtaggaaaaacatcttcttttttccatttgcttataaaagttgggacttttatttacatatttttatacatatttcggacttttagtacatattttcagatttttgggaaaactgcttaacaaaaatgca

SEQ ID NO: 77239 - DNA, 1169 bp, Heterodera glycines
  unsure (1)..(1169): unsure at all n locations
atgatttacctagttacactctctttggcaaaccaatgtgatcatcctgtttgggtgttcagcaacgcaattcctaatgtgcaaatgccggtgcttttggaatcaaaccacggccagcactttccaattgcatcaactcaggcagcggcacgtttatgggttgaacagcataactgcaacgatgtcagaattaaattaagaaacattatacacatacataagtgtataataagcatatattaccccataattcctatattaaaggccactggggctctattttttaacctcctcaaatgtggggctttatttctgagggggggggggggagtggctctatatttccaaccctctcaaaagggggactttatttcaagggtggctttattgcaggggagatttaatgtaggaattacagtatatataactagggctgctaaaacaggcaccagaaaatcgcgaaaggcaccaaagagggcattaaaaactttcaaatacgaatgttttcaagatgttataagcaaaattcttagaaaatcaaatatttttatttaaaaaaaactactctttcggagtgcattttttaaattttgatagcaaaaaatcgattttactgctgtatctttttgaatttttggacaagaaaaatcgatgataagtccatccttaggggtgcattttgctaattttcaaacaaatttaggaccaaaattcaaaaaaaaccccgccaaaaagggcatcaaaagggggcatcaaatgtaaaaaagggggcatggaagggcataagggcacgaaaattgcaatgctaataataaacaaagaagagtcacataatatttgttcataatatgtcaatgtataaaattttaaaaaaatgttttttttagctcaccgatgatgaaaaacaaaaaaatttaatatgcaaccctgctggggccgacaaactttcactctttgaatggacctttgatggtattagccagttcattgatgtcagttatgtggacggtgccaatgtgccgatgggtgttcatgtgcccgaattcccggacaaagacatcattatcaacacgcccacgggcactacccacacagtggaacaactgtttgaagatagcaacggtcaacttgttgtgccactggaaatgatcatncacgattatgccggt

SEQ ID NO: 77240 - DNA, 507 bp, Heterodera glycines
atgctccaaatttggccctctctcgccatccttctcctccgccttctcatccgacttggaacagttcagagccagattgacgtacaatacgacgacgtcaacagtatttatgtggacgaaattgacgacgatcggtcgatggttttggacggggaaaacactgctgagtcatcggctggcaaattgccattctcgagaatgtttcggtctcgtccatcgtcggcaccgtcgtccactcggccgaacattcttgttctgatggtggatgaccttggctacggagaccttcaaagttacggcaatcctactcaggtgtgactgcttggcaatgacttaactgtcccatctctcaaggaatggacgccggtggaccaactgatggccgagggggtccgctttaccaatgcttacgctgccgattcgatgtgttcgccgagtcgtgccggcttcatgaccggtgccccctccctcccatcctccaattcacgcctcccctcctgtccttag

SEQ ID NO: 77241 - DNA, 750 bp, Heterodera glycines
atgtaccctttggtggacagcgcaggcgaatggacggtgtccgtcgtgctcgacaaagtcggcacaatcttggagaagcacattggcacaatgtttcccgtcccaccccaattgggacacttttcgccggaagtgaaacgggtgagttttgtgctcatagtgtgggaaaatacttcaatgcatttttaaaattggcagtgttgcgattggccaaaatgccgttgcgattatctgacgaaggagcgaccgaaaagtgaggaggaggcggacactttcaaggagagatggacaggcatttgaggcggaggagcgagggacagaaagaaaagagaatggcgatcactcggccgatcaatcgcctgcggcgttttgccgaacatccacattttagggcatcgacactgtcctccgctttgatcaatttcgattctccagattctccgctgttactgattgatcactcccctcccctcttccaatttaattcgcacaaaaacttttttgctatttttctaatgggccgatctttttttgcttttagacaatttagagactaattaaaaaattataatgaagaggaaaagccaaagcaaaaagtaacttaattttgtgcagatttccacaaaacaaaaagactttgttcagattaaatttattgtaaaaataggaaagttttaatagaaaatgttttattgtaatatttataaataattgaacaacaaataataattgttacacatattttgatga

SEQ ID NO: 77242 - DNA, 249 bp, Heterodera glycines
ttttgttttatttattttttgtgaaatattaatgaaatttgaacataaatcactgaaaattcatttttatttttatagccaaacgaacatttctttctttcttttttttgtttgcgaaaaggaaattttcaatgagattttgccagcggcgaatgccatcgttgggaacagccaatcggagtgggaattctgaagatgaaagtgctgagcaggaagaacaaagtctgaaattcagcacaaagcattgac

SEQ ID NO: 77243 - DNA, 482 bp, Heterodera glycines
atgacaacgaatgacccaagtgtaagcggcgacggcaccgccacgaacagtgcgacgggggcacgcattggtgagggaaacatcgccacggaacagaagcgaatgttccgcttcctccactcggcattggccatcgtttccatcctttgggccaccgtttgtctgttcctttacttccacgcgccctcctcacaggtgaaatgcccaatcgatgctctttcgtcccaccgttttctccctttggcaccactctctcctctcttttcgccagagtcaacagcttttcgactgtcgatggcatttgtccgttctgctggtccaagcttcgtttggccatgtgttcgtcttctgctcgcgcagtgccctccttttctgtgccgctttcgtgtccactcaatatgccattgtctactcactgctcactttggtcatttactcgttggacaccgttttgcttatgctctttccccgcccatcggctg

SEQ ID NO: 77244 - DNA, 582 bp, Heterodera glycines
atggactcggaaatggcccaggcggaccaacaatggactgagacgcgaaagcgggagaccaaatggcgagtccggcagaatgagtgtcaatgccaacatttgcttgtatgtccaggctttactccgtggccgcctgtgttttggccgtggcggttggccatttgctgctcaatttcggctacgttttgcagtcgatgattttcgagtcgttgtccgtcgccactggcctttccttcgtcttttccatgtgtcttctcggcgctgtcggcttttacgctgtccggcttctccgtttctgcttggtattacagttcttccctcgatgtttttttctctcttttcttttcctctcccttctctcttcatccctccttttttttaattttccattccattcagattctttccgcgtacatctctttgaacttgtttgtaactgcttccctgcttctgttcgctttcatccaagacttcttcttcttggccacaacactcgatgacgaagtaaaaaaaaaagcgaggagagggggagcaaattcaccatcaatgcttgctctgatcagtgatcattgctctgactga

SEQ ID NO: 77245 - DNA, 1036 bp, Heterodera glycines
gggaatggccaaagaggacgaatgggtgacgaaaacggtggaggcggagccatcggcggaggaaagaagcggacgacggaaaagcgcttcagtgacgcggtaaaactgaatttgcgattaaaattggcatcattttcagcttattgttagtggcgtaaaaacgacctgcaaaacgctgttcacgtaaatttggacaatgtccgtctgttgtccgatcagatcaagcgtagtgatcccaaccgaggcaagcttaatgagttgttggggagatgcagcaattgaacgaaaagcattcatcagttcgctgattacctgcagtatttggacgggaagcagtgcttggaagcgttcaaagcgagtcacataaaaaaggaaaacaaattgagcagaagtgagaagcctgagagaagagacaattaattagttgggtaataaaaactaattaattaataaaatttggaagaccaatcataaaagctcggagttgacggaaagatgagactgaaaatggaaaaggaagtgaaaaaatgacaaaggacggaccattgaagaagttttgccaagacgaagctaaattaaatttaaaaacaaaaatataaaatttaaaaaaaagaaaattaaagtcgcacttctgccaaaaggacaaattcaatggcagcggaaacaatgccaacgagggaaagtgcgcggagcaatcggacggccctttgcacatttgagggctgagtttggagtatttttgtcctgacgagggtggaaatggcataacggagggcaaaagctaaagaaaaagcaatggaaagatgaaagacaaatgcaattaattaatctgtgccgttattcaccggcgatgaaaaaagtgccgacggaaagggcaaaatcggataaatatagcaaaatcttcagagtggagccaccgccgtcagacgaatcggactcatccggcggagcagaaaaagagccatttttaagggcggaagaaaaaggaaaggaagcggacgaagtattaagggcagtggcgatagtatccttctaa

SEQ ID NO: 77246 - DNA, 902 bp, Heterodera glycines
atggacgggggaaaaaggggaaaagaatggcaaaaccaaataaacaatgcattcggggatggagatttcaccgagaagttcaatctgaggaacgaatcggttggttttaacaaatttagcgataaatacgcttttacttttatgtcccgaatttcgtcctctttggccgggtcgcggatcagcaacaacatgaacagtctaatttttacaaggatatttaacaattgttcattttcagatcaccttccagccatatcgcccagcaaaaagcgttcccccgtccggtcgatgcgcccgcaacaattaaaacgcgccatgtgaatgagaggcggggcaattgctgtgtaatggcttggtctctaaattaaaatatcatttttctatagcaatattcgtcgttccctctgcccttttctttttttaatatattttcccatttctccccgttttgaccgtcctctgttcggctcaccttctggtaaatgatcgattcttggcccaccacaattaatccgccgtaaggcgacggcaccggcaccaaaagagtggtcgctgcttcgatattacctgcccaattagttgtgttttttttgtttagaaaagtgtaagttcgcagactttgttgccagagcggagagtgcaattctttgttttccaaatccaattcgcagactttcaaatggcgaccattcaaatcctggtagagataagcgatggtcggttcatctgaaaacttggcattctttataatccaaatttttgtttttaaaagattatttagcaatgtcatgtaattgttcgctatgctaatttatgctatgagaatggtacaaaaagtatcccttcagccaggggcgtatctataaacatttttcgggggggggggggttgctctttaccca

SEQ ID NO: 77247 - DNA, 1674 bp, Heterodera glycines
gaactgaacagtttgctgattttgaccgccaaatatcacttggccattctcagtttcgcggaggacggacagccgcggacccgcgcatttggacacgtggcggacaaagtgggaaggccggccgagacggggatcattacatgtgtgcacgagtcgggactgatcgcactgcgactttacgaggcccacttaaagctgatccaatggcaggacgggcgggatttgaagaatttcaacgttcgttttgaagactacgacatcacggacgtggcatttttggaaaacacgggcaagttttgctattcccgaaaatttttaggtacttttccgttttgtgcctacacctcaaaattttaattccccccccccccgaaatgaaaatttttaaaaattttccagcaaataatggaaaaatttttcgaatttcctcccaaacgaaaatttaaaaattttataggcgattttcgtaacaaaaagcactctaatttccaaaaatttttcccggcggcgcctatcggcaccgccggacctcaattttccactatttttactaagttttttgccttaaaacggccaaaattgggtcctttttagtgaaaaagtgcttacccagcagcggaaaaagggttttttgtttattgggtaaagagcaacccccccccccccgaaaaatgtttatagatacgcccctggctgaagggatactttttgtaccattctcatagcataaattagcatagcgaacaattacatgacattgctaaataatcttttaaaaacaaaaatttggattataaagaatgccaagttttcagatgaaccgaccatcgcttatctctaccaggatttgaatggtcgccatttgaaagtctgcgaattggatttggaaaacaaagaattgcactctccgctctggcaacaaagtctgcgaacttacacttttctaaacaaaaaaaacacaactaattgggcaggtaatatcgaagcagcgaccactcttttggtgccggtgccgtcgccttacggcggattaattgtggtgggccaagaatcgatcatttaccagaaggtgagccgaacagaggacggtcaaaacggggagaaatgggaaaatatattaaaaaaagaaaagggcagagggaacgacgaatattgctatagaaaaatgatattttaatttagagaccaagccattacacagcaattgccccgcctctcattcacatggcgcgttttaattgttgcgggcgcatcgaccggacgggggaacgctttttgctgggcgatatggctggaaggtgatctgaaaatgaacaattgttaaatatccttgtaaaaattagactgttcatgttgttgctgatccgcgacccggccaaagaggacgaaattcgggacataaaagtaaaagcgtatttatcgctaaatttgttaaaaccaaccgattcgttcctcagattgaacttctcggtgaaatctccatccccgaatgcattgtttatttggttttgccattcttttcccctttttcccccgtccatttttccaatttttaggataattccgtggcatttgttggctctcgtcttggcgactctcagctcatccgtctctcaaccgaacccgtagatacggaattgaattcgtttgtcaatgtcatcgacacttatccca

SEQ ID NO: 77248 - DNA, 568 bp, Heterodera glycines
atgatacattggagggcaaattgcttctttaatgtcatcgctgtcattggagatgtaatagaggccaaaatgagaaagttttactttaactctctgaattaacaatagtaatttagggcacttgtatagagtagaggtcgacaaaaacgaaaaggcacccttttgaatttcataatttttattgttttaaaaaagatttgataaaattgtttggaaaacaagttttttaaagttttctgggcataactttttgaaacataacaaaatttttgaaatttgcaggctaatagaatattcttggggctatcgagtgatatcaaggatgttaaattttggtggttctagaaaaagtaatagtgcattaaagttgtcttttatggtcgtttaaactgcaacagagcccaattttaaagttactctgatcatgaatagctatttactttggtcaaaaaatttctgcccccttttgtttttgtcaaagtctgtgattttttgccacaccaagtgcataatttaagattaattaaaagaagcgatttttgagaagagaagccaaaattcaaataaa

SEQ ID NO: 77249 - DNA, 477 bp, Heterodera glycines
atgggctcgtgccttgaaaatctgctcgattctgtcgaagtttcccggcccaccttcaaagagtcgcgtcactttctcaaaaatgtcctttattctgtgccctttgattgtctccaaattgctcccgtggacagacccgactcggcgactttactcaaaattttagaggacgaaaatcgacgaggagaaaacgaaatgactaaagatattgcgactaatcagcccattgatgaaacaattgattcgattaaaggtaatttggcgaatgtttgtctctcaattgacttaaaatgaagcccctgctcattgtcagaacaaattcgcaatgagtcggaattggccaaattcggattcaatggccaaacgatcaacgaaatgtttttcctgtggaaattgtgcgggagcagcgtggagagcattctcatccgaaacggagtcatcaaaaaccggccgccggtgctgacacttcccaggtga

SEQ ID NO: 77250 - DNA, 3320 bp, Heterodera glycines
ataatagattaaaatttgaaactcccattctgcaggatttacgattaaatacgagtccctaaatttgtcttatgaaattgcttattgtcagattagtcatcgatgatttgcaactttacgggaatgaaactgctcggaaagtcaatttgtctctgaatgtcgccgaacttccgttgagcaacctttttgaagtgccatgccattttcccatttgcctacccaattgtttagagactcaatgccattcctcgcgacgatttgcatctgagcatggaatttatgagcatttgtggccgggagggaaagtggaaagaaccctctccgaccgtagaagactcagtccaatctttggttgtcagggaaagggacattgcttaccaggtgatcagtgattggttggtttcggatggaatatttctctttaaacagatttcccccttgtttaaacgctctccttttgtttaagtttgaacggatgcgtttgtttcgtcgtctgttgtccgcctttcctttcaaatccgatttgttccgtttcgaatgtcaaaaggatattccgccggtgtatcgtggtgccatctgggccactttgttgggtgttttgcccacgtcttctgctgacgatgggtcaaatccccaggatgagttttacaacattgacacattttcggagcattccgctgatcgccaacttcaagtggacatcccacgttgtcaccaatacgacgaattggttgggaaaactcccatccgttttaacaaactttgtcttcctccacttaagatggcttctccgatggcccatcatcggatgaagttgctgatcaaggctttgctcgtctctcgccaggacgatgactttgtttattggcagggactcgactctttgtcggcgccctttctcattttgcacttcaatgatttatgtgccgtcaaaatgcccttttcccccgttgaatttgctttttccagcgaccgcttttcgttgtctcaacgctttcattgagcgttaccttcgcggctttttccttcgcgacaattcgactgtgattcgcaattatttggctgagtttatgcgcatgctcgagttcgtcgactcggagctgttcacccatctcatttcgttggactttcttcccgaactctttgcaattccgtacgttttccatgccgtttaattttcatttgctgtttttgaggtggtttttgacttgttttgcccatgttttgccacttcataaattggttggtttgctctttctccctttttttctgatttattaaatcgctcattttcagtttcatttatgggattctctgcttcttgccgattcgtattttcccctgtgtctttttttatttttaaattatttttaatttattttttagttttattggcgttgctattctcatccaactcaggtctcgtctcatttctgtcagttttaacgaggcaattttgttgttttctgacttgccaggtcaacccaatattaaaaaaaaaattatttgcttaataatttgttcatgtttagatttacccattgatgaaattgttcaaatcgctaaaattcattatgccaaatggttatcaacaagtgatgggcaaaacacgtgaaaaattataattagggctgagattatgtattttaaatcgcaaatagtgcctaaataagtgaaaaatcccttaatccccccccccccccaaataaatgctaaaatagaatcacaaacatttcaagcttttcagaataggtgcaaaagtaggtgaaaagaaagtcaaattttaaaaatctcccccagccctgagagacttcttaaaaataggtaaaacctaaaaatcttgccctaattataatcaaaatattttatagtgcataatttatatattgtattttaaatatttatgtgtatgatatttttaaaataaatgcataaatatttatacgcattgcattctccatccaatcactgacaatgattcgttgtcttttgcctcataataaatttctgattttaatatccataaaaaaaattttatcgttttttctgaaatggcaacgattctttctcatttcggcacgccatcagctgacggcgtcagcgcaaaaaaggtgacagagcggcagccaaagcaaaaaggagacggcacaaaagaaaatgggacgccgaatcactcgacaaagccatgggtggagaaatagtgggcaattagttattattgtgggacggcctggtaaatgtgctgtttaagtaggccgaaaaaagtggaggaggtggcctaccaggaggaagtggttgccgtgctgaagagatgtgtgcagggcgcggatgtggggttttggcatttgcaattttactttttaatttataataatgccgactgattattctcattcagttgccgaatttgttgttttatgggccacccggaaccgggaagacttcggcagccgtcgctttgtgtcgtcaacttttcaaaacagcacaactttacaaggacagggtgttggaattgaacgcttcggacgagcggggcattgacattgttcggcacagagtgcgtttaatttttgccaaaaggattcattttcatcgtttaatgattggcggactttcagataaaagaattttccaaagtggccatttcctctgtccgcgttggcaaagactcggtcgtcccgttgaaagtggtcattttggacgaggcggacgcgatgaccagcgctgcgcagtccgcgctccgacggacaatggaaagcgaaacgcagtcgactcgcttctttctgatctgcaattacgtcacgcgcatcatcgagccgctcacgtcgcgttgcgcgaagttccgcttcaaaccgctttcaatggccgcgcaaaaggaaaggtgtcattttgagacgggcggggggggggcgacaaatgccgactaataaatagtgacgcggacaaatattgacttgatcagaatgttggacatttgcaatgctgaaagcgtccaagctgatcaggaaacgattgaagaattggttaatttctgttgcggtgacctgagaaagtccatcactttgctacaatcgttggcctcccttggccgccaaatttctgtgagcgatgtccgagaggtggcgggcaaaatccccgacgaagaagtggctttgcttataaagacgtccgaatccaaaaataccgaaaaagtagtcccaatgccatgtttaatttcattagatcatttacaaaaacagatcctcgacaccgttcgacagattatgagaaagggttacagtgtcacgcaaatgcttatacaattggcggacgttctgttg

SEQ ID NO: 77251 - DNA, 721 bp, Heterodera glycines
attcccgaatcggccaaagctgcagtgtatttgccgggaatgaaaggccccaattggaacattaaaccgggcaccgttgttgacacccaagtacgtttaccaggcatttcttcgcaatgttttatgttttatgcaggtgactcatccggaacacagcgaattttatttggccacgcacgcggctgttcaggtgctaacaatagaaagtttaacgttcaaaatattggccatttatcacagggaaccactcgaactcctcgctattctgtgctcattgacgagtcgcatatgcccatggaccatattcaacaggcaaataatccccggggggggggggagttcaacgcattttaatttaaaaattacacattgtttccattttcagatgtgcaattcgcttgcctattgtcacaagatcatcaatacgcccacttctttgccagctccagtacattttccacgaatttaatgcattttgtttggtaaaacttttaactttttaggtttacatcgctctgatgtacgccaaacgtggccgagacatttacaaagtgaagtgagtgtgcttctgtgatcattaatgtgtccatttttgatggatcctttaagtcgcgagaccatccaagaacgaagggatgacggtcagctcgattaccaggccatctctgaacgactttgctacgcgcacacgcaactgcgcgaccaacgcgtgaacgcctag

SEQ ID NO: 77252 - DNA, 661 bp, Heterodera glycines
atgtgccgtaagcatggcatgatcatctctaaccctgctgaccaacaaatgattgacgcgaccccgggcgatgtaagtgccaaaaatgggcacatcgttgtgatcggaatatttaaaggtggaaaacacaatcgtggagtgcaaacggtaccattgcaacttcgtctttttcatcaccagcgacgcggtcaaagctctccatggtaaactttttgaaaattaaacttttgtaaaagcaattccacttttagaagtcataaaagcatgcgaacagaagtacgaaattgtcacacaggacctcaaactttcaaatgcctgtgaaatttcgcgcagaggaaaacccgaaacggttgagaatattgtggccaaatcgaatgaaaaattgggcggcattaattattcggtaagggtttacgaaattgaaggaatccatgatattttgttctttaggtccgtgtcacaaaccctgagtaagaaacgctttgtcgcatggaacaatcaattaattttcgttcctaataataaattgcatgcttttagtgtgcaacgaatgcttgaggagggcactctgttcattggccttggcgtgtcgcaccccggcgccatgggaagttacgaaagggcacgcggtgccactccgagggacccttcagtgattgga

SEQ ID NO: 77253 - DNA, 663 bp, Heterodera glycines
agaggagcacgtgatcattggcgggggtaacacttacctaatcaacgcgtccaatcacggctttgtggcggaggatgggcccgtgttgagtcagcacaacaaatatttggcaattggaattcataaaagcattcgctacgtggaggttggtgcaatttatggccaaaaattgagtgaccattccttttcatttgcaggggccacgagggcgcggaaataaaaaagtcggactgattgtcgagagtaaaaaagtcagcccaatttctgattcaagactcattataatttttgaattcgtttagactccgttccacaacatagacggcactttgcttgataaagtttcttcaattgttggccccaataacatcaaaggggacggccaagtcaggcccaatttgattggcagtttgaacgcccaactcaaaggtgcaacgaattgttcgaaagttgaatgaacccatgaatgaatgacccaagtgatgttgttcaggactgcatgtcaatgtgaattacccaaagggccgtactcgcgatgtccgactcagcggagtgtcgacggcaaccgcatcaaatcacataatcgacgtgcagggagagaaagtgccggtttcggaatatttcaagcgcaaatacgaatacgaactcgagtcagttggatga

SEQ ID NO: 77254 - DNA, 2566 bp, Heterodera glycines
atgcaaaactttatggcacggagctcgggcaaaacaataacagtgaaagtgatttgcgtgagccgttccaaatcgatcagtgcccggggacgggagttactcatggaaaggcgtcagagtgacaggtaatttagcccaaaatatgggccccgaaagttagtgtgtttactcaatttctaatttgattgttcagaatcgtcgaatgcactgccatctccgagaaggttcaagaaccgcgaaagaagctctctcttatcagataccgagaacagtttgactttggaaatgtcgtccccgtgttcatcgtcgacacggcaaaaaaagagggcactgatcagacacactttaccggggaggtcagttaaactttctttttttcactttaaaatgtaatgaaatgaatttgtttttgtttagatcaatcccgaattccgtgcaataattcaaatcactcaatcggcaaaaccggcagccaaaaaggacgggacggacactgatcagtctgaaaacaccgcccaaatgttcgactctggggaattgcgctttggccgagtgattggcgtaaataaaacgaagaagggacgcgttgtttgtctgagcttggtgagaagcgacgaatacgatttcaacgagttgaaacaaaatgtgagatacaaaaagaaaataatatgggaattaattaattacccaattttagataaatactcaaaaaaggacaaaagagagtgtaaactctgctgaagagaacgttgaagaagaagaaggaggaaagaacaacgaaaaagaggaatcagaggaagacgaaaaagagaatgaggagagaggggaaggaaatagcacaatggaaaagacggaggaagagggcagagatggagaggaggcgcaaacaaacggagagcacaaagaagtaggggcgaaaatcaaacgggaaaaaagagtggggagcgaaagtcaaactttcataaggaatgatttaaaccctttatagtcatatcatcccttggttgcacttcgttttccctctcctcaccaattccccattttaagccaaccttttgtttcggtcttccggatgagcattccctagcatctgccgaggaatatgagaagcttctcattgccgattccaacttgtcctccgcgtggattggctttgttcgcttttatctgacccacgaagggctaaaagtgtgccgaaggtacgaacgcggaagagctgttgctgaaagggccctcaagaccattacatttcagtaagtaaatgatacccttttgttaggaattcatatgacaaatttgaccagaaatgacaccgaattggccaatgtttggcatgcttatttgaatttggaagttgcattagggacggaagaatcgctgcaggaagtgttcaaaagggcgtgtgccgcgtccaattccatacaaatgcatcggtatttgattggactgttgaagaagcaaacaaacgcaaaaggaagagaagaggcaggcaaaaagaaacatcaaccaaacattaaagcatcgtttgcaggagatcagagaattatacgaatcaatgataaaaagtttcggcacctcgaacttggaccatggtttgagtacgggaggcacctttacagcaaaacgatgccgacgcatttcaaaacttgcttaagcgttctcttcaatgttcggagaagaaaagacgtaaatttagctttatattatgctcttccctttaaatttcaccggccctaaatccttaattctcactcccttttaacgaaatgatttaattacgtttattgttctattttgcaattttgccattcttagatttgactattcttatgcgatttgctcagctggaaaaaggctgtggcgacaaagaaagggcaaaaacaattgacgaactgatcaaaaatgtgaaggaaggaaagaaaagaaccgatgcttccatagtggaatgatttctatccttagataaaaaccccttttctcttttattgttgaataagatttgcatatgttaaacacgcagactattgcattttaggcctaccatcgacttttaggctttctcaattttttggtcaatgcctacattattggtgtcaaaaaaacaaagtctacagaaatatttaaactgaattccgggctaaatgccacacaaaaggccggtctcccgaagaccagattcttccgccgtgccctctaaaaaccgggctcggttcggtctttattaaagtgtactagaactttactgcaggcatatgtatgtgttcagaccagggtattttcgtgccggcccgaatttttgggttctaacttttttctttgtcgtcaaatcaaacaatcttagcatcatttgaaagccctttgcatgctctgtcagacttacaaaaaacaccaagattttctaatctgcaaaagttaataagaaacaatttcaaaaatttcgactgcaattttcatattataacttttcaggtaattgtttaatcacgaagcaatagcttaaaaacatcttctaaacatgttaagctttcgaatgataacaagatagttggatttggataacaataaa

SEQ ID NO: 77255 - DNA, 1585 bp, Heterodera glycines
  unsure (1)..(1585): unsure at all n locations
atgcaaaatttaggcagaaaatcggtgccgactgtcactgtctgtccaaacgaggtcaacagtcatttgatcccttctttgctaattgccaattccgtcttaaatggagccgttattagcactgaagagaaaggtgcgaaaaaatttgtgcctacatttagttttatttgttgttttttaggtgccgtaatcgatttgggcttttcaacaagttctgtcaatggtttcgttcatagcgatgatctcccgccccatctttcactggacaaattacatgttggccaagtggcacttttccgagtgaaagagagtccgactccgtccacccgtgtgatcaaactttccggctttaccgaaatgggctgtctcatcggcgaagaaggccaagatgttttagaattcaagcatttgactcccggttcaatcgttgaagttgagccggagaaaattgtgactgatggcctttttgtgggattaatagcggtaataatttagctcataagaatgtatctttgatacttttctcttcaggtccaaaggctttcatccgaaaggtccatttgcctcctcggctgcgctttgacaccaaccgaattgccaagaaattccgagcttgttgtgttggctgtcagccgaacacttcggtgctgatgctcactgctcacccggacattctcgcgttgtcaaagtgcgaaaaacggttgctgcctccggtaattattgcactgcttgcagaaaccagaaaatgaattggttcaggaatttcgagttggttcacggatcaatggatgtgtcttttttgtggacaaacagcgaaatgtctatttcaaattggacgatgacagtgagaagcatttactcaccgcgaaagcactccgaattcacattgacgatgtggagacgaaccgtaaactgtccatcatttatggcttcatgtttctttatgttttagtgtccaaattcgcaattggttccgtccacgaatgtcgcgtcatcggattttcaatgtctgaacgacaactgttcgtcactacgcgatcggctgacctccaacaaagcgttgtctgtgcggaagaagcacttccggggatgaaaatcagcgggcggatcaactcagtgaatgctaacggcataaaagtgacatttggacgggatatttctggatatgtgtcagcaattcacgcattggacaaccccaacaaacactggcaaaaacggtttcagaaaggtatttagggaagcttaataacgttaattttcacttggaacagctttgttttttatgacctagtaattgcattgtctattaattatttattaaatttcaggtcaaaaagtgtcgtgccgtgttttgtacctcgaccacaatttgaataaactctttttaactgcgaaacattcgctcgtcaaacaatcaaagacagagaaacaaattgttgcaatttctaacgacgtggtgggagttgtctcaacggggacagtcatcaaacatttggacggtggatcagttttggtcgctttttacgaccgaactatcggctttttaccatccaggttactacgctttacaataaatgcgttttan

SEQ ID NO: 77256 - DNA, 1222 bp, Heterodera glycines
atggttagcatcaattttggcatttttgaactattgacctttttccagaaatttcatagcaaaagtgccataaaacgaaaagtacaccccctaagaatcgatcacaacaatttcagaaaataactcctaaaaattgaccaaaaggtcaaaaaataaaccctaaacatgaaaaaattttcccaaaaattcgccttcaaaatttattttttattttcttgacaagttggcattgttcaggcgaaagacttttggaattattgtgcctaaaaacattgaatttttccaaattttaacatattttcgcacctattgcgtattttgggcgtttttatccgtggtgcgacttttggggatttgcaacttggggacccgacatttggggacccgacttttggggatcccgacatttggggacccgacatttggggatcgacatttgagcaaaaggcacttaaggaaaccacggatatttggcaacccgacatttagggacccgacatttggggattttaataaaacaaaaaaaatattagaaaatttaattttaagcccaaaattagacaaattgtgccagctttttacttgcttcgacaacgagcgaatgagctcggaatacaagttgttccaattgcaggacaaccaatcgcaatattcgattactttgggcggtattgataaaataaattgaattgtttattcattatatccaagaaactatgtgcgtggtcacgatggaagacctccactgtttcctgttcatacctggaatcaccatgatagtgttcttcaggacttggggcgcacaaataacgcccaagaagggttccatttggctttaagaatgcaatttaacagtgtgcatccgccattatcgaagtgaaaatcgcgtttaatcagcttaatattttaattatcagagttatcactgttctgaagaaagaagagcgaatcgcagccgataagctgcggcagtatgagttggacccaactcaagggataagaattcgagaacggaagaaaacataccgtgaaaatgatttggctatcagaaatttggttgaaggctttgatgccattgagaacccaaacgaagatgagattcttgctcatctcagatcgttgcaatacagacttatgcgcaatgattttgagaattgggacgacccaaatggtgattaattctgttttcacatcccgttggcacttgggaaaggcactttaa

SEQ ID NO: 77257 - DNA, 852 bp, Heterodera glycines
  unsure (1)..(852): unsure at all n locations
atggcaccggcacatccaaaggcnggtatgtcgatgtagagcgagaacgggcaactaatgaaatttaaattaattaggcaattaaaatgcaaaagtcaaaatatatgatgaattttttacgaggaacagatttttaagttttagactttttttttttgcggatagttcttgatgagagaagtacgaaatcaatctaacattttttttcaaaaatacaatcgattttttaaaaagcaaaaatcctggcgccatgatttggcggacaaccgaaataaaatcttaaaatgtgtttgatttacaattgtgtaaccgaaatggacaaataatgaggcaattttggaaaattcacacatttcttgacaggtttttccaattttttagcaactattttggcatttttcagttttttagcaactatttatgtacttatttcgctatttttagcaactaaaaatccgttccctgactattactatgtatttatggaatttaacacatttaaaaacgaataacaaatgatacggaagcgctacgtgcagccgcaaattcagtcccgcgcgattcgcttggcattcgcgcagtggacgccgaacggtaaatgccatacacgcgacgtggcattatttgatctaaaaataatcttagaagggaagaattggttgttaaataaccaaaataagatttaattattaatttaaatgattgctggcgaatgtttaaaaaagaaattaaaattaagcaaaaaattttcaacaaaaaatagaccattcaattttttcagactataaaaagaattatttaaaaaaaaaatttaaattaatataaaaatgggtaaaaatccattcaaaggaa

SEQ ID NO: 77258 - DNA, 638 bp, Heterodera glycines
  unsure (1)..(638): unsure at all n locations
ttttagatcaaataatgccacgtcgcgtgtatggcatttaccgttcggcgtccactgcgcgaatgccaagcgaatcgcgcgggactgaatttgcggctgcacgtagcgcttccgtatcatttgttattcgtttttaaatgtgttaaattccataaatacatagtaatagtcagggaacggatttttagttgctaaaaatagcgaaataagtacataaatagttgctaaaaaactgaaaaatgccaaaatagttgctaaaaaattggaaaaacctgtcaagaaatgtgtgaattttccaaaattgcctcattatttgtccatttcggttacacaattgtaaatcaaacacattttaagattttatttcggttgtccgccaaatcatggcgccaggatttttgctttttaaaaaatcgattgtatttttgaaaaaaaatgttagattgatttcgtacttctctcatcaagaactatccgcaaaaaaaaaaagtctaaaacttaaaaatctgttcctcgtaaaaaattcatcatatattttgacttttgcattttaattgcctaattaatttaaatttcattagttgcccgttctcgctctacatcgacataccngcctttggatgtgccggtgccattat

SEQ ID NO: 77259 - DNA, 1492 bp, Heterodera glycines
atgccctcctctgctggcaggcccatagccagagggggcgggggtgtgaattccgcccctccaaaattaaaaatttttccagaaaaaattaacaatttaaaaatttgtaatctattttctaatcactgtattaatattttaaaaaattttcccgttggcgcctattggcaccgccagacccctattttacttcttttggttttaaattttgaccccaaaatggcaaaaattaggccatttttggcgaaaagctgctaaaattcctgcttttggctcttagtcgctgaattttttaaaagaagaccggagaaaatttttttggcccgaatagcaaaaaaaaaaaagatccggattcaccgctccgaaattttttctgtaaaaaataatttaaatgaattacataagtctcccggtgacgcctatttgcaccgccaccggcgcgcctctaattttccttagaatgtttcttcgatttaaaaacttttcagatgattggacccctttgtgttcggcttcgtttctcatcagttcacaaaagaaggggaaaaaggatttagtggtgaatgatgagatcacgaaatgtatcccggaatgtctggtttatatgccgttaaaggtaaatgaattgggaacggcacagaaagcagcagtttggatttttatttaattcaaattgataaaagcaattttgccaattcaaaattttctccgtctgtgtctatcgacaccgacgaaccccaaaacaccagtaccccagggacggtcccatgatttagtcaaattatgttgaaaaataattactttgttttcttttttaattaaaaaagaaaaattccaaaactcacatttacctatttttgtcggcgacaacggtaattagtggtttcaccgttaccattataagtaagacccatttagcgagcaccatttattaaagaatattttaaaacatcaaatatttttaattctgcaaaatggatggaataaaaggggtgaatctgttttttttgggagggaggaacgaaatgtttactaaatgaattaattttaaatcatattttagaaatttatggacccggccaatgggtggtacgacgaggaaaaggactcggtgattttggtcaccgaattatttgtggacgaagcaaatcgggaggaggaggaaaaggtgaagtgagggagaaaaatctgatcgagaaaatgacaattatggccattatcactaaatattgttaaaatcagcttaatatggcagatgaaataatttcgttttattattttgtaatttttaaattatttttgacaattattgttctttaacttttccaatttctcgcctatgttagcccattttttgaagttgaaagcaatcacaaacaaatcgattgcttttcccttttggcttaattacccacggcaataagctcacgaattcaatttttctcgtcagtgaagaaaacaactgatatatttgccagtttagagcattaaa

SEQ ID NO: 77260 - DNA, 83 bp, Heterodera glycines
gccaaggaaaatttggtcgatgcagtgattgatgggatgaaagttcgtgtggattattcggtgacgcgcggcggtggacaata

SEQ ID NO: 77261 - DNA, 1202 bp, Heterodera glycines
atgttttttctgaattttattttcttctttttcgtgttcaatgttgaacaacatttcaccctcggcgacggatcaaatggaacacggtaattaattatgtaattaggagaatgtgacgaaaaacttgaaaaaaatcggaaattttaccaaattggatttaattaatctgaatagaaaatttattttacttgaaaaataatagaattactttttgccaaataaaatattttaagagattaattcttttaccaaatacggaaatttagcaaaaaccttcccaaaaatcaaaagtttgacaacagaaaattgtttatagcatatgagcaataaaaagttaaaaaaaataattattataaaataattatgcaaaattaaagcactgtgtcaatggaagcgactgaaaatggccccaaaacaatcaaatttaaattgttgtatagaaattgttcaaggttttcttggacctatttttttaataattatgtaattgaacaatagacacttaccaattaatgttaattaagcttttggttgtgctacaaaagtgcattgaatgccacaaatttgtcgtggaaattggcgaaacgtttccgattcgacaaaatgttgagcagcaacccaatgatcaatgacagtgatgatgatggtgatcagttttgtggacaaaatgacagaaaaatccaatttttgattaaaaatgaatcaatcactatcggaggccaacagttgttcagcaggtcaatcaattaatggcggattaaggaattgatttgaatttcttcatattccaattcaatttttaaaataatttttatgaatttttttctttaaattattttctcaaggaaaaagttccagtcccgatcgaaaatcaaggtccccccggtcccggtttttccaaaaatccccggtcccgctctactctattacaaaaaactattagtttttttaaatttttttaaatttaaaattaaaatactttaaaaaaagttttccctttcttttggccaaaacacaatttttgagaatacaattcattaatttttttttttcttttctgtggatggaggtcatttcttatgctttttatacaattttgttgtgaattttttgaaaaatttattaaatatttaaaaaaatttggatttgcaaataattgtttccttttaatttaattgaaaatttaaaaaattatcccaaaa

SEQ ID NO: 77262 - DNA, 844 bp, Heterodera glycines
atgaatatcagcaacgaattttttgaccattcaaattttggatcatttttaactgattatgccggactttggctgttgccagcggacattgcgccaaaattgggtcaaaaatccaccaaattaacttttgttgtgccggatgaatgcatattcatgccgaacagaaccattgtgccgccactaaagtgccgcacttttaactttgaagcggttacacggcatggccgtgccaagagacgaatcaatccactcgtaagatttgtgttgagggaaatattttatttattttttggcatttcattatttggcactcgctattgcgttttcattgttggcatatttctttcttgcgcttcttagactctttattttttgtaaatattttttatttctcgaaaatgattttttgggtgtttttcttaggcatttttcaatggttggcactttgatttttatttgtctatttctttggcacttttttctgccttttttcccttgggtgcatttgctattcaattttttcttcttttacatttctccatatttggcactttttgggtctttttctttggcatttgctattaattttttttcttttacatttctcggcactttttatacatttttccctcccatcatttttcagatttacaatggcactaacacggagataaagcatttgccatggactgtgtattttgagggcattaaaccttttaatgccacagcaaatattctcgagtcgtgtactgcttcgttgatttcttcacaatttgtcctgttggcagcacattgtttaaaaggcgttaacaaaattaaattgggtaaaaattgaaaaaaaaaa

SEQ ID NO: 77263 - DNA, 931 bp, Heterodera glycines
atgattgacattgaggaggaagaaccactgctagaaaagatggacaaagacggtgtaagaaaggtgccagaaaaaacgggtgcatcccaaaatctggccaccgaaatctcgccgatacaagatcaataaaaaacttcaaaaatagaaatgcaaaattctagcgattttcgaaaattatgatgaattactaattttttcaaaactttttcagaaaaatcgctagagaaatctttacaaaaaatttttcttgaaattttcttataaaaaattatcgaagattttttcttaaaattatcttacaaaaatgtttataaaattttaaatttaaaattcggcggcacggttttgttgcggcaatatttcggtcggaaaaatttcgtcccatctccgaaaaactctcttggcattttgtggaattttgaaaaattgaattttagatagaaagtcaaaagaccagccgcggcagagccaaattgccaaaagcaggacagaatggaccggtcagtatttttttttttggcattttgtaattaatttccattaaaaaatatcagtttgcaagcccacgaccaagagcaaaatcgagcgggccaaatgggccggtcagtgattgtttggcattatgaaaaatgattttttaaataggagactggtactctggtccgtaaaataactgctcctccaacacattctgatcaaacacaattatcatcacctcatcagtccaaacctcagcagctaaacaaccaatacagtaatccgaggaatgcggacagtacagtaatgcctaatgaggtaatgagcaaaaacatttttcattgaaaattcaaaaatggctaatttctgagttagtacttggctcttaatgttaaaggaatatcgttttcttcctgaacttgcctatctattattgttttgtatacatacaaaa

SEQ ID NO: 77264 - DNA, 2577 bp, Heterodera glycines
gacaatgtgatggacgcaatgatttcgctgtttgttgtgtccaccttcgagggctggcccgacctgctgtatgtggccatcaactccaacgaggagaaccgtggcccggtgcacaacgcgcgacagccggtgagtggacaattaattaattagttaattgtgggtggtcaattattagttaattaattgggtaattaggcaatgattagcaccaattaaaggtggccatcttcttcattgccttcattgtggtgattgccttcttcatgatgaacattttcgtcggttttgtcattgtcaccttccaaaatgagggcgaacgtgaatatgaaaactgcgagttggacaaaaaccagcggaaatgcatcggtagggagcaaaggaacaaaacaacaaaaaagttgtcgaataatcacaaacacattgttcaccattttgatcagaattaatcataactattctgatcattaaattatgataaaagcattctgatcaaactttttggtcaattagtcttgctcagattagcctgatcgaaccattttgatcgagtatatctctctgatcaatgaaatgtgaaaaatcactctgaccaaaccttttggtcacaaaatctatctgatcaatgaattgtgatcaagttagtcactctgattaaactttgataatctctgatcaataattcggaatttctatacccatttttccatcacagaatttgcgctcaaagcaaagccccaccgccgttacattccgcgcaaccgtttccaatacaggtggagcttttgtgccgcattttttgatgcattggcaccaattttggctaattttaaattaaatatttaaatgaaattgcttcctttgccagggtttggtggtttgtcacctcacaattctttgagtacgccattttcatcattatcagtgagttttatttttctcatttttgacaattttattttttgccgtttaagtgctgaacaccaccactttggcactgaagcattatccgcctggtgagcaaaggaatattgaaattattaaatttaattcatcaattattcaattaaatttcctcttataagaaatattaagtggggtcttattgtctggggatgtaactcagtggtagagtgctcgcttcgcatgcgagaagtccggggttcaactccctgcatctccaaaattttttttgcattttttggaaagcaattaaaactaattactctatcgttttaataaattttcaaattaaaattatgcaataaagacagatttattaattggggatgtaactcagtggtagagtgctcgcttcgcatgcgagaagtccggggttcaactccctgcatctccaaaaaatttttttgttaaaattaaatctagaacggaaatttttatttttaaatgttcatttgacccctgctgaccaagtcccgtcccgtttgagtccccacaaaattccaatcgctcattttttgtttaaattaaaaatccgtcaaattatattttgtgttgttcagaccccgaaatggacgtggtgctggacgtgctcaacttgatcttcaccggcgtgttcgccttcgaagcgctgttcaaaatcattgcgctaaatccgaaaaattatttcggcgaccgatggaattccttcgattttgtcattgtgctcggctcattcatcgacatcatttacggcaaaattggcggcaccggctcaaacattatttccatcaatttttgtcagttttaattttggaaaattgaaaaatgggggaggggagaagggacagagttgagccgactgatcagtcgcatattatcttaaaatcaaattggcaaaaatcgatgattaatttatccgatcgaattttggctgcgatcaaatttaaacgaacattccaaaaaggaaaattgtgattctgatcaaaaacaattctatttgatagagagttgagcttcaggtcagcgagagtctaaaggataagcggaatcagtgggaactgacgaaaattttcatttccaataattctgatcgaaaatgatcaatgtccccgcggtggtggcattttgggtttctaattaaaatttaagcgtgactaatctgatttaaatttccatttaattttaatggaattgatcggaaaattgtaatttcataatacaataagtctctgatcggaatgtgatcagaatccccccgtgacatttttggcatttttttaccaattaaagagtttcaattacatttttttcagtccgtctgttccgtgtgatgcgtttggtcaaactgttgagcagaggggaaggcattcgcacattgttgtggacatttatgaaatcctttcaggtgtgtccattggaatttgtccattttggcattttaaatttaaattttgaatttcaaaattgccccaggcccttccctacgtggccctgctcattgtgctgctgttcttcatttacgctgtgattggcatgcaagtgttcggcaaagtggcattggacgacgacacggaaatccatcggaacaacaatttccacacattccccgctgcggtgcttgtgctgttccggtag

SEQ ID NO: 77265 - DNA, 2999 bp, Heterodera glycines
atgcgactttggatcggtgagtatttggtaattaactaatgcaataaaaacaagcattacaattaagaggcaaatttatacattaataatttttagggccaaagccaatcgtcattttctggaagcccgaatccgcaaaggccattttggaaagtgagtgccgacaaaataaaaatggaaatttaaattcatttgcccactttaaatttatttttttttaattttggtttttaaaaaagttcaaaaatattttattaaaatattttttctcgattttctcaggcaatgctctcatctccaaaccatttgaatacagcctattgcgagattggcttggcactgggctgttgacaaggcacacaattacaatattaattaaaattaaaataaattattctttttccattaacagtacgggcgaaaaatggcagcgaagacggaaattgttgacgccggcatttcactttaaaattcttgcaaatttcattcaggtaaaaattaaattaattttatttcattttcaatgctttcgctgtctaattaatttaaattaaaaaatatttaacaaaattaggtgttcaacagacattccaatgtgttggttgaattgttggatgaatgtgccaaaaatggatacccatttgacttttaccggatgatcaaactttatgcattggacattatatgtggtgacatttttttttaaatatatttttttttatcataattggcggtaaaaattaaatagatcattttttaattaaataataataactctataaagatataaagcacacattttttattatttaatttaatttttttaaatcatttttcagaggcggcaatgggcacgcaattggacgcgcaacgaggcggcaacccaaaatatgtggaggcggtcaaaaaaatgtgcgaactttcatttctgaggtattgtattttttttaaataaccctctaatttaagctattacctaatcttttgattaatttcagaatgcgttccccgtggctttggcctgcccctgtttggtggttgtccggaaaaggaggcgaatttaagcgcaatttgaaggcaattaccgagttcacccaaggggtcagtgcctcatatttcttttaattatgtgaattaaatcggattgcataaattgtctattttaactgaaatttgaaaaagaattttatcatataattaataacaaaaaataaataaagaaatgccggcataaaactagtcactaattattaggtcattgccagccgtaagcgtgaacgagctgtgcaacaacaacaaaaacagcgaaaacaacaggaaaatgatattaaaatgcagcaaaacggcgttcaaagccatcagcaaaatgacaccaccgtaatcagtcaaaatggaaacggtattgatgtcgatgtaaaaaccggaacaaagtcggcggccgcctgcttcttggacatactgttggacttacaggcaaatattatcgtaatacatgagaatatttgctaagattctaccgtttaaaattggcttaacgcaatttattacatattgtttgttaacaaagtttatgatatgcaacagggctatagcgtatttaggaacacaacaacttcagtgacgaggacatccgcgaagaggtggagacatttatgttcgaaggtcatgacactgttgcaagcaggtggaatttcaaatatccgcagtttaatttataaatttacccaaaaacaatatgaatcaaaattccaaaaatggttaaaaaaataactgcaaaaacggcctttttttgcaccgggacttcatattcaaagaaattttcttgaatgtaaatccatacaaaagtaagctttatatctcaaaaagtttgcttcaaaaatgtcaatttcttcgattaaatcaacatttaccgtactcacattaatttaagtgttggttttaccgtattttcgcttggacaccgtccgcaactacaggaacgactgcatacagaaatggataatttgtttggggaatgtgccgaaagggacataacttatgacgatttgccacggatgcgatacacggaacaggcaaatattacaatgagaaaattgacgtaattgacaataagtgtactttgagccagtgaaggcaaacgaaaaatttgaaatttgaagacatttaacaggctagcataaaattaaacttacgaatataaatctgtttggaaaatttataggtatttctgaatttttttttaaagtttaactaattattaagaaatcaatttaaattctaaaattttcgccctttttctcaaaaattgttcatcattaagtgcgttcgtgaaacaatgcgtcttcttccttccgttcccttaattggcaggttcatttctgtatatttaagtctatttttaaataatgtttttgagttgcattttaaaaaataatttaacccaaaaattgaatattttaaaataattttgaaaaattttaatttattttccttttatttttttaatatttaagaaatattactgaaacaacagaaatttgtggcttcaaaattccggccggttgcacagcgatggtcgcccccttctccattcacagggacaaaagagtaattttttgcgagtttcaaattccctacatatttaaattcgaatagcaattacagtattcaatttacagtattaccatgcaccggatgactacgatcctgaacacttttccgaggaaaatgtcctttggcgaaacaaagagccattcgcatatttaccattttctgccgggcctcgaaattgcataggtacaaaatactaggaaatttttaacaaaaaatgaaaatttttaggacaaaaatttgctggcactgagcagaaaatttccttggcgaaaatttttcgtcgctttcgagtgatttctgtccaacacgagcttgaaagtcgcggccttcctgagcttgtgctgaagccaagtgacggcttttggatcagaattgagcggagataa

SEQ ID NO: 77266 - DNA, 680 bp, Heterodera glycines
atggcatttcttgcagaaacacgaattggaaatagccaagaaaagtcagcaactccaaatcgacaacagacaacggaagaagaagaagaacaagttgccgctgctcaacttcaacagcaatgtgccagtttcggccgatttgcttcagaacggattcagcggagggatcagtcggtgggtaaacaaaccgaaaataaatgactgacacaacgcttcaacggaagaagaatgagctacggacagtgctcgcattcttcgtcggccccgctgttctatgggcaagcgttgttaagtgaaagcgagtcggactttgcgtacgatctgagaaggacttcgacgccggctccgtgcaaatcgaaattaattgtggaaaagcctaagccagtccgcacttccgattgcttacggtggtgacaaaagtgctttagttatcggacgaccggccaaattcaaaaacaaagattcctgggcttcagccaatggttgcacccaaacagcgcaaatcacagtcgaaactgtcgagagaaacggctgctgctgctgcccaaaagaacgcagcgtcagcgaaggagaagcaacaacaacagagagtgaaagcggaagaggaggcgaagctgaaggatgaagtcgactcgtcacaagaaattgtgttgcttaaacgggaggaggaggaaatggta

SEQ ID NO: 77267 - DNA, 676 bp, Heterodera glycines
atggcgactctttcacgacaacaaaaatatggcgtgagtcattttgtttctcttaattggcttctttctttaaatgtcttggttgatttacattgttttgttgacagattttgtgagccactcaaaactatgtaaaacagccggcaaatgcttctaccctaccaaaaacattttttgttttttcaaaaaacagcggaggcagttgccccccatttttgaaaaaaaataatttttattttattttatttctaaaagtcatgaaaacatgtttccaagagtgttatgggtcgctgctcacaaatccgacacccatttcgaccaattccgaaccccgggcccgaattcgaacaaaatgttgaaaattcaaattttaaaaacgcaaaattacgccctccattttcattcactcttttgcagctgattttcctggtcggttggcttgccaacctgttcctgtgctgtttggttgcttttgtgcttgtccgtgcactgttcgctgttgctgaacctgaccattgggtgctcgtctccttttggacacacatttgcctcttcctcggcttcagcattgctttcctacttttcctgctgttcaacaattacacggacgtcatttttgccactgtttttacggagtgagttgtttcaaaattttatagttttttagttgctaaaa

SEQ ID NO: 77268 - DNA, 1394 bp, Heterodera glycines
atggcaattccccagcacaaggacctcctcttcggaggaaaaactgtcatattcagcggtgactttaaacagtcactgccggtcgtgcctcacgaaggcctaactgcacaagttacggcctgctttcaaacctctccactgttttgtcaattcacgactatgaaattgacaataaaccagaggttgggccaaggacagcaagcgtacttgcaaatgtgccgccaaatcggcctcggagagaccggagaacacttctggattcctccgcagttcctcgtactgagcagggaagagttgatagactttgtctatcccgacttccaaagactccttggaaatgacaaggaactgctcaatcgtctgatcctcgcacctcacattgacacgtgcgatgagatcaacgaaattatgatggcgaacgtgcctggtcaagtgcgcgaatatttgtcctcggacaaaccgcttgacgagcggccactggacatcgatgaaatcgagttagaagtggcagcgttgaaccgacgcacagactctgggatgcctccccaccgtctgcgactcaaggtcggaagcgtcgttgtcctccttattaacaaaagcgataaggaaggactgatcaacggcactcgcatcgttcttgaagatccgttctctcacccccccccccccctccttctccgcctagcccacccattttcaattggaaatgccgaaatttgctctctccatctcatctcttccaccccgaaactcaagattatcccattccttttaacttttaatctttcagtttttgttttcctttccccgccgaatgtccatcccacgccgtcctccgccaattgtcgccgcttttgcaattgtgccgatggcactgttcggctccgccagcagtgccacccaacaaaatcatttagactattcgtccgcttcttcgccgtgtccgtcccatcccttcgctttcgaatgccgtcactccgcctgctgtgcctcctaccaccagcggtttctgatgcttctcttctccttggccatttttgcgtttgcgcttctcgtcctaatcatttggttggccatcgaatggcgcccccggcggtggcggaggtaaaaaatcagcggaaaatgccaaaaagaaagagcaagtttattcagaagccatcgcaatgggaagcgaatgtccgaagttgaaatcagaagcagcgaagagacgcgctatttgagacgaatgtccgaattgaagtgagtgaatttggtggaaattcccaacaaaggcaaaattggcattgtaaaatgttggcaccggggtactgtatttaccatttaccgtaagcataaaaacaaaacaaattttcaatttcagtccaaacgccagaagagaaattgtggacggataa

SEQ ID NO: 77269 - DNA, 1348 bp, Heterodera glycines
gtgctcaatttctgttcctccgtctcccgttgtgccatcaattctcatccgtcgttggacgaccctttcgccgtccaattagccgtcgcccattcgcaaaagccttttgtacacattggaacggtcgcagacgccgaatttgtcggtgatcgaaaggtatacagaacgacaatttatcaaattatataaatccttttcaattcgaaaggtctcgactatcggacgtgtcgtcaaaatgtctttcagtgggcattgtttgtgttattcaacggactccggagcattttatgtgcaaaatctgcaggcaaagagtggcggagcactcaaactgttcgatggggcgaccgacggacacgcaatttgtacctttggaatggtaaagaattgaggaaatgggaggctatgaataaatgaaccatccacataaaacattattcttttcaggaagaattcgctcttagcggtgtccatgagttggtggtgttcgtcaatatgcacggcgtttcctcccggccgcccatttccgtgagtggtcggagtcgaattgtcgggctttctctgaaggagccgtttctgcatgtgttaagcgaagatggctccgtgtatattttcaggtggaaatattattataataacagaagttttaagattattttctatgatttcttcccaattcccccctctttcagtaccgtcgatgcccatttggtccaatcgctcgcttttccaaccgatgaagttcaagaggtgcggcaaaacatttgcggccgatcacctgcgccgatcacttgccaattggagaacattgacggcgttattctgatcgcatcacccggcgactcggcactgtacgaactcgtccccgtctctgtcgttgtgcaagtgaatttattgccgatggaaaatgacgaatgcttcgctaacaataaattcataacagattgaagaacaaattcaactcggaaatttggacagtgccctttctatgcttggcaaaagtgcggctttttgtttgaatgacgtggaaattgttgtccgttatttattttgtcgtatttcttttttaaatttcacttttttaaggaattaaatcatctgcgcaagaagttggcctttctcctcctccaaaatgccaatttctccgatggcattgcccttttgtcgtccattgatggcactgactgtgccctcacatttctttcattggttgtcaaccagcggccacaacttggcatggaccccgtcacacaaaatggtcaaagtcaagttccgatcgatggtacttttccggagattccattagagtttgtcaaacagtatttggaggagacaatccgccaaagagacg

SEQ ID NO: 77270 - DNA, 3418 bp, Heterodera glycines
aacggaatgaactcaaccgaatttcggcattacgggcgcaaaatggtcgattatgttgcggattatttggagaccattgaaaagcgaagggtgagaagcattttgtgtgttgcaaatgcttttttctccagttattgcatttttacaaatttaattaatttaacaggttttccccgccatcgaaccgggctatttgcgcaaattgcttcccatggatccgcccattcaaccggagaattttgaccaaattctgcaagacaccgaatcgtacattatgcccggagtaagaaaaattcataatcacgagaccgcaattgttgagagactgtaatttcgtagaataaaattttttcaaaatatatgaaaattttgggaaaacccaaaaaaatatatagtttttgaaaaataactcaataaaaatggctgcttcttttcaaattaaaagaattatttttggtctttattaaaaaaaaatctatttttgaaaaaaattcatttttttatggaaaaacattgcgctaattaatcgatgctttacttcctttaaggtgacgcattggcagcatccccgcttccacgcttatttcccagccggcaattccttcccatcaattatggctgacatgctctctgacggcatcggatgcatgggcttttcatgggtaagatccagtatggaatttcggcgtatggattgggtaatagggattggctttatcgggctcaaaaggtcggtgggtgttgaagttggccaaatcggtcggagtttggagggtttcaatttttgccttatgccatacggtaacatgaagtttggggctataatattaatttttaaaattgaaaaattaaaaaataagtaaataccctgtgatttttacatccttaaataacccaagctgtgcttaaaaatcttaaacagactgagccttgaaatgtacaaaaaattacataagtatgacattgaaacataaattgtaatgcatccagcaaaataagcatgtttaattaagtggctaattcgttaaaaaatttaagattacgaaaatttcgacacagcgaaaatatttcaagcagaatttttgatggataaaaatatatttaagaaaattactattcgccttacatttgggaggcaaaaaagatgaaaaaaaattttaaattaaaaattttgcgattttgtccaattttctgtgccccttttaaggctgcttgcccggcgctgactgaattggaaactcatatgctccaatggtttggccaaatgcttggacttcccgccttctttttgccgtattccaaaaattccatcggtggcggtgtgattcaggtgtttttggtcccgtttctcagatgccaaaattattaaaatctggcaataattaattaattatccacagacctcagcgtccgaggccattttggacgcattgttggcggcacgctttgacaaattgaagcagctcaaggaagaatcaaataaaacagagggagagctgctagacaaactgattgcctactgttctaaagaggtgtgttgtgccaaggggtgcactaattatcacgccgtcccgccccccccccccgccctgaaaatctatttgatccgaccagtccgacaaatgttttttttagagttgtacgggaccagaaattttggcaaaaacatgggacccgaactagaaaaggcttgatcaggatagagacctggatttttgaccggtaccaatgggtagtttttccaaaaaccgggaaaaaaattcaaaatattttttttccatgtttaaaaacaaaatatacccgtttgtcttaatttaaaaaaaaacaacaaaaaacaatgacaaaaatgcctaataaagtcatataaaacgacttttctgccgcattattatttttttaattttgcactaaaaatacttctttttttatatgctggatttaaaatattaaacctaaaaatacataatttaaaattaaaaaaaaatatatgtattaacaaagagaaaaataattaaaatagttttgtttatgaagcgaatttaaccaaggcgaaagcattattaaagcattttgtcatggaaacggtgtgcggagggacaagcttttacgtgtattggatttttcaaaattttgccaaaaaaatctcaaaagcggattagctttaggaaataatttttatttttccattaaggcccattcatcggtggaaaaggctgcaaagatttcgatggtcagagtgcgcctattggaaaccgactcacgccttcgcttgaggggcgaaactttgcaaaaggcactggacgtgagttggatgttaattcgggaaacgttaaggctttcacttgagttcgtatgggtttttggcgttgccatttaagcgacgccattttggtgttcaatttggacgttatctttaaaattgaagaattattttatataaatcttagaaaagctttcattttgaggaaaatgctaattttattaccctttttcaattttttttgtttgttgtcattttatgacttttatttgaataattgcatgtcccaaaatcctttctctaacggttagagtctaaccgtataaaattgtgtgataaataaattataatattttaataatttctaatgaggcaattaacgttaaaacatttgtcaacgaccatttctgctctttagaaagatcgcaaaaaaggtttaatcccgttcttcgtctcaataacacttggcacgacttcctgctgctcatttgatgtgctctcggaaattggaccggtcgccacaaaaaacaacatttggctccatgttgacgctgcatacggtaggtggtggggggaatatggtaacggagaatatgattttcaaaaattttattttaagctggttctgcgatgatatgccccgaatttcggtaggtttttttgttgttttactttgtaccatttgcagtgggcaacgatagctcattacctcaaagcaaaaaaaaaaatttatggaaaaatctgaaaggctgtattgaaaatttctgcaaatcttccaacggtgtcaaaaaggccttgcaaaattttcccaaaattcatgttttaaattagaaattaacatagcctatcggaattcccttactttatttttttcataaatcttttttttaaataaaatttttctgtctcaatttctagccccattccggtcccccatggatacggtggtggacggcacatcaccttgaatcacggcacttaatacattaattaatttagctatttaatggaaggcattgaacatgcgatgtcgttcaacacgaatccaaacaagtggggcattaaataaaaactgaatttaatagcaaaaacttatatttttttcatcatttcctcagatggatgcttatcgcctttgattgttcggccatgtggttg

SEQ ID NO: 77271 - DNA, 492 bp, Heterodera glycines
atggcgtcgcttaaatggcaacgccaaaaacccatacgaactcaagtgaaagccttaacgtttcccgaattaacatccaactcacgtccagtgccttttgcaaagtttcgcccctcaagcgaaggcgtgagtcggtttccaataggcgcactctgaccatcgaaatctttgcagccttttccaccgatgaatgggccttaatggaaaaataaaaattatttcctaaagctaatccgcttttgagatttttttggcaaaattttgaaaaatccaatacacgtaaaagcttgtccctccgcacaccgtttccatgacaaaatgctttaataatgctttcgccttggttaaattcgcttcataaacaaaactattttaattatttttctctttgttaatacatatatttttttttaattttaaattatgtatttttaggtttaatattttaaatccagcatataaaaaaagaagtatttttagtgcaaaattaaa

SEQ ID NO: 77272 - DNA, 1491 bp, Heterodera glycines
gtcctcccgctcgacgagttcgacgcgtacatggcgggcacagttcgcaacggactgctcgccttggatttgccttcgatggccgatcacgctgccgatgcgcctgcacaaatgaagaaaatgtggaaaatgttgtcggacggcgtgtggacgcacgtctcactcaatgagcacgtggacacattgcggtggcgcaaatcagagacggaaaaggcgatgatgcgacggacatgcgcagtgggaggggaggcactgaacgcgatggtccggtgagaacggacggaccgaacaccttgctgacgaaatgctttaaaattgacggaaatttcaaattaaatagttgccgttaggggtaaattattgcagagcacggctaaggattgtggggatattggagaggagaggatctcctccccattggaacgcgtatcccgggaccaccttataataaacatggcttttccatccatcggggtcagtcatcattcccatagctaacccttttcataaagtggccgataagacaagctcaaaatttcaccgccataaatctaaaaaaacttatttgttaaaaaattttcaagagaaaattatttaaatattaaatgaataatttgcattttcctgtttttctttgaaccatatatttcccatcttttagggaatgtcgtaaagcaacaaatgaatctcatgtaatgcaaaagttgcccaccaaacagtgctattcctgccaccctttcctcagattgtcggcttcctcgagttcgagtgccgtcgacgtggtgccaacttcctcgcctatccccccgtcgttgccggtggttcaaatgcgaataccatccattacattgactcgaacatggtctcatttgcagcaatgtgtgtccctttttataatgtttttgtgtgtttaaagccgatcagacccaacgattgcgtgttggtcgatgccggatgcgactttggcgggtacgtatcggacatcacgcgctgttttcccgtctctggcactttttcggccacacagaaaacactgtacgacgctctctgtcatgtgcagcaacaattgctccattttgtgcagaacactcgtccactacgactgaatgaagcaagttttgtaatatttgctgacacttggaagccaaagcccatttatctcgtaaattgagcctggattctcattctcttgattgagtctttttttatttgtccttttcgatttcgttttccttttttgtgtccatacatttcgcgctgttcattttagctttacgcgttcatgttggcaaggatggccaatgcgttgagttcgattgtgttcttcaaaagggacggactcagtgaggacgaactcatcgccgttggttggggaagggggggaggccaaaaggccacaatgaaaagaatctgtgccattccaaaggaatgtgacaaactgtgcccccatcacgtgtcccattggctcggattggatgtgcacgacacgtc

SEQ ID NO: 77273 - DNA, 1830 bp, Heterodera glycines
atgtgttctggaataccggaaggcacttatgaattgaaaattggcgctagttttctctgctcaaacaaatcgcgcccacccgaatttaacacattgcgttgtgagttgggtgaaacgcatttactttccgtttttatatgttaattataattaatgcaaggtgcaaaatcgttgatttgcccccatctccccctaaattttttgttgtaaaagttttttaaaaggtcatggcgggtttaattgataaacagctcagttttactgggtgtcttttcccaaaagccgagtcattcccgacgaaccctccctaacgtcccttttccgtccgttttctatcattcctttatttaagttgacttcaaaccagcttcaatttcctccgaggcctcggaagcgtacgtcgttcagtcgcagaatcaaaatgagaacaatttccaggtttttcaacggaattcatcccattaaatgcttttccattttctcaggtcgttgtgtttggagaggcgcagaaaaagaccattttcaaaggggcgaagaaggaaatcaaaggggacaaggagtgtttgttggtgtacaacagaaagagcaaggagttgtgcttggagagagtgtcggccaacataaatgtgaagaagacgaggtgacaaagcacgagggaaatggaccgaaattggggaaaatagcgacgatttgagtaaaatttaaaaaacgagtcacgattatacaaaagttgactccaactgggggaaagaaaaacaaaacaaaaaaaaaaataataagaattacgtttctgcgttttctcacaactatcagtgcatttttcgttttgtgatccctcttttccagaaatttaacataaatgaaaaaatgacattttcagggacaccgatttggaccaaaaggcaatcagcgaaatcgaacggctgcaaaagcgtaggaggccaaagcaatctccgccatcgccaaaggctcccgtcgaaaatgccacggcagtcgaaccgccggcggagcagcgcaaagagcgcacattttccacttcttcggcaggggacgaaattgacgaggacgacgaagagaatgtgtcggcattggaacagctaatggtgggaaaaaggcgaaggaaaagcatttttattggaattggaaaagcaaaattaagtcatttgaaagttttagaaaaagcgagttaatgcactttctaaagatgttgtttaatacgtttccaccggaaaatttctaaatctcgaaacttttcaagacaaattagaagatttctttatatatatgaaaaatttatttattttttcgataaatacaaaccttaacaattcatcatagaatttgaaaaattattaaaaagttttgttttttcttcaagaaattatatgtttaattaattttttccgtgagaaaatggcgggcgaggggaaacaaactgcttccttctaaagcaactggaaaatcattttctaaattttaaaaattgaattcgaagccgtcgttcaatgattcaaaaaaaatttttttttttttgttaaggcgccaacgaaagtcgaacgatcggaggcggaggaggacatctttcacccagcacaacaacggccaaaaatggagctgaaaacggaggaacaccaaaatcaaatggaggaaagtgccaacggaacgacggaaagggaggagaaacaatcgccacaacagaaacatccgatggcggtgaagaagacgtcgtcattcgtacggaaaagcattttggcggaagatttgcagctgagcgagagcagttcggaggatgaggaggaaggagggagggacagcgaagacacggactga

SEQ ID NO: 77274 - DNA, 257 bp, Heterodera glycines
tgcatcttcatcatttataccgtatataatttaagcatccattttggcttataacagcagcatcaattataagtgtttaagagcatcccgtgagtgcagttttatggacatttaaaaggctccggtcagtcagtgatcattctctcctccgatcagtccgtgtcttcgctgtccctccctccttcctcctcatcctccgaactgctctcgctcagctgcaaatcttccgccaaaatgcttttccgtacgaatgacga

SEQ ID NO: 77275 - DNA, 836 bp, Heterodera glycines
ccgccactttgccttttggtcagtccaaacgtcgcgctgtgctgctcgaagttcgcaaaggggcggacatggcgacgccatcagcagcagaaaatggcacggcccattgtcagtcgccgcacaaagagaaagtgatcatcggcaacagaacgacgccggacggagcggcggagggggaaaaagcaacgcaaagagcaggtgaagcagggaaatggcacaaatggggagccaaaacacggggcaacggggcaaaagggttggcccggggtaattattgaggaaatcggaacttaaccccccccccccccccctcacgtgtataattcggtggcaaataaaacacttcccccggggcattctccgttcattccttcctcccctccgtattttttggttttcccctgtcctttttggctgcctcttcccccttcccaccgttttcacatttatttccatgaactcaattccatcattcagtttacgaccagcatttcctcctgtctcaaactcagccgagcacttccggcactgtcattccgttggcgccgtccgcggacactgaacatcctccaaacatccacctcaaacagcagcaaccacattttgctgcttccgtttggcatccgtcgcatggccaagaggctgggcccggctcgccctctgtgtctgtgttcatcgccttggccaaagagggacggcgcagatggtggcactgctggcgcagcggctgcgaagagcggcggagacagcgacggcacgagggaaatggcattggcaccgctgctgctgatcagtcagtcgctgcacactttgccaaattcggcgattgcttttga

SEQ ID NO: 77276 - DNA, 358 bp, Heterodera glycines
atgaatgccaacggaaacgccgagaaaagcgtcgagaacggacagagagaaaatgaagaggaaaaagtgacggtaattgcgcagcccaatgcaattgccaacccagggactaatgggggaaagtaaaaggaattggaatccgaaaaagcgaaagtgccaaccaatggtggtcaaagttgagcacacaattgtcacagatggagcaatgcctggggaaaaagccattgtatttatttgttaaaatggtaaaagaatgaatgccttttgaccattttgagacaacgttttggcatttaacaaaaactacgcatttccattgaattttcagatttgttaattctctaaatgagtcaataaa

SEQ ID NO: 77277 - DNA, 1880 bp, Heterodera glycines
  unsure (1)..(1880): unsure at all n locations
aattttggcattttctcccaatttgtccgataaaagtgagtgttttcgccccctctcttttcagtcttccctttctgagtgaactcgtgtcgttgctcatcccagccgcaggcnnnggggggttcctcttcgtcatggccacccttttcaagacggccttcgtccgacccgggcattgttccgcgcgcctccccccgcgaagtgctcgagtgggaaaggcagtgccaagagacgggtgaattcgatggcacccaatttccccccccccccccgattttcgggttttcttttccctaattaattaattgcccatttcatttgtctcccccttttttcgattccccctttttcgggttttccttcatttattcccctctccctcctgttagatccctatttcaacgcggacgaatgggcccagccgcgcacccgcgtagtgaacatccgcggccagccggtcaagctcaagtactgcttcacctgctgcattttccgaccgcctcgctcatcgtaattttattttcaacattttattgactcatttagagaattaacaaatctgaaaattcaatggaaatgcgtagtttttgttaaatgccaaaacgttgtctcaaaatggtcaaaaggcattcattcttttaccattttaacaaataaatacaatggctttttccccaggcattgctccatctgtgacaattgtgtgctcaactttgaccaccattggttggcactttcgctttttcggattccaattccttttactttcccccattagtccctgggttggcaattgcattgggctgcgcaattaccgtcactttttcctcttcattttctctctgtccgttctcgacgcttttctcggcgtttccgttggcattcatctttatttatgtgagtgatcaattaatcaattttaatgttaattagcatataaattttcctgttttcagtaagtctcgaaaagggttctttcgtcgaagcggtgaaactttcgccggcttccattttgacaggtcaatcaatggaagggacagattcatttgtttatttgttattatttgcatttccactaataataaacaattaagccttcctccaatttaatgatggacttgcagttctatggccagttaattgaacgggttcccgtcctcattttttacttcgagttttaaattgatcttaataccgattgtgaaaatgcaaccgcaaaaatcaaatgatatgacccttttgaatccaatatttcccggactgttttggcacaatcctctccctccatccattttttgccttttctgtttattatacccccccccccccccctccttttgggggacgggacaaaatctcgccgcagaaatttcaaaaatttttttttcaaacataaatttttcaaggaaaaaattcttagaagtttttaataaggaaaaatttaaagaaaaaatttttttaagaatttttaggcaatttttttgaaatttaatgataaattactgttttttcaaaaaaaaacttctttgcaggtctgatcaacatcatctccatntggtccgtgctcggcctgtccggcttccacacttatctgatcgcacttggccaaaccaccaacngaggacatcaaagggacattcaatcgcaaattgcacccgcaggtgaagaatccgtacagcagcggaaattgcgtcaaaaatctcatcgccacactttgcgcgccggagaggccgaggtgagagagaattacaatcgcattaaactcacaattaaagttgaatttcaaaaattcactttttcctttccttttcagtttgctcgaccgtcgcggttggcttccccccgaaaatttgggcccgacaatttacgtggatggtgcc

SEQ ID NO: 77278 - DNA, 715 bp, Heterodera glycines
atgccgttggtttggcttttgcgacgggtgtttcttttcgttgccattcgccttctccgactatggagcttcttctggcacggtgatcatcagcggtttgttctttatacataattaatgctaatggtcaaatgattcgttctaattattcactaaaattaattgtctggcggcgttccaaaagtagtaaattaatgaagtgaacaaagagtgcaaatggacaaaatgtccccaacttcttttatttaatagaccatatgcaaatcaatcgcctgaagcttaattgttttgtaacatttccggaatatgtttagtgccctaattgatctgggcacggacacttgcggaccaaaaatttaaatgatcagaccaaaatttaaaattttctaaattggcacaaagattattttaaatgattgactattacgaaaaaagactttttgatccgtgaacgtaccccacaccgaatgcatcagttggatactgaatttaattaaaggctataaatatttatttttaaaattttcagaaaattgcgcagcctcaaaaaaagataatctttttcaaaaacaatgctttttagaaatctttaagaaccatgaaagcctttcaactgcgaacacatcggcggacaaaactcaacagattggaagcggagattaaaattaaaaagcgaatcggcggacaaattaacggatcattcggtgctaataaa

SEQ ID NO: 77279 - DNA, 157 bp, Heterodera glycines
ctggcattttggacccacccaccggtttggagctgtacttgctggcaatgctgttggttgcactttgctccatcctcttcactttggcattgttgtgctgctgctgttgttgctgctgtggacggcacaaaccgaagtgccgtcaatgctatcagca

SEQ ID NO: 77280 - DNA, 182 bp, Heterodera glycines
cgaagttgccaatcctgcgcttggctggctcttttttctgatcagtttcgccgcttcaccacctgcggttgtcgagaatggcacttcggcacgcatcctttcgtcaaatgccgttgcatcggcaaacaaaaacagcgtaaagccaccgccgttagatttttcgctgatcaaactgcgtaagg

SEQ ID NO: 77281 - DNA, 726 bp, Heterodera glycines
atgacaactgatacaattaacaccattctcaaccgtttcaacgacgtggcacaaagcaagaaacaggatggagtgacgctttggggcgaaccgtttaccgtgaccatgaccacagtcaaccgaaacggactgcccgagaaacgacaactgaaaggaggagcagcgcgcaaattaacacacgtccaccaccaaattcattcaattaaaaataattttatttttaaaaaacatagatacaaaactttgatggagataactactgtctattcttggcaatgcaagcaacaatgattcgtactctcggtggtctggcacgtcaacgattttatgactacatgaatggaaaccattgtttccatggaaagctgaaaactgaagctcgggaaatgatgaatgccgtcaatgcaccgccaaatctgccaaattatgatgccgaaactctatttcatttatactatttaattaaatatgtacattaggcattagtctgaatatttattgaattaaatcacaataattaatcaacaaaaacaagatttaaatatcatatgtttcactgatttaaaaaaataatacattggcaaattgtataaatcgttaaggagcttaaaaagcgaccaattgtaaagaaagtttagaaacgcaatgatttatattagggtatcgataatttgtgaaaatgggcgtcgaaaaagcaattgtttcatgataaacagaaaacatcaa

SEQ ID NO: 77282 - DNA, 560 bp, Heterodera glycines
atgagcgcattatggtcgcttgtcgggcttctgtggcagggcatcacaaaaatgcgacgttctgtggaagcatatgaagtgagtgatcgccgcaacgcgtagccccaacaaaatcgcgtccaaatttgctttttagtcgaaaatccgatggattttttgatcgagttgaaattaagtttttgtcgtggttgagtttttgtgttcgcgtagtatcaaaacgcatttaccaaccattgtgtcgcttaattgtttttgtttttaagcgcttggcctttttcaatgccttcttttatgccttctactggtgtttgtatgctgtgctctcattcaatttgctgttctattggacggacttatggacttgcgtcaacttccaagcggatcacacaatggtgccgttgaccattttggtgaattttgttttttgtcatttggttttgcgcagcattttccttcttttaggtgttcagcattgtcctgatgtgtttgtacgcgaaagagttttttctccgaaaacccgcgtggatccatcgaatcaacttacaattacgcagaaacgg

SEQ ID NO: 77283 - DNA, 193 bp, Heterodera glycines
caggttggcttttcttctacaacatccagcgcagctacggactgttcgattggcccgagaaaatcaccgccgtttttcccctgggctatgtctgattcggatgaaaaaaaacaatttttttttcatttttattgtatatggaattttccaaaatactgaaaattggctgcaaagcaaaaagggcaatgataaa

SEQ ID NO: 77284 - DNA, 342 bp, Heterodera glycines
atgaaaatatatttgctccttttactttatgcctcttcacaatttgttatttcaaactctaaaaagaatgaaatggccaaaaaaattggtcctctcaaaatggacaattcgaattccattaaaaaggttgtaaccaaaaattaaagtaaaaatggaccaattaaaaaatttattaaattataggcatttgaaggaaaggaaaagccgaatggtgtcgaagagtgtaaattgatcaaaagtttggaagatattgtgattacggaactgatcagcgaagaattggaccaatttgctgcgggaaacgagaacgacacaatttagcgacaaaaagtgcaaatttaa

SEQ ID NO: 77285 - DNA, 658 bp, Heterodera glycines
atggattggtccaacggacggtggcaagcagtatggctggttgtctccgaggagggcaaagagctaaggtgatcaatttaaaaaatttattattttaaataatcatatattaaaaaatatttcaatttcgttaaaattttctattgcacgaatacattcttaccaaaagtatagtaccgttttttacttattttttataaattttaagtaagaaattcgcaaagaaacattttaaaaaactaatctacaaattaaaatgaatatttgaattaaaaagtcttattaagattaacaaatgatttatttagcactaatggcataacaaaagaggttagggaacattaatttgcctgtgcaaattttaatgtttaaaaaatgactcatagtggtcagtttttagacgaaatgccgtcagcaaatgtcaatcatttctttaaataacacaaaattggattaagaataaacagaaattttcttaacattgcaatttttgaccattttcgaagtttattcaatgtaccataaaataataaaaagaaaatccaatgggttatttttcgaatttaatttgttattattttcagattcctgttcccaacaaattcacttatttactactactcttaccttcaaattattgtatgttaaattcaaataa

SEQ ID NO: 77286 - DNA, 1174 bp, Heterodera glycines
atgacttgggaatggtcttccaagtgcttcatcaaaatagagcctgaaccgatcacgcttaacccggttgttgttaatgcttgccaaggagaaaagaaatttgattttgaaaacattcctttgcctgtgccagaaggaatcagagaattttcgcgaattcaagtcaggttaaaaatcagataatatgatttggtcaaatttcacattgcttacagttgtcttgacgaaaatgttatacgtttccttggccaaatcaaataccttttcaaagaggggataattcttgagttggaaaatgttcatcaaattatgcctagcattttcgctgcaatttggccaatcattaaagaagacctttacgcgcttagcgttgactatcatgggcttaattttatgcgacagtgcatctccaatacagtactcacttcatgcccaaaacttcgttggattgaagcaagcaatgtttttccccagttgccggacgacgacgacagtgccgaaacagctgaaaatgcccttcgggattggcttcatctgccattatctgatcctgctaagccgaaaattcttcaatgccgtacaaacgaccaagaagagttaaaaattgaggaaacagcggacatacaaacggtcctttaatgatttttaattaatattcgtttgttcggctttaaattaaaatttaaaattcaagaaaaagttgtaaaatcaaataaatgatatttgctttttatgtacatatttttttagaaattcaacaatgccgatactcgatcttcatacattttgggccttgcaaatccattaattgagcaaaacgaacacgaaaatcttactgagattcgcaatggcattagcgaatgcatgcaatttgaactcaaggtgaatggagacgacgaccgagataattggtttttgttgtcaggccgtacacttgacaccgacaacgattggagttcgttttacgatgaagcaactagcgagctgacgaaaaaaagaaatgttgtctgcattaagattgtcaacgaacaggcatgataatggtaataattagggcttccctttttaggcaaatttgctgattttggaccttttgtgcttaatccctcattttatacctttttcaccatttttggtgactatttcatgattttcggaaaacttttaaaataca

SEQ ID NO: 77287 - DNA, 633 bp, Heterodera glycines
atgactggtctgaagttaaatgaattatacgaattgatgcaaatgacttctccgtccattcttcgggagtgtgccaatctcagaatcgtcgggtgtgacaatacttttcccgagagtccgtcctacgatggtcccggggcatcacaaaaccaggcattgtccaagtggcttcacaccccgcgcgacgatgagcgccccaaaatgctcaaatgttattatctttacaatatcgaaaggcaattggaagacttaaaaatggtattgaaatttccaaaatttaccgtatattattgggtttttaggcatttttaaatgccaaatcgcccgtcagttatgtcatctatttgaactttgatttttcgcttaatttcactctttttttattgatcctacccatttgtctattgtcccattaaatggcacccattaaacagtcattttccgtcttctccatcactctccgccacttttcaaaaagtactaccaaataaattttattttttgtataattttaagataaatatttgcgatacatatatcacaaacagaacagaataggaagatacagtatacgaagtaacgtaatttccgcgccatcagcttacaacaacgatctgaaaatggtaaaataaa

SEQ ID NO: 77288 - DNA, 696 bp, Heterodera glycines
atgatcgacagattgatcgacgaaatttcactgagcgtcgagcaatttatgacaaggtgagctggcacaaagtttatgccaaatattgtgcaatttttatttaccaaaatttttgcttccttttttctggtaaatactcgaccaatttgaaaaatattttagtagtgatgcagcatttgaagaaatgggatagatcatctaaaagttcatgctttaattagtataggaagaaaactacagcttttcccttacagcatgcttttctttttaagagtttgtgtaatttttcgagttaaaaaactgaattaatgtatttggaaccagcttaattcagtccattttaatcctttataattataatatgttgctgcaaatcctaattttttaaaaatactgtgtcaatgatacattttcccggcatccaaacacaatcagcaattttttgcacagaaaaatgcctttccatgcttcccgcacgtgccaccaccgccaaccattctcgagttccgactgatgaacgatgagcccacaagtccgagaccatgcgcggtaatgaattggagttaaatgtgccagttccatctggacactccgtcttttccaagtccaaaattccataatattttattagattgtacaatcgatcgcttagtttagcgaaagttttcagatggaaccggtctttgtaataataaa

SEQ ID NO: 77289 - DNA, 75 bp, Heterodera glycines
gtcacttcggcaacatcttcacatattttgaatgttatttagcctatctcaatttaggaagccaggacctgcagg

SEQ ID NO: 77290 - DNA, 239 bp, Heterodera glycines
atgtctgaagaagaatagtaagtcagaattatttttaaaaaaattattttacagcctaaaatggaagaaatctaatttaatttgaagattttatttccattgtcaattcttaatttattttattcaatatgtaatctaaactttgatttgcattcagcagtgaagaggaggttgaagttgaggaggatgtagaggaagtgagccaaatgagcccaacagtgaaggcaccacccgagtaa

SEQ ID NO: 77291 - DNA, 2546 bp, Heterodera glycines
  unsure (1)..(2546): unsure at all n locations
gaacacacttccgaattgcaccaattggagcggcgccgagaccagtgnagagaggagaagaacacgttggccagctccaaggtcaatcgactggcactgttcggggcgaacatgccgaagttggtcaaactgatcgaaatgaaccgggaatcatttcgaaggctgccaattggaccaattggtgagcaaaaattgataaagtcatgcgtgccaaagtctaattgtttccccattttaggcagtttcatcaaactcagagaccaaaaatgggcaaatgccgtggaatttcacatgaagaagacgctgtccgccttcatttgcgactcgtccgaagaccgcgcggcactcgacgacattttcaaacggaatggccttgacccgccagagatcattacagcagcgtatgctctcttttttttatacaaattttttaaaattttatgaattctaaacaaattacggcaggttttcggacaccaaattcgacatccgtgaccaggagccaccttccgaatatttgacgattgaacgcgtgttaactgatgacattgagccgaccgtttacaacattttagtggacttgaaatacattgaaagcacattgttggtagagaaggacgaggaagcgcggaacattatgtacccacaagtgaggagggaaagttcccgacagttttcatctccggaattttcctggaatttatgcccatgtcgttgggcacgaaaaacaaagacttcctggacaaaattgtattttatttcaattgaccaaattgattaaaatagtatgtttttttagatgtttataagcaattagtagtttttttaatttttgtttattttttaaacaaatttcaacaaaattccaggccaaattctttcagaaaatactaaggatttttgctgccttcaagaaagtgtatcttcattttttaatgtttgacatttcagcccccgccaaacgtctcgatggccatcaccatgttatgcagtcaggtgtatccggcccggggcaggcagccctaccgtttcttcgccaacaatggccaatttcgctcgcgcgcattggcacagcgctttttggcacaagacccagcagtcataacggcacaactgcggcaaattgagcatcaaattgtggacgaggaaattgtgaagaacaaagtcagttggagatagtaaaacttatcgaatttattgttttaatcgcatgaaaaataaactcgatgaattttttaaaaaattgttgaattttcagcacgagcaaaaagttcgcggagcagggcacgcgttgagcgaagtgaactcgacgatcagcgaatttgatcgccaattgaaccaattgacggagcagcgattcaaagtggaggatgagctgcagaagttggaccaactctgcttcagcggggaaatgatcgacaatttggtgtgcattttaaactaacatttttcctacaatttttaccatttattgaaattttatatgattttttatttttttcatgtatagaattctctagctttttattgctaatgatatttgtttgtgtaaactctttaattaattttcctttttagcaagggactatccgtgaaatttccaaacaacttgcacaatgtactggccaattgaacgaattgaacacaaaatatgcacaaaaaacggaggaacaaaaggaaacgaaacgacaaattgacgaagcggacaaaaaagttgcttatctgaagaacaacgtcaaccaaattgaggtcatccgatttgattattatgaagattggtctctctggagcatacatgaacaaggggtgcgccaggaccaatttttcatacgaaggcccccaattttccccggcgacgactttttttttctattcaaaccactttttttgcggcgcgtttttttccagaaaacatgtgggaggtgttggagcggtgtcgataggcgccgccggggaaatttttttgaattttctaacttgttcaaattttaacttttctcccctttcgttacgaccccccaccatggcgacccccccacccccctcctttacagccgccccccttacgacgaacgaggggggggggggggggtgnccggcgcacccccttgtttcaagttataattttcggaaattaaataccatatttaaataataatattatttctaaaattctccaatttttttagaatgacattgacagtttcgatttgcagcagaggaaaattgatgaaaaaattgaaaactgtgaaattggttcggatcagcagcaaaagaaaattgacaaattgcagaaggaaataaccaattgggagtaaggggacaaattcatcaaaatcaacaaaacccgtaaacattcactcagaaatgaaaacactgaactccaacaacacatcgcatcgatggaattggcgcctgaccaagaggagtttccgcccgatcttaccaagataccaccgacggatgaattaaagagaaatctgagggaaattgagcgcttcatcaaaacggaggagaacaagtacaataatatgataaaaatctga

SEQ ID NO: 77292 - DNA, 529 bp, Heterodera glycines
atggcaatgctttctgtccgattcgattgtcttgtggcaacgcatttaaaaacgcggaaatgggcatttaagagaatgggtatcttttatagcaaagagaacggcggcggtgctggcgaaaggtaaattaacaattttatgaataattctgcacacacaaataaaaatggtctgtcaccaaatattgctctaattttcataaattttctccgcggcaggcccctcaatgttctaataagtcatataaattattcatttttggactattaacaaggttcattcaacttttacaaactgcgcctatttgcactgccgatttctcaataaattgggttttttcaagacctggttcgaactggaccctgatcttccggatccagcaccacccggacctgactttttcaaaatacccggactatcctattttgtagtttttaaatttcattaattttaaaggaaattcagtcacttagaattggtaactccctccctccctcccacttcggcaaaaatgtttgataatttataa

SEQ ID NO: 77293 - DNA, 1505 bp, Heterodera glycines
atgggcatcacattgaaacatatgggagatgggatggataaacagaggagttggggactgttcatccacaaaattcttcctctgatcggcatccccaacatccacaagttgtacgttacttgcgggtatgttttggccaacaatgactctttgggcatctcactgatcatgattaaatagatcagtagggtggggaattagacaaaaaaaatcaagaaaatactaaaaattttttctttttctctcattttggcgtattatttcaatagtacttgaagcacaaaactcaatcgccatattttaaatacctaaaatttgcatccctagcaacaattattcccaatttttagtggcgctaaacgactgcgtggactgctcgcaagcacttcaacaacatttctgatcgattgtcccaatctccgatcaatttactatgatgggaataccactggccttgatcgtcccgttgacgccaacgcaaaagtgcgggaataatggcttctgtggccacgggcagatggccgtccgaaagtgttgtacttttggtacgatataagtgacgaatacaagcaggcaagcggcggaaaagcaaatccataaaaatgataattaatcgaaaagtaagagagggagaaagataacagagagagagagagaatgggagagcaaaagagggaggaacggggagggatataaaaagatgagagagtgggagaaaagagtgagtttgagagggagagaaaagacatgaaatagagaaaaaaaagaaggagaagagggcagataaatgagactgtgagggtgaataagtttcaaaaaatagaatttcaaattattcagttggcagaatcatttaggcattcatttccatttccaggaatttctgagtgccacaagcgcagtcaatttcatcatttgtttcacatcgttttgcattgacgaacaaccggctgaaccggacgacgtcgaactgtttcagttggacaacaaacgcaccaatgaacgactggcactagaacgaatggtgttggatcagcagagcaaagtttgcatgacgagggcgccgatcggaagagacgagcgaaagtgggcggaatggatgcgaaaagcgtgggaggaggaggaaccgagcaatttgctcatattttggataacggaagcgaacatggggccggacatttgattagacccaaattctgttccatttttgcgagtcgtttcaattcgccgcgtcaaattttggaatgtcataacgtttcttattcagttagcttaagcaagagaggcttcatttcaaagttatggagctgcacatttatatgctaattgtaagatcaaaaacgatcattcattctaaaaaagggattttggcgaaatgactcgtccgttttgctaacctctgtattctcaacttagttttacgcttcttggcattctttttcatttttaatattggcctaatttaattttgtacttaatttaacatttgtttggaaaattcatta

SEQ ID NO: 77294 - DNA, 1116 bp, Heterodera glycines
  unsure (1)..(1116): unsure at all n locations
attagataagcgcacanatgtccggcgtcaccacttgcctgcgctttcncggccaactaaacgccgacctgcgcaaattggcagtgaatatggtccctttcccgcgtcttcactttttcatgcccggcttcgccccgctcacttcgcggagtgagtgccaaactccgtcggccattagcaaagcccgcctttttcagattctcagcagttccgcgccctctctgtcgccgacctaacccaacaaattttcgatgccaaaaatatgatggccgcctgtgacccgcggcacggccgttatttgacagcggcagtcatttttagagggcgaatgagcatgaaagtgcgccaaggagctgaaaatgggcagaaaaagcaatggacaattgatatttgtatttgttaaggatgtcgacgaggaaatgttggctgttcaaaagcgcaacaaatcctttttcgtcgaatggattccccacaatgtgaagacggccgtctgcgacattcccccgaggggtcttcgaatgtctgccactttcatcggcaattcaacagccattcaggagctttttaaaagggtcactgagcagtttaacggtaaagggacatacaattggcagatgaaatttttcaaaaaacttatttgttgcagtaattcatgaattagggttgggccggtgccggtcacgcgtaggttgggtcgggcatttttttgggaaaaaaccagacttagccaggttcagattatgccgttttgggaggacaaatataagccggtttccggcacctagtgggagcgaaatcataaatctatttttggttcaaaatttacaaattttccccggccgcgtttgtcgcgccgtcaaactttcaattctccgaagttttttaaagtaaattccaaagtattatgttagaaagtgactttcgaaattttccaagagagaatttgctttttgattacaggtttaaaatatttgttttaatttatgcattaatttttggttaaataattaattgaaatatccgccggttgaacccggcaataattgtccaaccaatcaaatgcttcttctcctctccattagcaatgttccgccgaaaggcttttctccattggta

SEQ ID NO: 77295 - DNA, 1436 bp, Heterodera glycines
atgcaaaacaaacagagaaagcttttgcggaagagagtgcgagagaacaaaggaaaagaggaagagtttatggaaattgaaaatcagccgaagagaagaagaaaagggaacaagtgagaggatagtaaggaaaaagagaggagagagagcaagagagagagagagagagagagaaaaggagcaaaaaaggaaaagaaggattagagaaaaaagaaagaaaataaattggaagcagaaaaagggataaaaggaagtgaaaaaaagaaaaaaggaaaaagtaaagcatagagaaaaagggaatgaaaagaaaattggaagagaaaaagagacaaaagaaagtagaaaaaggaagaaagaaactgaactccgttcctttttcttttccttttcccaattgtaatttctttgtctttatttcctttttctccatttttctttcttttattgccaaatcactgaatatttctcacgcttttgaaaattcgaaaaaggaaggaaaatgaaaacaatgggaataattaattaattaagaattcgctaaaaccgcttcagattgcgagtgaaggaccttttgcatgcggtgggtcgaaagtgcggcattgacccttcagagatcgacaaaatcgacttggagaacattgtgcaaaggcaaattgcactgaacgtgggtcgctgctctctttgcctttggcctttccctttcttttggcatttccattcactttttgcttttccttagattttggctttttctttggcttttcttttcacccctcctcaaactctcaggaaggcagagagcctccccccgacacaaatgatgatccgccgccgccgaaggagccgaggccaccatcgcccgaggaacaaaagccgctgttgcagcagcggttgccgcttcccccgaagaagccgccacatccgagtccgcctccaatggcactggcggaccaacgcttcttcggaggaccgccggaggagcggacatttccgttggacgaatcgcaccacaaaagagaaaaacaattggtggacaatgcaataaaaaagtgaattaaaggagaattgttaagaatttggaattgtgcaaattcattgccattgacatggacgaattgccaaatgccgtagaagttctgcctgaagagcaggcattgagctggacggatccgcccaaagtgaatgtccgtccccagcaaaacctggtggagccgaaccccgacattgcctcccccgcccaattggtggcgcaaacaccgccccaagtgatagtagacgacacgacccatcgaatgatcgacttggaacccaagaagttcaaagaaaagaaggagaagtacggaaggaatccgaagaagttgtacgagacgtatcaggaggaatgggacagattggagaagctgtccgacaaaaagctgggcccgcggaggaaatcg

SEQ ID NO: 77296 - DNA, 813 bp, Heterodera glycines
atgcgtgagattgtgcatatccaaaccgggcaatgtggcaatcagatcggtgccaaagtcgcattccccgtcaggccaacaaatttgctgtgtctcgtttagttttgggaagtcatctccgacgagcatggcatttccccggatggcttttaccggggcgactcggacttgcaattggagcgtgtcaatgtttattataaggaagcagctgagttcaaatttgtcccacggttcgcagaaaaccggcgcttctttcgcaatttctcgcattaagtgccgttttggcggacctcgagccggtcacaatggacgccgttctgtttcccattatttggtggttttaactgtatttttggcaaattaggttcggaatggtccttacggcaatttgtttcgtcctgacaatttcatccatggccaaagtggggcggggaacaattgggcacgcggacattacacagagggcggggaactttcggatgcgattttggatgtaattcgcaaggaggcggaggattgtgaatgtcttcaggtaattgatggatgacagatgtcaacccatcccatcctttgagggctttcaaatgactcattcgttggggggcggcaccgggtcggggctcggcacgcttttgttgagcaaacttcgcgaggagtacccggacaggtgggcgatgccttccgagctgaataccaaggcgacaatccctgcagaataatcagcacttattccgtggtcccatcgccaaaagtttcggacactgtcgtggaaataggtgaaaacccgagctaaggccaaggaatgtttctcaa

SEQ ID NO: 77297 - DNA, 2605 bp, Heterodera glycines; identical to SEQ ID NO: 2007

SEQ ID NO: 77298 - DNA, 2605 bp, Heterodera glycines
aaacaaatcttttgtatttaccatttaaggcattccgatgacaatgatcgtaagataagcagttaaaacatttccgacattccttctgctgatcacagatcattgctaacattggccaatttctcaatcaatttgctggcgccacgcgaaaaaatgtaaataaacaaaataataaatcatagtttttgtgtttgcaaatttgcactttttatgatcgccttttcttcactcgccgcccccccccccttttttctccaacagatcgaagcgtttcgcgagcgacggcgccgttcgcgcgtttcgctcaacggcgaagaaatcggcgattcgtccattgaggtgatcgatggcgtcgtcttttgccactgaactgcttgaggtgatgtccgtcggccttttggtcgcctttctgctttacgtgtgcttcggtgccgtccttttgccccttttgaacggaaaggtcattttgccattttagtcaatgctttatccttcttaatggattttcccttttgtttcagttcgatttttacaatggcatttacttcaatttcctttgtctgactgccatcgactttggccaattggttccgtcccggtcagtccctccccccccccccccccccccctctccccaatttctgtctcttccctttccgttgggctttccttccaattacgtttctttacgtttgcatcggattggccatcaccacaatcgcaattgacattggttctgaatacatgaagaaattgcatcatttcggaaagaagatgaaaaatgtagccagcacaaaaatttggttcggtggaaagacgtaagttaaacggaatatttataaatgataatggaaaagaaaagggacaaattgaaaaatgaatgaatggcaagtgaaattaatggttaataagcgatgagagtggggaaggagcttagcaagcccattttcgaagcacgaaatttttcagaaaaccttgtaaatttagtgggtggtaaattaaaacacttgtaacaaaaaacatgatcatggcatattcaataaaagggaatgcgagagatatatgtaaccacttgcaataaacagtgaattttacttgaaatccaaaaaattgtaaatcttagtgctttcactttttgagtcaatttataaaactcaagggattttaggggctccgggggtgccgataagtgccgccgaaaaaaggcaatttgggtcttgtttcttaaaagatttaatcaaaaattgccaattttgtggctttttggatatattttaacgaagctcttgttccgaagcccaaaaatgcgaatattccaaagtttcgctcacaaatcagggttaacagtgcgtccccccttgtggaaaagtgccccccccctcttttcaatcgccgctcatcggtgtgccactcgtccgcctcctccgctgcttccgatgccattgcccaattgcgtctgtttctgctgttggctgcttatcgatgaatgccgtccgcctgccgaatgttcgatagtctgcggcgatgtgtacgttttgcattggacacattgccaagtcacttccgcgcagttcgactgcgttttgcacctgccaaatgcgcgggtataaacagagctaatagaaagttcggaataccgcgaacagaggtgaactgccacgggttgtagtggccaattcgggccgccctgctgttggaccaactgagcgaagcggtccatctgcgctcatttcggtgtcttataaagggacattctcttcgcttaccatctccgattttgcgcgcaccgacaaacattcgtctgaacggaagggacggaaggaaggctttttccctcaaaaggccaagtcactgacacgtctgctgctgactcatctccacaatgttctccgccctgtgcaccatcagcaaacattgggccaacaactgctgaagtcggcaccggtccagcagagagagacgcacaaacacactgagctgagtgtgcgggctgagcagaagggaggcgcacttccgcagcagaccgtgggactccaatttgcaggcggccattagcacgggggcgatattacattctgagaagaaattgggatgagatgagaaaagggccgggcgacgtcaaccagccacctgtgatgcgcagctgtggcggataaatggccatcagaaagtacttcagttcttcgctggaacacggacagtaaatcaaatcgtcgtcatttggcactccgtcgctggaaatgccattgcatagtctctcctgaaagagagaggaccaagcggccacgtaatctgaggggaaggctttaagctaagcattgtccacaacggacccacatgggttcacatggtacgctcgccccgtcttcgccttcaccgtggcaaaattgaggtcgcttgcactcagcagatgctccatgtccacggggggctctggcaattccttaagcctaacaaataaataatttacgcaaatcgaatggacgacctccggggccggtgacccgtgcatgcgttccaacacagcactttgactctgtccgacagtccagtgtatcggggccagaaaggtcccaatttgtggacacttggacgcaattctctg

SEQ ID NO: 77299 - DNA, 1098 bp, Heterodera glycines
atgggaggcaaaacaaaagtcgaaacaatggacgaaattcgaaattggcacacaaaacggtgagtgataatccgaaccaaagaaaaaggacacttttggagggataattataataatattacagactaattaggcatgtgacaaatataattgcaaaaccaggtcgaaccaaccatactttattcgctttctcactatatttaaaaatgattgttgtatgattattgcatcatcaattaattgcattttaattggtttggtcctcctcaattagcgaatttagtgcctctcttagatccataattacaaattctcataatttcggactattcggcatgtccatcgatgccctcgtccatggcctgtcgggtttctaaatcctgcgcttttggccgactcatttacccatttgctcgcctcttggcgggtgtcaattctcgacccttttgttcaattgccaccaacaaatgtttggaggcacaaacacaacttctccgatttgcgggtgccctttgcgttaagtgcgttcgctttgtccgtccgtttgcctttcgcgcgccgcaacccccggggggaaattttgttgaatttgttacgcccttttacggatggatgaggccaaaaaggaagagagaaaaaaggcgtgggacagagagaagaaacacccacgcgaaacgaaacggtggaaaaattaaaaatattttgaatttccgcgaaaattggcaaaacaattaaagacaaaaacaaaaacattttgtacaggggaagaaggaaacggttaggggtcaactccatctcagcaaagttcaaaaggctataacttttttctttgtcgaccaaacttaacaaacattggtaacattcgaaaattttaaattttagaagatatttctgctatctcgaagtgattaaggagctcagaaaaaaagttgtcgcttgaaagaattttcgtaagtttttcatctctatctttttttagttcgactttctctggaattattagtaggctaatagagactgtgaagagctttcgaatgattcaaaaattgttgtattgcgtcaacaacttaaaaagttaaatggaaatggaaaaataaa

SEQ ID NO: 77300 - DNA, 419 bp, Heterodera glycines
atggcctgctgtctaagcgaggaggcacgagaacagaagcgcattaaccaggagattgagaggcaactccaacgcgacaagcggaatgcacgaagagagctcaaactgcttttgcttggttagcattttgtttttccatttctgaaaagccacacaaaatgtcgtcgtagtgaattacaattgttgttttttaggtactggagaatccgggaaatccaccttcatcaagcagatgcgcatcatccacggcagtggttactccctggaggacaagcggcagcacatccgacttgtctaccaaaacgtgttcatggcaatgtgaggcgcttcaattataatgagcgttgactcgaaaggatttaacaaatagtttttttataatggaaattgcatgaatcccttcaaataccaaattgtaa

SEQ ID NO: 77301 - DNA, 546 bp, Heterodera glycines
  unsure (1)..(546): unsure at all n locations
atggaattggatatcttttgtagtttatttgcatgtgaacacttgtgtgacattcctgtggtaaaaaatgaaagcctagagtaagttttattttttatggattttagtattcttaaaaaaattattaatatagatatattaaaaaatgaattgattaattcagatcaattggccttttataccaggaatataacgaaatgcccaatttccgagttttgattttggctcggaattccgcttttctattggcgaaattttctagcgcccgtcaaaattccgattgccgaaatttttgagggcatcggcatacaaccctgttttatactacaaaatttcggtccttcctaccgggtgcaccccaaaaatctcgccgccggaatctcgccgccggaatctcgccggccggaatctcgccgagacaaaatatcgccgccgaaatctcgccgggcgaaatctcgccgcagaaatttcagaaaaaaaatttcaaacctcagccnnnccccaaggaaaaaaatccttagaaaaatttgtttaaaaaaaattgta

SEQ ID NO: 77302 - DNA, 1749 bp, Heterodera glycines
gagtgcgaatggcaattccgttatcatcgatggaactgctcaacaccacaagagctgaaggaacacattggtccaatacataagaaaggtgaatttgttaaaatttaataattaaaataaaatgtccgcgttcataatttcaataaatttaattttaatttcaaaattttataaaattaatgaacttattatgcccacttaaaggaactcgtgaagcggctttcacatatgcaattctttctgccggtgtcacacatgaaattggacgccgttgtcgtcttggctttctgcgaagttgtggctgttcagaaagtgataatgcgccaaatcgcgtgggcttttaacaaaaattgcacctaatcaaaatcattgcatttgataattattattctggttttaaatttatattttggcagatttaatcgaaaaactggcaaatatctaataaactcttgtgggacagaaaatttgggtactcttgaaattgggtgtgtccaaaagtgtttgactataaacgcaatcgaaaaatttcaaagaatttgcaaaaaaaaaaaatttttttttttgaattttaattttatccaattattttaattaatttaatatatttctctgtgagtgtaattttaatgagcaaataatgaattttatcattgggaaaatgtgatttggcactcatgatgatgatgaagatggatattctatgtttttccacattcagcaacaaagccgtggtgttaatgaggattggacttggagtggctgtggcgataacatcgattatggctaccgattctcgcggtgagcagctgattgtgagacaattactgagtcgggattttcgcccaaactcagaaagctctcaatgaaattctggaaaatatcttccttattatcattaggacttgtcgaatattagcaaaaaccggggattttagagaaaagtataactgaaaattctgcttttgaaaatcccaaaaatcccgggttggcgctcacaatcagcaattgtcaaaactgggattttttgccgtgctgtttgttgcccgccgccgttttccttcaaaataatttgtacggctgggagtggaaaaaatttcgccctgtttttgatatttttattttttcctgaattttttgagttttttttcgaaattcctactcaataccgaaatctcgattccgggctcaagagacaatacaatgacaaattaaatttaatgaagagcaatttaagcgatttcattgatgtacgtgaaaaggaggagagcaataagcgatccgcggaatggcatggacgatcgttgatgaaccgatggaacaacgaagttggcaggaaggtaataatgcaatgagaatgatgaaaaaatttcaaagaatttatgcacttggttaaagttgtaaataattcacattttccagattttaaaaattcataaatcaaaaattttggtcaagaaaaaaataaatttagtagaaaatttttaaaaatctttccattcttagtcgggatgtgatttttgatttttagcatttttgtgatgaacgaaaaatgcgaaaaatatttatgtaaataaaaaatcgaaatatatttttttaactttcagatagtaaagcgacatgcaaagccaaagtgcaaatgccatggagtgaggtcaactacaaaaaaatttgaatgccatcataaatgcatgcttttttcagcggctcatgcaatttaaagacatgttggatgcaattggtgtgtaa

SEQ ID NO: 77303 - DNA, 1913 bp, Heterodera glycines
atgccaaaacgtgcgaccgaaaattggcaattggggacaattgctaaagaatgtatgggggcggataaatatggaatggaaaaaagtagtgcaaaaattctcagaattaattgcctaaacctgaaattgaaggtaaaaagggaaagaaaggcgaatttttcaggacaaacgcaaacggacgccgggatttgttggacttcggtttgcagtcaaaaagatgccgagcatgaactctgcacggctttgaaattgggcgaattggaccctgttcttggacagtctggcccaggcgccatgatcgtacagtcgccgcttcaagctcttttggccgtttttctgcttcgctccggcacagtcacttcaaacaccgcagcccgaacattcgtcgaaatgatcattaaaagtggaccacaaatggaaatggccacttattcagagaagcgaggggattatgttggcaccgggaaattcccacaggaaaatgaccaagtcaaagcgctcgaaaaatgcttcgaaatgtgcttcgttgcacgtgccgctttaagcgcaactggctacaaaccgcttgcgatggcaccaccaattggtttagagttgctggcgggggctgatcaggaagggtggaaagaagtcttcgatcagagcgcatggtttttggaacgtgcccgtgccaaaatcatccacaaaaccgagtcatttgtgtcccacgaacgtgtttttgttggggactcatctgcacgccacctccagggcttcttcgaccgatcactttacattggacccaacgaaggcccagttgctgatgtgatcaggactttcaaacctgttgtgatctccagtcgcgtgaaggtcatggttgtgtttgtggggagagattctttagctgcaggcgaaaccccggaggccatcattgaacaatgcaaacttttggccgaattgtgcaaacgtttcccggttcaagtgctgtggagctgcccgccctacattcacaaaaaacagcgagaattcgaaacgctggtggcacaaatgcaggggctcataaatgatccccctcagattctgccgatctgcacgacaccgaatggccgctcggcattggaaatttttcgattcggcgatcatttcaatacgcacatggtggaagaagacggaaaattgaaaaaatgcgggctgtcgggcacttaaggcttggataatgactcagaccccattcccaggcgataacgaaatgcacattcgctcgctgccttcggccgtcattattccatcgggagatcgggccgatcaccgatcggaacagctggaattagggcattcttcgagagatcgggccgattctcgtagaattgttcctaatcgttcggctgatcgtccggccatccgttaccgtccttatgagactaatcgccagggacagtacggtaacgaacgccgtcgggaattccgtcccaatcgccgctgagacacctgttggaccccacctttcggtttctgacttctaaaggcagggacgccttttctgattgttgagggatgttgtagaattttaattataatgactcattagtgttaattaaatttggcataatgtcttgtttcgcgttttttctcatttaaaatggtattctttgtttttttttttcttccatctttcattccaattttattatctggtaatttttatttttttgtgccgtccaatctcttttgactttaaaattgatattcgtcaaattgtttctcatcggtatttgtcttttggaattaaagtgtttggatttgacagtggcctactctgtgtttggtataattgcgtccctgtcttaagtcagtagcaaaagtacaatttggcgctcccgaggaaacaggtacaaaagcggcgatttttaaagagtttgagggtgagatcggga

SEQ ID NO: 77304 - DNA, 979 bp, Heterodera glycines
atggacattaggaaatattcaaattcaaagcaaaattggagaaaatggcaccaaggaaatggaaattgtcaattccgatggaaaaccattgccaattccgcaaattcaaatgccacgcaaagtcaccggattcaaatgcatccagatcctgtaaaagcaaaaaatttggcagcattttcccatttatgtatttttagttttatcgaccaaaatgccatcgcttttctccaccgttttcgccaacttttcgcctcaaattgtccaattaatttggccatccatacgaacaatgttcgtattttgttgttcattttgcgcaacatttggccaatgatcgggaataacatttgtgggataggattgttcacgaatattttctatcgtttgcgaaaattggtcccgtcaattctcaacgattgtccatcgcttcgcgttgtctcctcctattttgacgaattcttcaccgattttccatgcgatgacagtgccatggcatcgaatggacaagcggtggcaaaatggctttttactccgcttcaaaacaatgtgccaaaggtgttgagatgttggttgcacattgatgatggaaatttggcttcgaatattgaagccttaaaagcggtgcttcgaattgacttattagtacttttttttaatcaattttttaatattttaggctttttcctcggcttcatctcctgccaatttcattgttgtcattccctttccgccgtcttttgctgattccattgtgccatttgatctgaccaacgaatttactcgtgaacaatttgcattgaaaaggattaagaaaagcaatcgttttctgctgatccgttgcccaattgtgcgagatgaaagcaaatggacaaaatgggaggatgaagcggacgattggcgaattcgtgatcagtgcaatcaaattaacattcgaattaataatgagcgtgaaatcggcgacgggtcagccaataaataa

SEQ ID NO: 77305 - DNA, 600 bp, Heterodera glycines
atgattacccaacaacagcagcaaaaccaagaagttcaagcagtacaacaagaacagcaaattttgatgggaaacgagatgaagatggacaacagcaaaaatggagaaacaagggaagaggagggaaatagcattggggaaggaggagagacggaagagaaagagaggaaaaggaaaaattcggcgcaaaaaggaggagagaatgaagctgaaaagagaaaagaacagcagcaaatcggcacttaatgttgccggtgctaattgctaattttgtgtgtcgtaaatcccgcgtcaaaatcccgaaaattaattgccacaattttcaaggagaaattcatacattcgatagatagcaagccatttttatacaatgttggagttttttttgcacttaaacccatttttgaaacttattaggaccgtgaaatggggtccacttcgtttcggcgccagctcgtttttccactaaacgttttttctgagtcatctaaatccaacattgttgatatcattcgaaagcttaacaaaaattttgaagttttttcttaatacattttttccaggcttgaaaattttgttgctttttgtaaggctaataaa

SEQ ID NO: 77306 - DNA, 2413 bp, Heterodera glycines
atggtaatcaaagttgaagtccttggcgaaaggacgaaagcaatgcttgacggaggtgcccaaatttcggtaatcgatgcagcatttttgtataagctgatgaaaaacaaaaatttgaacccaaatgatttgcgagttgccaaatcggagacacgaatttctgatgctaatgggaatccattagcctgtctaggtgttgtatgccttccgattttgagaaatgattgcactaaggaagtgcaagttgctttgcatatcgctcaggcaccaattgggtttgatctgttgtttggaacgaatgctttgagttctttgggttttaaactttttgatgacacaacgaacacaaaaatcaattttgaggaagtccagctacgcaagtcggactctctgactgtcatataccagacaattttggccccaaaatcaactcaaatagttgaattgggcattaaggaagagtttgaaggcaaagacctttttctctggtctgaaggccaccaaaattttcgaattgagccaacagttggaattggaaaggacgggaaagtcattgttctgatgacaaattttacgagtctgtcaatcaaattggaaccagggaattccatcgggaaaaatgaagtcgtgaatcatgtcgaagaatgcgaaaatttcctttcagcttcgaacgaatgcttcagaattaattgtgttgcaactgatgaccagaatgtgtcaatcgacaaaattttgattgaaattctggaaaaagggacatttccagattcggaaaaacaaaatctgttggaattgctttcgcaattcaagaatattttcgctgtttccgattcgcagttaacccaaacaacccttgttcagcatgaaattgagacaggaattgcagcaccagtgagatcgaaaatgagaccagtgccttacgcatatagagaaaaattggccgaaatgttgaaagattatttggaacgggatttaattcgtccttcatattccccatgggccagcccaatcgttatcgtaccaaagcgcgatgggtcactccgtttttgtgttgattaccgtgccgtaaattcggtgacacgaaaagatagtttcccatttccaaacatagacaatactcttttgttactgggaggcaaaaaattttttacaacgcttgattttatgtcaggctattggcaaattcggatgaaacctgaatcaattgaaaaaacggcgttcgtaactgaatttgggctccacgagtttgtggtaatgccattcggtttatcgaacgcagtggccacttttcagcgctttatgaatcgactttttgaaggaatgatcaataaatttctatttgtttatatcgatgatgtgttaattgcttccgaatcacttgagaaccatctcgaacacttgaaatgcgtttttgaacgtatacaaaaagcaggcttaaaactgaaactctcgaagtgccgtttttgtgtcgaagaattgccgtttttaggtcatacattgactagaaatggaattaaaatgaacgaagaaaaaatacaacctgtaaaaaatttaccagttccgaaaactaaaaaggaattgcagtcattattaggcttcttcacttattatcggaagtttatttactcatttgggaccattgcagcaccactttttcgtttgctcaagaaggagacaaatttgaaattggcgaattagaaaagagtgcaattgataaattgaaagaaaaaattttaagtgatgttgtactgtattttccaaattttgaggcagcgaaaaatgacccaatgaggaatttcattataatgacggacgcaagtaaaatcggtatttcggcaattctcagtcagcaggatgaaaaaggaagaatccgtccaatctattttgcctccaggcaatgtaacaaatttgagagccgttatgcaccaactgagctggaagcattggcaattcgatttggcgtcaaaaaatttgctcaatttgtaacaatgattcctacaagagtcataacagaccataaatcactgatcggaatgtttaagagtaaaaaggaaaccggaaatgctcgagttgacaaatggatccttgaattaaactcaaaattcattttgaaagttgaataccaaccagggaaaaagaatgtgattgcggatgttttgtcaagaacatttgagacaaaagagcgtgaaatgttaaaatttgctgctccagaagatgttgcattgattggaatgttgaaaattgcaggacaagaaacggagttaactgttgatgagaaaacggaatggactcgcgaaacaaaagaaagcgaaatgaaatttgtttatgattttttgagtcagagaattattcctgaagaccctcggcaacaaaaaagtctaattggacttgggatgagcgactttcatatgct

SEQ ID NO: 77307 - DNA, 202 bp, Heterodera glycines
atggcattgtctttttcacagatcatcatgtacgccattatgcagaaaagcgtgcgggaaggcgaagagcttcacctgaccaactgtgccctctccgtgcgcttttttccgcccctttaaaaatgaaaaatttccatgccatttaattccgtattttttttttcaggagattgtcttcgctggcgccggaatgatttgctgg

SEQ ID NO: 77308 - DNA, 529 bp, Heterodera glycines
agaccggtcaatacttcggctggctcggggtcagttcagttctgtgtggtggtcactgatcagtgatgcttcccgttttgttgatctctcattgcctttcaaggcgtgtgccggcatcatcgtctgcctcttcatgggcgtggtgagtagtaaaatggtgcccagatttggtgtttaactgatctgatctggttcattcggaccgcaccaaaataataagtgatcggaatgggaaagcgagcagtcaatgctaatcagaaaatcgatttaaatgtgctttttcaatcaataaattcaatttttaagttggccgtttttgcgctggacattctcacgaacaaaattttgtcgccaacccgaaagtatcgctacagtacgccgcaaatgtgagagggggaatacgatgcaacgcgaacaaccatctccagctacagtacacacacataccaaataccaatacaaatttctcatttaccatttgctttttgtctcctgccaacttttgagtgtaagcaaaataaagagaatc

SEQ ID NO: 77309 - DNA, 1000 bp, Heterodera glycines
ctgtccttttgcagaaagtggccatcccgctgaccagcagcagcaatttggccaatccgattgtgcacaggtgggatcgaggggggaggggttaacgggcaaagaaaatttggactctcggatttatcccgattcggtcgagctggttttgccatatgttatcggagaaaatgccattttatctttaaatgtccccgagttccggaattaactgtttcatatcccggagataaaaacggaaaagcggcttggaataagaaaacgatgatgagctttttcgatatttgtccttgcttctcggcctagttgagaaaatcgtatgaaaaagcaattgattaaaatcgaaaatttaatggctaaatatattttttggcatttcagttggccgcaggggacgaagaaaggatgttgttgtgccagctgtacgagagttcggcactgctcgcccaactgggcattctggtcaacgaaggcattggccgattggccgtcagccaaggcgagtcgttcaatgatttgttttttggggatctaatttggcaaatttacaggaatgggcaaatttgttgtagcggaagcaggccgagagaagaggaaacacgaggtgagtgatgatgagctgataagtgatcagaattgggggattcagtgacaagaaaatgccatgttggatagagtgatcggaaattgccagattagctaaagtgattgcaactgatcaataattgcttagaaaaagtgggtccaatgattacaaaaaaacagaatagttcaagcaatcaaggatgatgataaatgtttaaaaaggagggaatatagtgaccgaaactgattagacttgcttacctaactagtcgagtcctgatcggtgattgattgggccatgcaactaagatccacaggagcttgtctgatcatggcagatcgatcataccaatccacatttcagtatctccgttttggaaagcggaaacacgagtatctgaggttcggcagaaag

SEQ ID NO: 77310 - DNA, 925 bp, Heterodera glycines
atggcaatggtttctttgcttgttggcatttattataatgtgattgtggcctggtcactcatctacatttttactgttagattcatttttaaagcatcatattttacttgcatttttaattagttaattagttcatttatttttttaattgctgaaataatatttaataaaagaattattttaatatttttttaaacaacttttattttgtttatttagattattactggtaaccatcacgatatatcatcatgcaacagcactttcaatacgatttgtgagttatgcatcggaaaatttataagtcaaatccctaggaaaattcgttcaaattataattttggattattttctaccatttattccttcaaaaaaattttaattcgtaaccaattgataattaaagaacctacaagaaaaattttaaaaaaatggtatgcgattttttaatttgaatgaatatttcatcaaatttgcttttttaatttaaaaatttttgagatttattgaaaactttgtactatctataagctcatttaattttaattactttgtctaattacttttttttttttattccatttttgattttttaatttataaatttttgtcaattttattaaaatatgcgacattcatatatatgtttatttaaaatttgtttaattaccttttactctaattactgattttgtttattccattgtttatttattttccttaatttaaagattgtgcttcttcgctggaagatgctcgttgtgctcatcaactgaatgccactggggcatttttcttcaacaaatcatgccatttgttgactgatcggctggcagcaacgctcagaaatgaaacatacaataagctgccagctgttagtccggcagaggaattttttgagtgcctatttaacataataaactaa

SEQ ID NO: 77311 - DNA, 2668 bp, Heterodera glycines
gaattatgtattggaaaaagcgccaacaatggacagttttggtggacttaatttgaaaatggtgattgccttgggctttgcttggctaatcactgttcttgtgctgatcagaggggtcgaagtgatgggaaaggtggcaaattataaatattatatttaaattttatttccaaaatcttttttaaatataatgactgttagcacatttttcattaatttttttatatttttataattgtcaaacgcaaaaaaaacatgagcttattttgacagattgcatggctaactggcacaaccccatacataattattgtcattctcttcatacggtaccaattaaaataatacattaactagttgaataaaaaaaatcaattaattcattaatgtttttagtgccgttacattggatggcgcaaaaattggattagacttttatttgcttaaaccggatgtcagtgcgatctttttggcaaaggttggcaccctttttaatattaaaatatattgaaataaaaaagatttcgattcagttgtcccgttaaatataaggaaaaagtcctgagacgtttttgaggcctcttattaaatttaaatacaaatcctttacactgggaaaattttccgggtttccggttaaatccaagaaaatgcgtccttgaaaattttatggcctacagttacgcattatatatacagtgtaacttgatatatttggtcgcctcctgttaggcctaggtgcatgtccttgaaaattaatcaggcccatcgccagaaaaaaatttcggagggtgaatccgaacgaagacctattttttcttcgggtcaaaattttgtaaccagcgtaattcaaaatttttagcggctgccgtgcaaaaaatcagatccatgaattatggccttcagttacgtccttgaaaattttatgtcctttatttcctctctgttaattgtccatgggagtttttagagcctccaattcaattctccaaacactcttgtccattaagacatggcgtacagctgcaacccaagtgtgctacagtttagcggttggcatgggtggactgctttcactatccagcttcaacacctttcacaacgattgcttcaaggacgcgttcatcatcacggcagccgacgcaatttcaagcatttttggtggcactgctgtgttcaggtatggaataaaaagtgccgagatttaaatgtgatgcaaaagcccttcttaaatatgtgcaaatcataaaaaaatgccaaaatatttaagttgctaaaatgaggacaaaaaagaaaacaagttgaacaaaacaggccatgctccaaaatttctcctacttataattacaaaaccacaaaaaaaaatttttttttttatttttaaataatttttaaatcaaatatttgtcaattgagcggagaaaatatgtttttcgtgcctctctcgtaaaaggttatctgcaaacatataaatccacaggcccacattcgcccctgtttctctctttaactctctgcccataattgggcaaataacttttttcattttctataaataaattctattacttttctaaaacaatttaaaaacaaatcataaacaaaaatgtgcataaaaagaaatataaaaatttttcttattcttatgtaaacaattttttgggaaatattattgataaaaaaaaaatttttaaaaatgttaccattaaatttaataattctaacagcacactcggcttcatggccaagcagttgaacgtgtccattgaagctgtggtgcagagtggcaccgggttggcattcattgcttacccggaggcaatgagccgaatgccgggctggacatggctttggcaactgttgttctttctgatgatttttatccttggcgttgcgtcccattttgggttggctgaagtgtgtgtttgttcatctgttcctttaaaaaaaactttatttgccacaaatggggtttcccctgtgaaaattatttttgatttttgaaaatagtccattttatgcgaaaaataggtactaattagggagtttgctactataccctcggggagagaaaattcgggatccgggtggaattacccagcaaaatttgtcctgaaatggctagaaaaattgtaaaaaaaaacatctaaagacaatgcaaaaaacaagcacaaactcctaaaaataattttgtctctaaaaatatctcatgttttttaggtctcgattggcactatttccttaaccataacaattcaaaataatatatgattaaaaaatgaaaaggctcctcctataagataaatgaataagaaatttataaaaattacaatttttttagtataatttagcaattaatttaaattaaattactttttgtacacattcttaaaaacatttaggtaatgtgtactgcattgtatgatcagtttccagccttacgacgttataaaagtggtcttgtgatcggagtttgtctttcatgttatttggcaggcttaacaatttgctcaagagtaatttaaattttttaattaattatatttaatttcaatttaaattgatcaggcgggcattttttattttaacattttcgacgattatgccgcgtctttctcaatgatgcttcttgtttttcttgaactcattttagtagcgcatatttacg

SEQ ID NO: 77312 - DNA, 1286 bp, Heterodera glycines
ggtggaataattataaagctgacatccaggcaatgttaggcactccaaggaatttgttgtccaaattctatgggccatccgggctgtgcatcaaatacatttacagttatattgctcctatccttttgattgtgagtgacaattttattcatttttatatatatttatatttaattatacaaataaatttttggtttattaatcaatttaaattttttagatttattttatcctttatgttcattgaatatttttgattctatttaatttagccaaaataaaaataagcatgatatatttagcattatttatacaaaaaaaagaagaagattgtttatgtgttaaaaagatcaaatttaaattatttaaaatttcatattttttttttcaattattaataattttttatttaaatataggtcgttttggtttttgcatttatgcaacaagtatttacaactcgggtcacctacgggcgcgacaaacgactttacgtgttcccggcttggtccatcgttttcgggtggtttttgtcgctgatctcgtggatatttttgccgggtctaattgtggcaaacactgtcaaatttatacgtcagggaaaggtccgaaaatcaaatttattaaaatgataattgaaaatcatttctaatatataatttttcgtgacctattttttttaaattaggcatagggtgtatttttgaaaaaaaaattttcagcaattcttaggtgtttattttttgttattgcattaattttgggcaaaatgccaaaataggtttttcaaaaaattaaaaacctaaaaaataggcactaataaacttgaaaagtagcataataaccacctaaaaaaaattttcgtgggtttcagaccaattgaacttcggaaaaaaatagaaaaaaaacacctaaaaatcgtacacattgttatcaaacatcaatttgactttttcggttttttcattaactataaatttaaaaaaaaaattcatttaaaaaatattattaatttcagccacttaatgagttgctaaagatgcagcctaaatggccttcctatgagcgtgtcacacgaggtgtgggcaagtctaagacttcaaatattatgagtgccaacagaaaccaaccaccacttaacataacaatgaatgaatttgcgaatggatcgtcttaaaaaaagaaattataaaaataattaaattgttataattaatgtaatttaaaatttaatttttttttattttaaaagaaagcaacacattttcttgtatcttcttgagtga

SEQ ID NO: 77313 - DNA, 1004 bp, Heterodera glycines
atgtacagctgtggcgctgaatatgccgcagcactgcaaaaactgaacaaattaatcatggtaattaaaaaataatttgacaacttttgaaaatgccatttttcaaataccgaaaacattctaatctgtgaatattcattataattaggagacatacaaagaatattcggagtgtaagaaactgcttgaacaagttgaggacggaagacacaaatcactcgcaaatttggccgctgagttgggcatgttcgaccaacttgttgattgattgaattttggacaaaaaatgcttaaagtttgttgtaacgaaattgttcaatttattcaatatcttaccaatacgctgacgattgtaaaaaataattgataaatttaatcattttgaaaagccactttttgaactccgaaaatattcaaatccgtgaaccttcaaaatatttaggagacctcaaattttaccgctgagttggccgtgttcgacccaacttgtgaactaaatcttgacataaatatttcgttagtttgttgtaaaaaattaaataaaacctgaaattaaaaaatatttgccagtatagaacgcgcttgattggcggtactgaatttgcccttctttactattttttgaaactgaaatttgttgtttaacattacaacaatgacccactggaattcgtagaaaggaatggcatggtaaaagtttaagtgcaacaggatcaagcaatatccgccactttattggtcgccaaaaccgacctttttgcctatttacgtgtaatcgctcatagaatgcctgaataaattaatttgttcaaacatatttttaggaaatattctgtttatatgccaaaaaaattatttttcaaaattttagtttattgtcggaccgttcacttttatcggattgtcctcactgttggattgtccaactgtcggattgtccgtgagcctcgaaagcgtgctgagccgaatctaattctttttatgcctaacttttttggaactta

SEQ ID NO: 77314 - DNA, 577 bp, Heterodera glycines
atgtccacaacaatttttaaaatatttctccaggatatccccgacaatgtcttcccagaccgccttttgaaactgaaccatcatttgctgctgctggggcgtcatcatgccggaattgccgctgccgggctggttaagcatcatttgctgctgggacgtcatcatgccgtaattgccgctgccaggctggttaagcatcatttgctggtgtgtctgttgtatttgctgttgtaaaaaaccccttttttggctggtgaaaagtaagcataacaaaattttatcttttttttgttgcaaaaaagcagttttctttaattttattaggaaatttttcagcacgaaaattcaaaattcgttgttttaacttcggctaaaaatacatatgaccaaaatttccatttttcatggtcatcgcctttcggcaccaccgaagggccctttccctttttccaacattaaatgaatttcaatggacccgagtaggtcagcagaaattcttgaaatgccgcctccgcatgacctttgcacattacgctcatttttgggatcaattaattattatggtcgtttcattaaa

SEQ ID NO: 77315 - DNA, 188 bp, Heterodera glycines
atgccaactatccttgcaaatgctgcagcaaccgcaaatgatgccgcaacatcaaatcatacagccacagcaaacgacgccgcaacaaggacaaattacaccagcattggtctgtctgtttgtttgttatatgcagcagggaccggatttttagggttttcacatattctttttgaggatagcatatg

SEQ ID NO: 77316 - DNA, 618 bp, Heterodera glycines
  unsure (1)..(618): unsure at all n locations
atggaatcagcgggcgaaacaattctgtccgtgccaccgttactccatctgttggctatccaacagcagcaaaaacagaagcagcagcagaacaacgggtgggtgattgatcagtgatcagtgaatgtttaaaaataattatttaaaaatatgatataaattgcagaaataatgccgacacgaacaatgccacgaacgaaatgactttgtcttcatcggatggcaatgtaaattaatcagaaaagtgtcaacaaatctgtaacagccatttttggacactaaattccttttttaattgccctaatttttatttgattttttcgttaaaattatttctatagattgacttcaaaaatgattgtaaaagcacttttgnggtctgaaatntaatcgaaacgtgacccattgaaatataaaatgtagtaataaatcaaatattttcaactttgttagttctgtattgctgaacagcaaatgcaaatcggcaccaatggcagcgaaagtgccgaagagagcggcgcatcggacggggaaaacggaagtggagaaaagcggagggaagaggaggatgaaaagcagcaggggaaggtgagcatgggaagaagcatcaccaaataa

SEQ ID NO: 77317 - DNA, 2471 bp, Heterodera glycines
cttgaaattgtcgaagagtccgctactcctcctccgctgtttcgacaacaaacactgcaattcgctgaagagatgatggacgtgaaaatcgaatcgccgcgaggtaaaatttgaaaaaaaaaaattcaaaattacggtttttaatttaattttagatttgcacattcaaatccctccgttaaatgcattcaatgggtacggcactccgtcgatggctcagagtgccgcatccactcctaccgaacaacagtgtgagggacagggagatggggggggggcggaggtattagtggttaattaatggtccgtcagttttgggaccactggttcgatccttaattttaaatgatcataaatttcagctaacaaaccgttgccggtgatcaagcccccgggggatgagaaggaggaacggccctcactgagctacaaggacctgatcatcgaggccatcgaaagcagtcccgaacgacgcctcaaactcagcgaaatttatcaggtcgagtaaattaataaaattattatatttcaataactttttggatttcctttgcaggtgatcaaatatctccacccgtactaccaacgtcggtccgatcaatggggctggcagaactcaatccggcataatctgagccttcacgactgtttcgtgaagcttccgctgaagcagaccagcgcaaacggagttgtcggtaataattaagcatttcaactaatttcgtgatttttaaagcgggaaaaatatttacaggacacttttggacggtggtcactcgtgggccggacgagaagccattgggtccaactcggcgtcgaacccgcggcagcggaaaggccaaaaagggaacgatggcctcgatgccattcaatgggtcacaaaatggtgaaaaaacaaataaatttaacacaataaataatattttcaaacaattttcaggcggaactgcttcaaatacgctttctggcatcaaacacggcacaatcaaagggctgaagggccgccaaagtgttaggtgaggaggcctcatattcattgtcagccacaaaatgcttaaaatacgaatataaatacagctccgacagtggcatcatgagcgacgagggcggcgcgtgcagtcactccaactcgccaaccgaaatgggcacgcgcagtgtgccattgctgcacgcgaacgccgaggcggtggcaccggcacgcgctgcacagttttcggcaaatgttaatcaccaacaaattatgccaaataatcaatccttttaatctttgcagcttttccaattccctcgacccaccgctcaaatgccgacacttgcgcagcaccaccaccaggtccaagcagttcattcgcccgccccaacccccgcgggccatggccacgcgcagagtcagctgagtccgctcgaattggtcctccaaatgcagcaccaacacaaccagcaacaacaactccagcaacagcaacaacaactccagcaacagcaacaacaaaaccttcatccgttcgcttctctccagcaattttccccaattcccaaatcggattctgttgccgcaggcgttgctgacgaagtgaacagcgcaccggctgctgcttcaacaccgacactgatcatggtgagggagggatgaaaagggaagggaaggtaattttatttaatgtttagccgaacgatgccatcggtggtgccgccgccaataacaacgcttttttaccttgcgaattgcaacaactattggcaattgcggcacttactcagcaacatcaccaaccgcaacagcaacaacccatggttccggtgtctgcggccaacggcaccaacaccaacaacaacagcaacaacaatttgccatcatttcactcactgccaccgccagcggcgccggatcataatacgatgacggtataaattaatatagaaaatgagttaaaaattattaaatcaatttttaatatataaaatgaataaaattattaaaatgattcagttgcttcaactgctcaacacggctggcacaagcagtggcacgccaccatcggatggaggacttggccttctgagcaatttggccacccaattggcaccagcggtcagtccggcgccaccacaggtgatcagcaaagacatgatttttagcaaaaaactacaaaaaccttaaattaaaatcaaattaattgaaagaaaatgtttagcatccgaacaacgtcgccgtcggcaacaatttgttggcatcggccgccgctgccgcaacggcggaattgcaacgtttgcacatgatacaattgtacgcacaacagcaacaacaacaggtggaaagcttagaaaaagcatttaaaggagtgaaactgattatgaaaaataaatcaaaataataataataataataataaaaatttcagcttcagcaacaattggccgctttgttggagcagcaacagcagcagcagcagttgcattttcagcaacgg

SEQ ID NO: 77318 - DNA, 2789 bp, Heterodera glycines
atgctttgtgtactcagtgtgccatttgtgtacaattacatccaacaagcccattccgtcgttcaaaacgaggccgactattgtaaggtaaatgccagtgccatgggggggggggtgattagggggagatcataaaacggaggatgatcacattcttgatcatgtccagctcctatttccacattccgtccgtgatacttggaacaatacccctctcccccctctctccccaattttagcatcggtcgacttatctgtggcgcgaattgtccaggacgtctcagcacagcaattccatcacggcgaccattaagcacagaacgggcagagaagccaattacgaaacgcagtcgacaagtgctgtcggacagaaatgtgagaaaaggaaaaagacgggcctacgaagtggcgtttttgcatttggcaggtggttgcgcatacggagcacccggatcacccggggaagatggcaaagacggaaaggcaagaagatgaagatggatggcactttgttaaagggaaagcgaacacggaacattttcaggacggcatcgatgggattccgggagacaatggcccaccgggggaagatgcgaaaggcgaggcgaggccaagggaattctgcttcgaatgcccaccaggcaagtcaagaacaaaccttgtccaattgatcacccaattgtacaattaaggccccattggaccccgaggagcgccaggcccaaaaggaaagccaggagagccgggcacgccggggttggacgcggatgggggcatacgaggagcaccaggcccacctggacctcaaggacccccggtctgatatataatttagatccaaatgcactgtcatttgcagggaaggccgggaatgcctggcccaaagggagtgccgggagcacaaggcactttgtcagaccagccgggtccgcctgggccgccgggaaagccggggccaaagggcctatcgggcgagaaaggagcgccgggaatagccggaaagaacggagtgcccgggccgaaaggaccgccgggcgaacccggacaagtcgggccgccaggcaaagttggaacacgtaagttggccaagggttgtgccgcaaggaaaagaatcgcttgttcagccgggaagcagggaatgcagggggagcacggaatgccgggcgggtgtgcgcactgtccgaatccgagaacggcgccgggctattagcggcaaagaatggcacaaagccaaaagcgcatcgcgattggcccaaacattcgcctatttattcccaattgatcaatctcaccacgaagatgaatgtttcgatagcgaattgttcttcatttcgtccaataaatggtcgccctttcgctaattgctaattcccccgttaattaccccccccccccccaaatgcgtcgctatttaaaattttattttaccctccaatgcaaagtgtgcctttgcttgctcagctgctcgccactcactttccccttcaaataccgtccctttcgttttcctcgtgccatttccatttgcttttcatcccatttttaccttttctatgctttttccctcttttctgctactttttctgcccaccgtttttgctcccggcccaagtcgagaaaataaattgttcatcgaatgtgccgtccgcgcgccaaaaggtcgccatgggccggagacagtcgtttcgcatgccaaaatggagaacaatcggatgattctttttgtttgttaattgttggctttgagtcttttaaattccaaattttgagggattgggagggaatttgtacacgggagacagcgaactgagcgaattgtgcaaagaggacaaggaattcgcagcgacgtcgagaatgacaccccaaatcagagaaggggcacccgtggagcaatgcaaaaacggcaaattgacagtgaatggcaaagattgtacgaaaagaggggggggggggggtaattatgtaaaaatgagtaaacaatttgaaaatttatatatttaagagggaccatttaattattattttctaaatgaaaaagggaagtgtttcgaaaataaaataaatattcccatcagtttaaagcattggaagaaaagcatttttggtgggaggagaaaataattagttaatttaagtggatttaacaagcaaaaagcaaatggattacgagcagtgcttcgccgggaattacgaactgtgcgtttctgattttgctttttcttttgccttttcaatgaattaattaatttgtcagtttcgaatgccctgaagatgcttgcgatggcaaaagtgcgctgcttttggtcaacaaaaagcacgaaccaaaagcaaagtcttactcatttgtttatgtgggcaaaatgttagtgaacgaagtgacggtggcggaagtgagcgcggaacaattggaatgtgtgaggagagagtgcgcggaagagtcagtccccgtggtggaggaagcgatccgatggcggaggaaggcaaaagacgagcgcaaagagctcgcgcagggcaaggacaagttcaaggtgttcaaggaatgcgcagtgaagcggcgaaggattggcaaagacggaaaagcgatgggaggaaaggcacgcatcgaaacactggtggcacatgtgaagatggacaaactcgtgcttttcttcgtcagtttgccgaaagtgacggagaaaggaattggcgaccatttgaattttagggaatgggcggcaatttgtacgcgggcgaaagcattttgtcaggcgaatgcgaggaggacaaactgttcacgagaagcaaagtga

SEQ ID NO: 77319 - DNA, 2567 bp, Heterodera glycines
atggcgagcaacggcagcggcgccatcaacaattaccataatcgcaaccagcaagcgccgctacaatacgcatacggtagtcggcggcgaccgtctccgtccttttacacaccgctcgccggtctcgctgctgctggcggcgccgccgccgcaccacggtcgccccgctcgttcggtggcggcggaggcgaccgtagtggtattgtcatgcagcaactaccgcagcatcgcctaccgtacaccaacaacaattacaggaggggcggttcaatgcgaacattttgtgctgttgcgccgggcgctgattgttgtgagccaggcgatgcttctgctggagtcgccggtgactatgctgttcagcgtcgacagcgagtacggcgcatttttgtgggcttgttaggtagtacggtagccaattgggcattacggtagaaaactgagaagctgttcatatcagcagtagtgtgctggtacggtatcgcatcgtactattttatggttacagtagttcacgcaatagtaaaaaattgcattactgtctcaaatttcgagggatacggtagcgcaaaaaaaacgaaaaaaattccacatcaacaggtctccttttctccacccgccgcctctgtcctctcgaattgctcgccgtcgtccatctcgcagcatcaccaaaacgcacttgcgctgctgcggggcacggacggtcgccgctcggctggcccagcggtcgccgccggcgaccccagcggcaacagcaacagtcgccagcagatggcgtcgctgatcaattttggcccaatcgtccaaaacaataatcatcatcaccacatcacatcgctgatcagctttgacccaaagtcgaacacgctgatccgtgtgcgcgagcatcggcgaccgtcctcctcctcctcgtcgttagaggaggcgaccggcgaccgttacccaccgacgcaaccggcagcgaccagcgctgcgactggcgactgtagcgagtccgtgccgtcgtcgcccgccaccgagttgtcgcccagcagctgtcctactgttggccgttttgagctgctccagcagcccgtttctgctgctggaaatgaccatatgaaagggcgagttcatgcgccgccgcttgtcaacaatggcatgtactcaaactcggcaccaccgacaagtgagtacagctgcttgttgttggtacgcgcgaacaaatcagtccccggaaaagtgccggatttcaatggaaaatttccaaaaattttattttggttgaatttttaaaaaatataaaaattagtttttatgcttttcatttttagtttatgatagtaaaattaattttttttttttttttgcaatttcgtaaaatttttggtacttttccgttttggggccacacatttaaattttaaaaaaataacataaataaagagcgggatgaatattcaaatacagccctttagctatttgagagtcataaaggcaaccatttgggccaaaagatcattgaatgggtccatatgacgattttttcagtcctcaggccaaaggaatttgcaccgatttgaatctgtggccccaaaacggaaaagtaccaaatttttattcggttacagcaattaattcttatacgaaatttattttttttaatttgctattcaaggaattgccaatgtgccatcgtccgatggtcggggtcagcagaaacagtattattacgattacggtggtttggacaacagcagcaacagttacggtggaaatgggcaaattggacccaataataacaacaaccaaaacaacaacaataattgtattgatggtcatgaaaatggtagaacaatgccaaacaacacgaacggtaagttgagatggttacggtagagcagtacggtagcaatttgggaccgaaactgtgggtggtcatggtggtactgtaacgaattgaacaacctcattggtagcctaaagctttgcgaattgatttaacaggtacggtgttcatttggtaatatttttgcaatttctcatttgcaacatgatagttaccgtataaattggtgggttacggttactttttccttaataagtaactaatgaaacacggtagaatacgataggacaaaaattgctgttagggcgagaaaccggtatcacacggtagcgcaattttaatgcgatacggtaacatacggtacaaacaactccttccacaactccactcatttccctgctattgcagcaaacgtccccagcagcgccggtgtgtccatgtacgaagcgtacgtcggcacggctgtgccattggactccccgcgcaccgctttcccggcactgatcgacggatctccgcggcagcggcaacaacagcagccatcggcgaccgctcgccgatcgctgctgtttgactgttcagcggcatcggcgattcgtctgtcgtcgcacagcgtcgacaatggcacatcggtgatcgacgccgtcgccacgactggcggcgattgtggcgaccggtcgcagacggcgactgcagcgacaacggcatttcggcccagagttggcacaaccaatgaaacaat

SEQ ID NO: 77320 - DNA, 591 bp, Heterodera glycines
atgttgttttacatcggtgtcactgatatggtcagtcccatcattggcataacaaccaaagcacaaatgccaatcatttcagttggtcatgctgatgaatggcctcgagacgggtgagaagagacggttcttttcggttttgtgacccccctgaaattttcaaataaaaagtcatttctagggtaatttggggcgctgatcacgaatatgacatttatttttcaaaattccgaatcccgaacccgaattcgaacaaaaattctaaattcataaattacaaggaaaacatatttctaggggttttagaggtcgctgaaaacgattatgacatgcattttggccaaattcgaaactcgaaccctgacttgaacaaaaaaccgagatttaatttactaaaaaatttaaaaggtaaaatatccatcataggtcccagactcaaaattgcataaaaatacttttataggttttcttaggtgctgaaaacgcctaaacaatcaaaaaactgtttcgagtagtgatcagaaaagatcatcaaattttaatgcttattggttaaaatttaattttctggtccggattttaaagaataaa

SEQ ID NO: 77321 - DNA, 1249 bp, Heterodera glycines
atgtcgtgtttcgggattcgggtggcaaccatgataggtattggatttattcttaaaacagaggtgcgtccttatcttataaatagaattatctatccgacatactaatagtgctattgattttaaaaactttactcagacaattattaaaaattactataatctaaaaatattaaaaaaatagtaaaataaaatctctaaagcatcaccaaaatatgcgcaaaccattcagattcaagcgccaatcttgtcatgaatatagaataattaaaagttaaatatgaaagagatgtaatactatattaaaaagaatgcaatttataatttaccgtttcataaataagataaaattcaaaatggaaaaaagaactttaaaattggactcttataatgaaggtagaacatcgattaatcttgagcaatattattaatttacaaaaataattttttaaatttaacaaaatatttaatctttattaaaatgtcaataaaacaaacgaagtatgaaatcttagaattagtggggaaaacaattcttttttatgtttacgaacaaaagttgaaactttgaatttacatattttaacatattttggattttttcaaaaaataatcatttcaaaaattttatttatatattttaatacatattagggagtttagttttggtcattcaaatttgaaagtaagggacttcaatggaaaaacaatcgatatggttggagagattgtacttccaataatgcgagatggaatgcgtcctgttctgataacacttcaagttgcttcgtctgattttgatttgatttgatcatcgagaccaatgctttgaatcagttggggataaagttttttgatgaagtgaatcaaaaattggtgacatttgaagcagcagatactgaaaactaaaaggaaactggttagagtggtgtataatgtgaaaattcaaccgcgttcatcggcgttaattgaagttgcagtaaacgacgagattgacgaacaagcgatattgattaaagtggcatcagaagtgtcggaacataaaattgaaccgacattaataacgcctaaatttggaaaagcaaccataccggtcacaaatttttcaccgcttccaattgttcttgccgagaatgatcaaattggaacgggagttatattggagaagcaaatcacaggagaaacattccttaaattgggattgtttgaatcattcagttgctgttatctccattcagtttttaaatga

SEQ ID NO: 77322 - DNA, 2599 bp, Heterodera glycines
  unsure (1)..(2599): unsure at all n locations
atgttcgtattacgattcctcgctttaatgttcaaaaggggcgaagaaacaattgcttcactcgagaagcacagaaaggaaattcgccaaatttccaagtctggggaattcaaggcggaagacttctcactcgcagagcgagttcttatccgcctagaccagatggatgacgctgaagaattccagcaccttaaaacagtgattggagacgacggaattctccgtctgaaaaccagactggagatgagtgagaagccatacagcttctctcatcccattcttctcgccatacattccgctttggcaaagctgatcattttggatcgggaccaaaaaaggcatcaccttggagtggacaccactctgacagaattcttgagtgaattctggatgccaagtgcccgtttaaatgttaaacggactcttcgggactgtctccattgtcgccgaatgaatgcacaacagtttgcattaccaaccatgccacccttgccgggtgagcgagtgcgccgacacgctccatttcagtcgattggaattgactttctcgggccaacgacaaatttcgttgggncggagaaaaaatnaaaggcatggatcctcatcataacatgcctcgcaacgcgcgctgtctaccttgaggcaacattggacctcacatcggaatcattcatcaatgttctccgtcgattcataagtcgacggggaaaacccgacatcatttggagcgacaacgctacgaccttcaaactcgctcagaaaaccctggagcttctcagtgctccggggccggatcaggaagtacaaaacttcctgacccataaccgaatccagtggcgattcatttcccaaataagtccttgggcaggaggcttttacgagcgcctcgtgaagctagtcaaggactgcttcaagcgaactttgggtcgaaggattctttccttcgaccaactcaacacattcgcggccgaagtggaggccaccctcaattacagaccgattaccgcggtctcagacgcagtggatggaccagttccactgcgtcccatcaatctcttacaaccagagattcatatcaattaagaaacaacaacggacccaattgattcagaggaaatgttttcctccacacacgaacgtttaacttcccgaatacaagcactccgggaagccaacgacattttctgggccaaatggcactctgagtatttaacattactcagagaaagagcccagtaggaccacaaaggcccacgacaccaaaacttcggtgaaccgaagaaaggggatggtggtcctaatctctcaggacctcgttcctcgcaatcaatggccaatgggacgaatcgttgaaacacacggacggcctggagccatccgaagtgttaaagttgaaatccctgtccgagggaccaacaacaagaaaccaaaggacatgccacgaaagacagtccttactcgtccagtgaaccgcatcttccctttggaagcgggtcctgaaatgacggacccaggaactgaagccgttgccgcaaccgaacagccaaatgaaaaccatcccaagctcgctcgagtgccgggacaccaaacggtcaccagaagaaaagccaaactcactcggaaatcgcttccagtggtggctatcgaccctcctcgacacttcgcccttccatttgcaagtggtttcccaatcgggaaatgtgatgagtgtggcctcacttgttacacgaaaggaatcgtcgtaacagtgccacccgaaatccaaaagttcgaaatatgctgtgcagaaagctgcatagttcggcaaggcatcaaagccttgaacttcgaactaccaatcgaagtcctactcaacaatcatcactgtgaggccagattttggactgactcacagcacaccttcacatcaaacacgacccgcccggcagtcgatgaatgtgatctcatcgactgctacttttgtttcacacaacttgtgaatccaacatgccagcccgtcattgcggcaatgctggcaggaggcctgtccctaagcctcctgtgcttcatcttcaccatgtgttccatggtgggatacgccatggcaggactgagaatccttttttggattttctcagtcttgttcgcgcgcttattcaagccgcgaaaagagacatgggtattgagtgaggaggaggaaaacctcctctatcctcaccgacgaatacgccggcccaggccagcaacaagaaactggaccagtggccgagttagccaaatggcaatgcttgtcatggcatctctcccgtttgtacacgggggaattgagacagtggccataatggccaaatcagagagctgtctcaacaacggcacaactaaaatgtgccaagtcaagggaagcgtgactcttgcgcttctcccggcaggacaaccgaatgtcctgtcaataaagaccgatgatggtctcattttgggaacccttcaagtgatcttgaaaggactctccctcgaatgccaagccttcaccaaggcatggaaacgatcatacgagatcgcttccctagccagcaaacgatgtccgtctgctggctcatgtgtcggagacttttgtacaaaa

SEQ ID NO: 77323 - DNA, 735 bp, Heterodera glycines
ccttttgatgtctttggataaaattttgaaaagcgatgaaaagccttacatttctccggtgattaacattcgccaatttctggccgatgcttctgctcaaatggatcgactgaggcaatattttgacgacattccctcagcctcggctgctgccgattgttctgcagttgaacaatcgacttcttctaatgcgtcggacccccgcaaaaatttccttaaatttgtgatggaccgcggcttttccacggaagacgcggccaaggccattgcaagcggagagtaagctgaaaatcacacacaaataaaccaattaatgaacgaacattctttccagtggagcgttggccaaaatgttccaaagttgccccctgggggaatttgaagtcacttttccgcccatggacagcaaattgatgacgcacaagtacacatagagcaggggcaatagttaaaattgtggattttgaaaactattgaacaacaaagggcgtaggtactcaattggcttgcaattttttctaaaaaaatggttgaggcaccctgggtttttttcaaaattccaactaaaaaaaagccatgatttgttagaaaaaagaattcaaaatccataactgttaattaagcgccaataaatggggtttaatttaattttattgtttttttcagagtgttgcacaatattcgcgaaggccatcagtcaagtgcggtcaaaaaggtgttggtcgaacgtgggaa

SEQ ID NO: 77324 - DNA, 473 bp, Heterodera glycines
atggccataaaatatggaccaaaaatcgcaaaatatggatataaaatatggaccaaaaatatggacataaattttaaatatggagaggtaaatcttatccatatataaatttgacaatttctgtctgtgtgtccgcggtgtttacgcattttgaatttgctcttatagatgttatgccaatgttagaatagaaaatgatagaatgaaatatattagagtccggtaaaaaaaatttccgggagcgggatcgggagttcaaaattttccgggacgggagtcccgaacgggattccccgtaaaaatcccgctccctaaatcccgtccatttttaacgggagtcccgggcgggagcgggagtaatttcgaaaatttaattaaaaactcccaaaaatatttttaatgcacaaatttaaagggcaataaatttattaaattaaaaatatatagaaaaatttataaaggagaaatttgaa

SEQ ID NO: 77325 - DNA, 2284 bp, Heterodera glycines; identical to SEQ ID NO: 13435

SEQ ID NO: 77326 - DNA, 1219 bp, Heterodera glycines
  unsure (1)..(1219): unsure at all n locations
atgtccaagccacgaaatgtccataagggtaaaaaacacgaaatgtccaaaactcgaaaaagctcataaaaacccggaaaaggagtctaatttagggttttcggggtcgctgaatacgaatacgaccttcatatcgccccttgtctaacccttgatccacccgaagaagaaataagttcaaaaatttttaaaatatgtgctgtactgacgacttagatttttctattcatttagaccaaatgataagtaataagcttgaaagtctacaaaaagtcggaagaagcgttatatttcagacatttcaaacacaaatgaggatgccgtgaatttgggagtggagctttgcgaaccgaatgccgtgataattttcgacaacgttgaacaacagactttgaacgaggctgaagttcaataatgaacctttgagcgcggaaaaacatattttgggggacattgcctatggctgaatggtatgtttgaagcgacgcanaaaaatagactaaaattattccttttcagaagtgttctttctttgccacttttgccttccagcgatttgttttcgtattttttcgtcgatttccaaaagtttaattatttttaagctgaactagtgacaacaatttcgaccatcattcagaacacagctacgcggctactccaatacagttcggcatcggctcaccggcgccttgaactctatatggctaaccactgtgactccacaagaacagcctgttcaatattcgttgagctcgctatcgacttcaacagcgccttcagccatacattttttcacgaatgtcgtttatattaaaaatttcaacggactggaggcaacccatctgcattttatggttgttttttaatttactacaggcaaatttaaaaaaatatgtttgaaaggtctctgccaccaccctgccctcccggacttcatctgtaaaattaatgaaaacaccgactgatggatggacgctgcccgatctgagctgctcgccatttcattcgcatgtgacaaaagcgatacacatacaggacgccgtcattatgcgaattttgccggacgagtaatgcaacaacaatggtgaaatccatggccaggtgacgccgatcggtcttcaaattgaaggacattcaggaaaattgaaggatttcgagaattttgaggattcgattgtccatgttccgttataaattttattgtatttttaataaa

SEQ ID NO: 77327 - DNA, 64 bp, Heterodera glycines; identical to SEQ ID NO: 51065

SEQ ID NO: 77328 - DNA, 2122 bp, Heterodera glycines
atgcttatcccgaatcgcacttgcgccttcgatggtccacacggattaacccagcgattgacaggaatatggacattaaaatgcccggtaattagtgacaattaaaatttaaatgaattatatacaaaattttcttaagacatgaatttggtcagaattgaaacgggggagtgtaacggaacatatgtggagggtaaggaaggaacaataagaaaatatggaaaacaaatcattttaaaggaatttggagttgtatgactgcagtgttttacggtaattaaacgattattttttaattaattgctaattgttgggtaggccgaaaaaagtcgggaatttaaatgagatggattattgaggacagaatcaaaagagaattggagctgcaccccaataaaagtgattgttaaaatggcatttggtggtttaagttgagcgtgccatgctccaccatataatccaaacgtatgtgccgaccgcactgatcgtcataatttcatggtcaccaaatgcttgccaccttttcatttgtgccattcattattttttaggttcaatttttggttggacatcgattcggcaccggcacgcgtttctctgtccatcacaacacttctcacaattgccacccaagtgcattttatttttgtacatttcaataaaattaaatagtattaaaaataaaaaaaatattttcaatttttattctccaggcaaacgctgtgaaactttcgctgcccgaagtgtcctatatgaaggccattgactcgtggatgaacatgtgcatggcatttgtgttcggtaaaaaacaaatcctttaaaagctatcggatgcaccagagcaaaaagattcatttatcaaattcgaataatttcttttagtttacaatcttggtattatataatttttaattttgaaatttccaaactgtcgtttcttatgttttagttttattacattttcaatgaaaattttcaaaaaatcgccaaaatatttatgaaaacataaaagtagcaaaataatgtttttttcgaaagctccaaaagtaatccatacagacatgggtttgcctttaataatatatacaattaaaattaaattatgtattttaaaacacccaaaatgtaatttaatggactcccttcacaaaatccataagtgggaaaaagaactaaacataaaatattattagtcaaaagcacacgatcaaaaagtggtagattcataataaaattgtgggccatttattatttattcgtttccttatttcttttttcatttgtgccttttctcagctgtcatggtcgagtacacaattgcgcactttgccaagaatcaagagcatctgttccaaatggctcgtcagaatgtgccgccttcgcttgtggtcgacccggacactttgaattcgctgttcagttccgtcgccgccgcttccacgccgaactcaaacgacccgacggacgaagcggtggcggtacggcacgaactcgagcagttcctcacctcggaacaattgcacaggtagcgaagcgatacgattttcatagttaaagtggcgggtggggggggggggaatcaaccgccaaggctttttcattcgtgccgtaattccaattcaatttttgcatttatgaaaatgttttaatgtaaaataaaatcaaaaaatatttatttgtcctagagtcatcactaaaactgtatttaaaatattaaataaataaattttttgcttatcagcagacattggcgaaaaaaagtgtgcggagtgttggaaaatgggagacaaaatctgagagaaagttttcggcacagaaatatcattaataaaaataatgtggcgaagagtgccgtgcgttgttcgctgagttcgcggagttacaaaaatgggcggagaatggaggaaaaatattcggaaaatggggaaaaaggtgaaaaaagcgaaaaataaatgaaaaataaattaaaattatgttaagatgtatcggaaatcagtttgccaataatggaggaggagcagaagcagcgcaaaatcagcagaaaccatttgagtgccgacttcttcgacatgaacgaaatacggacgaggcaattttcaaggtgaacgaacacaacgtttaa

SEQ ID NO: 77329 - DNA, 837 bp, Heterodera glycines
atgatggaggtgaaaatgatggaagaagagagaacggaagaggaggagcaaaacaacaacaatggaaagaggggagaaaaagagaaaatgaagggagataagatgaggaggacgagggaagaggcgaagaagaaacacaagagaaggaagagacaaataggtagaaggaagagaactgagagaaccattgaaaagaggcgaaaaaaagaaggaagaaggggagagaaaggaggaggaaaagaaacaaatagagggaggcgaagcgaaaatggaagaaaagccaaagaaggacgaggaggaggagcaggcgagaagaaacaaccgctgcccgggtcaaaaatggttcaacatttaacaattatttttatttactcaatgtgtattggccatcggaagtcaatcctttatgagtattggctaccgaagggccgggtccgtgggagtgttggtcgccggagggccgagtccttgggagtattggctactggagggccgagctcttcggagtattggatgccagtgggccgagctcttggggtttttggctaccggaggaccgaactcttagggatgctggctattggtgagccgagctcatagaggttttgatttccgaagggccgaactttgggttttgtgcgaattgtcaagggaatatgaccaaaaaaatttcttttaggataatggatcaaaataatataacaaaaagaaaagaaggaaatgttggagatttttgggaggggggaggtgtgcaaaacacatccacgctcatacattattattccaattatttaaaaatggaccctcccctttccacatctgctctacacttcaaaa

SEQ ID NO: 77330 - DNA, 381 bp, Heterodera glycines
atggcagaacaatttgtacaacccgaaactgcggaggagcaacaagtgaaagctaagaagccacacgttgatgagcgatttctttggaaaatcacgcggggccaatttgtgcttgcgattcggctgtgctcaggttaatcaaatttttgacgaccaaattaattgacagctttcagaggactggaacaatttatttcacaacaaagacaaggcacgccggctggaagacgggcgagtggcgattggactcgagatgtgtgaagaatgtgccagaatcaattgctgtgtcagtgatatgattgctgatcaaaagaagaagccgaaaaccaccgaataatacaccaaatttttcgcatttggataattttgactaccaataaa

SEQ ID NO: 77331 - DNA, 854 bp, Heterodera glycines
gtataaaagccccggcaatttgtcagctatgtctcatttgttctgctacaatggtccttgtcatcgaattttgtgcccaaattctcggctgttcccctaaatcactccgcgacaagctcaatcatcccgaggaccgagtgaaggcattgaaggagctggtcggaaaaaaggttcagacgacatacaaggaccggaatgggatgcagaaaacattttttgtcgacggaatatcggaccatggagcggctttgaccccagcatacggcagacttcgacaaccgtacaacattaacattgctgcccatttctacgctcgccaccgaatcaagctgcatctcccatacgtgccatgtgttgtggaaaaatacaccggttgtggcgaagacagatactatccaatggaactactcgaaattgtggatgacgactacaccaacaaagagcgatggcttggcaaattgtttaccgaaattgaggacgatttcattcctgtcaaacgccttggtcgagttgacgaagtcgaagaaattgacgacaatgatggtggtggtcgctacgaatgcagtcaaccgtcttacgtttattggtaaacacatgtatgttaccttaataatgcacttttctacctaaaaacgacaaattcgtttttaagtttatacaaattgtatcttccactccttaataatttacaaattgtgtcttctttctcttaattctgcacttttctacctaaaaatgacattcccaaatgcttaataatttacaaattgtaacttccattgcttaattctgcatgcatgttcactccttaattatgcacttttctacctaaaaacgacaagttcgtgcacata

SEQ ID NO: 77332 - DNA, 845 bp, Heterodera glycines
atgccgccaccgcatgatttgagcaaccttcgttcatttctcggcgcattgaattattatggaagatttattaagtccgtgctcgaaatcgcgaacaactggaccaactttgcagacgcatcaaaagacggaattggcaccacaatcagccatatttttccggacaaatcggaaaaagtaattgagcatgcgtcatgcaccctcaacgacgcacagagaattacagccaaatcgaaaaggaacaattggttgtcaaaaattccaccgaatgctatttggtaggaaattcacgcttttcatggaccacaagccattgctggcgaattttgatagcaaatatctgtacggagacagattgctatatcaacgccatccgccaaactgctaccgatcaattgccgatcacaaagcagagatttcagaaatgacaccaatagacgaaatacttcggaaattttcttaacacacaaaatccgactggccacaaaaatgcactgacaataatctgtcaccgtattttcagattgccagagcgcccaaaagagtccacccaagcaccgttagccctatggacatcttgctcacgaccattcaaatgcattcacatcgatttcgccggtccctgttcagatggtcactcctatttgattttgatcgactcattaattgcctaccgactcggatttccagaagaaatcgtttcagacaatgggactcaatttcatgccgcagaatttaaggaattttcagtgaatttggcatcaagaataccttcacttcaccgtatcacccgtagtcgaatggccaagcggagcgattcgtcgatacgttcaaaaaggcaatga

SEQ ID NO: 77333 - DNA, 584 bp, Heterodera glycines
atgtcttcaaaatttattgaccgattgtcttatcaaaagaatttaggtaagtttaaaaaaattggcaatttttgatgaaaatctgtgaaaaaacaagccaaaattacatggccggaaccccttcgcaattttatccgaaaaaaactgagaagaatacggtaattgcctaaaaataacaaagccatattttaatggtttgatgaaaattttaattttttgctttgtttgaacgttcaaagttcggcactttaattaagtgagtcaggagaaaatcattttaattattttttacattttgtgctaatttgtccattatttccaattgttcatctgttccggccatgtgaattttggatgctatccaatgcaaattttgccacattttttgtgccattaaattcaggcatcatttggcgattgattttgtattgctaataggaatttaaagattattagcatttgtattaattcaaattcactttgcagataatgaaaattatcagaggaatgactcacttcttctttgttattctgcagcaaacgttcatatggttccaaagtatttcagagttccgtatcaataa

SEQ ID NO: 77334 - DNA, 95 bp, Heterodera glycines
ctgatttaatacggaattggttcattgaatcacatgaaaagttgtatggagttccaattgctgctgaggaaacggaactgatatggttcgcatga

SEQ ID NO: 77335 - DNA, 790 bp, Heterodera glycines
atgtcgattgacacggtacatgccctcaattttgtgcatcgtcaggaagaaaatagccgaaaatcaaatagaattgatgaagaaaatcaaatttcatcaattataaatcagagtaaccctgatcccaagcattacaatcttggtagtgatcagggtactcttggcattcattttttgattttttatcttttaatttttaattttaggaaatttgcgcaaattcatccttcaatttaatgataaaatttcaacgcaaaatgaaaaactgatggaggccaaaaagatagccaaagatgaacaaaataaaatgcacgaaagatttttggtatgtaaatttaaaataataaaaattcttaaatttagtaaatttagaaaaaagaaatcagaagcattcagttagaccatccatttcaaaagtacaacataatcacaatggtattacgtgcacaaaacataacaattggacgttattttcttgcaaattttctcaatggaggaaatcaacagcaattgggaattgtaaaaattttatttaaaaatttacttatatttttaaatgaagtatgaaatacaaaaatccaaatcagtcccaaattagaggtaaatagcatgcgaagtaattatttgtcatttatcaaatacgcagtaattaggcgaccttagtccctattcttcaatttgaatgacgctcagaaaaggaattttcgcacatttgctaaatttgcgtttaatttattccaagcatcaattgccgttttgtttgttcattttgacactcgccttttatgaa

SEQ ID NO: 77336 - DNA, 1189 bp, Heterodera glycines
cgacttctcaatgagctttccgaacgttacaaatgcaagtggggcttcgactttgaaactgaacgtccgctggaaagtgctgacagccgatttgaattcgaagctgtgcctgccaactcagtccccggcttctaccgcgcttcgaacgcactctcaccattgaatttgtcgtcaagcaacagcgacaccgagaatcatcactctgcttttgtggaggaagagccgatgctaatcgaagggaaagaatttgggtcggaagctggtcactgcccccgtaacaaaaagaggacagagaaaggtggcgcagtcttgagaaaacttcaacagaagagcattcaaacgccgaaaagacgacgaagcgaattgggacagacacgagttactggtgaggaaacagagatattaaaatagaaattggtaattatgttaaaagtaaaccattttattaggtaacccgttatttcattttcagattttttatcaacgcgaaaacattcgtcggttcacgccaaaaaagccgatctttgcgatgactcaaacgacgtcggttctatcgcggattactcgccgcacagtcgaagacgccgttccctgtttctgtttcctgaggaaatgccaactcctaagaaatccatcgtccgtcaaagacgttgcggagctgtagggccgtcgtccgtggtgtcgacacttttcaaataaatggcataaacgcttttttaagggatgaatgactttaatccatcttccatacgattttgtcatttcctctctctctgttctgtgaatagaacgactttgtgaatgagtctattgactttctttggtgacgaaattcccctcgggggttttcttttggatgggagcgttcgtttattttctgagctttggggaatttcgtctgttgatgctagtccttcctaattttcttagcatcccattcttttgtgtatgttcgtgctttttttacaactcgcattgctataaatgtgaccgaattctttcctttctccacaactgaaatgaaccaccttttcttatcctttcgtatcaaattcaactaaattttttattttaaaaatgttggttacaacatttcgaattgttcttttattttacacatttttttccttttccaccatcggaatagcctttttatcgttaatctttttatccaatttgtctgaataaa

SEQ ID NO: 77337 - DNA, 290 bp, Heterodera glycines
gttcgtacagcgcaaagaccggtggtcgtaatggtggcgccggaaaagcaaaaaaacggagaagagacaaaagttgggagagaaaaggacgagcaaaagcagcagaagcaaaagcaaatctgtggggagataaggcaaaagctgaagttggaagaacagtgaaaagagagcgaaacgatgggaggagagaagggaccgaagcggagggaaatgccgacgaggaaaagcaacttcttggacccggaaacagacagacttttggcaaacactctctgaacttagaattctga

SEQ ID NO: 77338 - DNA, 1762 bp, Heterodera glycines
tttgctcagctgtcgaagtttctttttagcaaattggtggccgaattcgtcggcactttgctcttcgttttcattggtcggtcttttgtcttcgtttcgccattctttcctttgtcccgttttaggcattctttccgccgtctcttcccaacattcggacagtgtccccgtgctcagtgtcgcttttggccatggtcttgccattttcgtcgtcatttcctcgttgggtcatgtcaggtgccctcttcgcccctttgttttttgctgttagccttccctcaatttccagcggcgcccattttaaccccgcggtttcgcttggcattgccctctccggcaaaatgcgccctttcctcgtccctttttattggttcgctcaactcagcggcggattttgcgccgcttttctcgtctctgttggtggacatcttcggctacatcctttgataaattattccttcagattgttaccaccaaaaaccaattccaatcggtcgccggtggcgccaccattgtgccctcgggcaccaatttgtggcaggtgagccgaagggaaaaagagagagggccatcgggtcttttgacactgtctcttccttcccccaggcactttgtgccgaggcattgctcaccgcactgctcgtcctctgtgtgctttgttgtgcaattgatgcaccagcacaaaatgctctgtttgccccgctggccattggaatgtccatttcagcggcaattctcggcgggtaggcatcatgaataaaaaaacgccaccaaaaccctcccgggcctagcgcctcaattagcggcgcctcactgaacccggcccgttcctttgggccatgtttggccgcttcgctgttcattgacgaggtaaggcaatgccaactctcctcttcaccgtccggttgtttaatgttctctgtttcccttagggcgccggttccattggcacaaaactcaccgacccaatttggtcccttcactttgtctattgggtcggcccctttattggcgctgcactctccgcctttctctacaggttttattctctcatgtcagccggccattcactaacaatggcttggcattttccttaggattttcttcgccagaggggataatcgtcttctcaaccgatgacaacgaaaaacttaacaaaaacagaaaaacccaaagaacgcttatttttgatcatacatataatagccaggtcacaaatccaaaatccggacaattgataaatcttttaaaaactcgtaaaaacagataaaatcctccatccaccttatgtattattgtattccgattgcactttttgtttatgtgttttgatcattcaaatttaaacttaaaaacgaacgacgaataaataatgaggtgagaataaagacgaaaataagcccaaagtgttgggattggtacagaaatacgactgatcaaaagaggaggaaaagcggggagagggggggggggtgctaattaaagtaattaaactgaaatgtgagataatatttcaatcattccgcccccttcccccgcccgattccagccgatcggtctcaaattttgcgatttcccccattttgggccacccccgagccgatcaagtccgcgcttctcgggcaatttcgataaatgaatttgtgcccatttggagacaatccctcgctttatttgttgggcggtaaggagaacatcggcaaggggtcgactgaagtctgaagggcaaaggaatataccaaaggaattgtaaaacccaaaa

SEQ ID NO: 77339 - DNA, 714 bp, Heterodera glycines
atggacagtgagagaaccatcggacaaatgcacactcccacgacagaaaacaagctgaagcaggtgtacatccccacctacaacaagcccagcgtccatttgctgggcgcggccaacgcccaaccgacgaaaaacccttgtgagagttgcaaggtcggcacttttggtgtttccttgctttttattggttcgatttgcattacgttttcagaatgaagaatctgaccattggtaccaatggggaccgacgcatttgcactttcggttcgtttggttttaactttactcatttccaatggttgtttaagtctgtgcggagattgttggcagaattggaagaaaatgggcggactgaagacgacccacgaatttggtgacattcataattagtgttgcttttgtttttacccaacgcccgttaagacattttcgatctcgacggttcaaccgatgttcgttcctcaatcgcttcttctgctcctgtaaatgggcgattgggaaaaatcgtacagttaatgggggaattgtcacaaaaattgaaaacatgcccttctcgcaatcaacatttagtaattttcagaatcgtttgagtatcggtaggaacggactgtcgcagtcggcgctgaaaggcagtggagtgtcatctttgcttggccaaaagggacgggtggcattttacctgaacgcggctttggaagcgcgagttgccaggag

SEQ ID NO: 77340 - DNA, 327 bp, Heterodera glycines
atggccaaaccagcccaggaaagccagacccaagccaagccaagccaggccaagccaagccaaaccaagccaagccaaaacccaagccaagccaagccaaaccaagccaagccaagccaagccaagccaggccaagccaagccaaaccaagccaagccaagccaagccaagccaacccaggaaaaccaacccaagccaagccaaaccaagccaagccaagccaactcagtcaaacgtgccttcgagcaacgattttgtcactgtgtttttgcatgtccaacaaaagttgaggtccgaccagtgagtcgacacttttctcgaatatga

SEQ ID NO: 77341 - DNA, 1386 bp, Heterodera glycines
atgagtgaaggccgatcaaggaagcccttttcccgtgacggaggaatgggaacactgcaaagggtgagaacgaaatggcaaggcaatggggggaggggcactatttgaacagtgatcagtttggtcggaaggtgatccttctgatcatcgcgatcggggagtggtccctctgatcactctgctccgagcgtttttctttcccatcaattttgagtttctgtccaattttctgggccctcccccccctcgccctttgaaatgtgcgaccgttttgcagaagttcgcccattctccgcggcttcacctgcggcctttggatggttttccattcgctgacagtcaatgcttttcggcagaacagtaaatgatgaatgtgtgaagtgattgtgcattctctgtgctttcgcaggtgatcagcagaagcagttccatccggtcgccgttcttctcaccatcaaagattgggtgactcatttcttcgcttgtgaacactgccgcgcccatttccatcggatgaccacaaaaacggccaaaattgaggcggcggtcagtcgttttcccaaaattcctctcacttttctttgctaaggttcgccaaaaggaggacgtctttctgtatttgtggaaggcgcacaatttggtcaatggtcggctgaggggccgcgagacggaggaccccaaattccccaaataccaattcccgccaaagttcctttgccccgagtgccgcaggggcgacaaattcgacgagggaaaagtgcgcgaatttctgctgaaatattacggccgagtgagaccaattgatggagagcagcgaacgacggagaacggtcgcggaaacggggaacacggcggaggaggggaggaaaaggaagaagaagcggataagcagcgaaacgaacggatgccaaaagtgatcgggggaacggcggaggaagaaaagtgatcaaaggtaaaagcagaggagaaaagtgatcagagaggaaaaacggaggagaaaagtgattggaggaacggaggaggaagaaaagtgatcaaaagaaaaacggaggataaaagtgatcagataggaaaaacggaggagaaaagtgatcagagggaaaaaatgtgatctgaggaaaagcggaaaagaaaaagaaaaatgattagaggaacgatggaggaagaaaagtgatcaaaggaaaagcggaggataaaagtgatcagataggaaaaacggaggagaaaagtgatcagagggaaaaaatgtgatctgaggaaaagcggaaaagaaaaagaaaaatgattagaggaacgatggaggaagaaaagtgatcaaaggaaaagcggaggagaagaaagatatagcaccacatttgatttcatttgcactttcaccaaagcatc

SEQ ID NO: 77342 - DNA, 101 bp, Heterodera glycines; identical to SEQ ID NO: 56211

SEQ ID NO: 77343 - DNA, 215 bp, Heterodera glycines
  unsure (1)..(215): unsure at all n locations
atggctgctgctggggtgccacctttgtcgtggcctcagtttctccagcgattggcagctgtcgaaatgaataaaacatgcagctcngtctgtgtgttaaagaaatttggcgagttaattgacttgtgtaaatgttgcctaaggcacaaatgctgtggggaactcagcactggggatgctgaacctaaagtctggtggttggtgttggtatacga

SEQ ID NO: 77344 - DNA, 2803 bp, Heterodera glycines
  unsure (1)..(2803): unsure at all n locations
gcagctctcggtggaaatccacttgcacaaatggctntggtagaaaaaatcggaagaccgcatcattaaaagaaatatctgaaatatcattcatctaaaggattttttagggctatcgcttcgcgaacggagtggggacaaagcaaaactgcgaaacggcgtgagaattacgccgcaaatggaaaaaacaattaaattttgaaattttagtttaatgtggtacaaaaaagtagccgatcgagttgcttcacaagttaaattgactggaactccttccattcagcgcattcgaatacctgacgaattagtatttgttatatcattttgatccaaaattggttgttttttcataaaatttcataaaggagtcttcctcgattacgggcactttgctggacaataacgttttttcctattacaaatatctcgcggaaacgggcgacatgcaagcgattgtgagtcgttgtcagtttttaactgtggtgggattggtgttttagctcggcttggctcagctttatctaaccggcgggaagggagtggcgatggatttggtaaaaacaaagaaaaaaccttaaattttttaaaaatttaagaattcagcagctaaatattttacaattgcgtctgaggccggcagcagtcaagcgaatggatatttgggcaaaatgtacttggaagggacgcacgccactccgcagaacaacatcaccgcctttcagttcttcaagaaggcggcggacaaagttcgttggggttgtcaagaattaactacaataacaaatttggtttgtcaattttggcacctttttatgcaaaaatagcgggcaagaatttttaacttaacggtaacatgtgattcactgaaaagggaaatcgactactgacaatttcaccgtgaaaaaccttcgcaaatttttaaattaaacaacgattgtactagtaaatagccttttacatgtccgtaaaattttttagggcaattccatcggtcaagcgggccttgggatgatgtttctttacgggtacggggtgaaacaagagccacagaaggcgttgaaactgtttgcacttgcggccgaacaaggctcacccgatgcgcagttgcacttgggacaaatgtattacaagggattgggcgtgaaaaggtcgttttatggacgaacattaatgaaccgacattgtttttttcagggatttcaagcaggctctgaaatactttcagttggcgtcccagtccgggcacattttagctatttacaatttggcacaaatgcatgccaagggcaccggagttctgcggaactgtcgcgtggcggtcgctctgtacaaaaatgtggcggaaagaggccgctggggcggacgctttatggacgcgtatttgcgcttccaaaacggtggcgctgtggatgaggcggcgtttcgttatttgtttttggccgagtttggatatgaagcggcccagacaaactttgcatttttgttggaccgtgaggacacgcatttgttcgcaaaggaggaggcgtaccgcagggcgttcatgaactggttgagagcggccaaccaggactacccggtagcccgtgtgaaattgggcgactacaaatactacggactcggcagcgagcccagcatggaggaggccgcggagcactacaaattggccgccacttcccatcagagtgcgcaagcgatgttcaacttgggatacatgcatgagcatggacttggcgtgcaaaaggaccttcacttggccaaacgctattacgacttggcggccgagacgagcacagaagcggtgtggccggtggcgatggcactgatgaagttgagggtggagtttatgctcgaataccttttgatggtaaacccggaaagcgagatttgagcaaacaaatccccggaaattcagaatttctaccaccgcagtccgtcgcttgatctgctggacgccgttttgggccccgactgggacttgtacctgatgagtctgctcctcggacttatcgtctggctggcctattgttacttcaggaacagacaaaacggcggaggaaggaattagcgaagaattttatatcggaaggtgtacactgacaaatgagtgactttttctgtgatttgctatttattttatttatcagtaaaagaaatatttgcattttgaaaagaactgttgccgattacttatcatatctttgtttacctaaatctttgttgatttttaaacttttgattgttacaaaatccatcaaagcttaaatttgtctccgtccctttagttgtattttattggccattattttttctgttacagttcgatctgaagtttgaaaatgttagaacggcttccgtctcagttagtgtcacgaagcgcgagctttgtccaaactcggatgacggcaaacaccgtcaattttttcatgcgtcgaaccggcgacactttgtggaagacggtgacgaacgtgtccatgggagggatgaagcgggggagggcgcggacgcggcagcccatccgaccgttgccccaattttaccgagtcggcatgctcaagtcgagtcagtcagtcaggcattgacacttcccaattggaaaatgccgtcattcattaggtccgatgcgcatccgttaccctgggttaaatgcgcccattgtcccgcaaagtgttgccgaattggcctcgagaccgttttttgttgaggaacagtcggagcaggaaagggaggaggtgctgcactttgtgaggacccaagtggccaagaagagcagtcagaagcgccatttgtgcaaggagcgcctcac

SEQ ID NO: 77345 - DNA, 890 bp, Heterodera glycines
atggaatacgtgcttaaactccgtggattgacactcaattatgatgtgatcaacaaccaaggctttagatataaaaacagcaagtcaaacgttatgctcaaacaggagagattgaaccaattaatgtaatatacccaaactttattagacccaatattcgtgatggtggatctgtaatatcaagctctatgcaaaaatgttatcagccttatgttgggaagggtattgtaggagccgattataatgtttatagtcttaaccattcattgtaactattttgtcagcacacattgtaataccttcttcaccaatcattgtatctctctcacacatacacatatgtacccttttgtattttgttcaccatttattgtatctctcttccacacgcataaacataaccccatacacacacgtactcatacatggaccccttttatttctctattttataccaaaaattgtatcattttgtcgttttattcacgtttttaataaaaatgcatgcagaattaggcaatggaagttacaatttgtaaattattaagcatttgggaacgtcgtttttaggtagaaatatgcagaattaagagaaagaagttacaatttgtaaattattaacgaatagaagatacaattttgattatgtgcacgaacttgtcgtttttaggtagaaaagtgcataattaaacacattaacatgtatgcagaattaagcaacggaagacacaatttgtaaattattaagcatttgggaacgtcatttttaggtagaaaagtgcagaattaagcgaaagaagttacaatttgtaaattattaaggaatagaagatacaattttaaaaaatacacgaacttgtcgtttttaggtagaaaagtgcataattaaa

SEQ ID NO: 77346 - DNA, 325 bp, Heterodera glycines
atgcagcaaatgatgtttgtggcggagaaaattgctgacacggcattcattcacaaaattttgaaattttatggcagaatgtcactattttatcaagaaaatgtaaggtttgcgcaaaatttggttatttttaagaaaaacccaaaatatgtaccaaatatgtaaataaaatttttaaaatggttatttttttagaaaaaaaaattcttcggaaagggtgaaataggcacaaaatgccataaaaatgacctaattaggcctagaatcacattttagtattttaaaaattagtttggttaatttttatttttcacaagaaatttta

SEQ ID NO: 77347 - DNA, 952 bp, Heterodera glycines
atgactccaaaaagtggcattaaccttgacagtaccttctttggtcgtccaaaatctgtacaagtacagtacaaagccagcagtagtaaagctggaaccgaaccagggattgatgatgaacaaagcaactctctaaatgagccagtattgcaacggttgctaacccaaaggagagacagtaacccaaacagtatccctttccattttgaacataaggtgatatatgataacgaatttaagaatatggatttaaaacccaaaatttattaaaaccccacaaaatttggaccaatatcctaaaaatggcaaaataaacgaaatataggctaaaaattgcctaaatatcatttaccatttagaaaattttaaaaacaaatttgaaataaatttgggtaccttaaatatttttgaaaacaaagcaaatatgaattattctgctgaaaacctttaaaaatggaatgggtcatatcctgtcttgaattttaatcattgtttatttattacaaaataatttctgtaataaacttaatttgcttaatgaagagacaggatttaaaaaacaattcgggattacacttcgagcagggacggcaatcttttggcgcttcgagttcaacgaatccagcaggcctgaatcctctgtatcgttcattaagtgtgcgatcagattcaagcacattaaatcgtatagataagataaacaaaatcagtcaaattgaagaggaggaaattacggtaaaagaaaaatttgtaatttaaaatgacaatatttttatgttttccgaatacataacaaaaaaatttaactttaaatccaaatcaatgttaaatttcataattttccatgacaactgtcaaggtgaagaagcaatataataattgctatctaaaatggctgaatatgtttgttaaaaatcattttagaccaaatatattaagttttggaaataaa

SEQ ID NO: 77348 - DNA, 1964 bp, Heterodera glycines
atgaacttcctttttccactcatcattttttgttttgttacatttgccgccaatggaatggacctgacaaaaattgatttttcaaaagctcaacctgtcgttgatgacccgccaaggttaagaagcagaacaatgccgaggaaaactcaccgcttcagcgcggaattgaccaaggaaagtcgccaagaaatgtatggcatcacaaaaacgcatgtgcgtttcttaaaagaaattaaaataatcccttaaaaatcccgtaaattttaacgggaaccccgccgggaaatggaaaaaattttttttagttttttaagatttttaatcaaaaattcaaaagaaagtgagattttttagtagaaggttttttgatattattagactaattatttttcaaatgaaaataaaatgtcgaagtcttaggttaatttgtgggtttttatgctgttttaaaaaagaaagaaaaataatttaaagaatgactttgaaggacgaaaaaattcacaagaaattattttttcggtattttttccaaaataaatataaaattggaaattattttgatttttttctctattttcattaaaattaataaatttcaactttattttgttttttttttcttcttaaatgacttatcattcaaaatttagcaattttagagacttttagcttaattttaacgaatttgaagaaattttggagaaattttgccctcaattttcataagtttatgtgtatgtttgccatgtgacgaaattttattccttaaaatttaagtttaacaacacgactccgtctccatcatcgtcgtcagtcaatagattgaataacaaacagttggaattgttcaacaaactcttgcaagagctgaacaaaaatttggcacagattttgaaaaacattcgacgtccaaattggttcgtcaagctttttgagcacgaaaagaaagctgaaaaccccaaagtaatgaaagaacacatttataagacgttggacaatggggccatggagagcccatgcgaaaaaattatgccaatctgcgaccctaaaactagcaaactgtacaatgaccatgaattaagacaaaaggtacacatttgcccaaattgcaacaattgatcaatcgcaaaattttttattctgtgctgagacatttgatagaataagaaagttaaaaaaaattttgaatgcttttattaatttatataatgttataccttcgtcattatcttttgtcgtttcttaaaaaaacaaatgtagaaaaaatctagaccaaatattcctctacttgggttatatcatacgctgtgacatcaaataatgagtttttaaaaatatcgaaattgtagtcccgcgtaaaattaaaatatattgaaaaaggaaattaaatttttggtaaaatgtaccgaaaatttgtaggtaaaagaaattttggaccagttgacaagttggacggagttgaaggattccatctccagtgcgtttaaaaattcttcagagaccgatttatttgatggtgtcgacagcactggcacaactccattttattggtcgaacgaggtaaattttttggtaaaaacatggaaattttggaaattgaaattgaaatatatatgattaatgaaaccaacaactaaacaattaatggaaatttttaaatttattcaaaggaattctaaaaaattgtaattattttaataaatatttataaattatcaggcgcaaaactctaaaaaaaatttttaaatccttttgtaaaatttaacaatgtttagcatttaaattcttttgaacccctttgggattttcggatttttacaaatcattttgaaatctatgacccaggaatgcgatcttatgattttttaaacaacctttttatatttcacattccattttattggatgtaggataacagccaatgccaatcaatttaagattgtctaatgcaatagataaataaa

SEQ ID NO: 77349 - DNA, 4674 bp, Heterodera glycines
tggtttcggcaccatcgcttctttttgtcgtgattttctatttgtaagtaataaataaattatttgaaaatataattgagctcattctatctttagtcttattttttaattagatgaccgtccgctgaaaaacttgtaaattttccaaaatatttctaataaattggcgcaattttttagagcttatatattttttcgtgataaatctttttcctaaagtctacaaaatcctaaccccaaaagcagatgaaaaaaaacttgaaaatagaaaaaactcattaaaaaggagtataaaaatggcaaataaatattatagtatcttttaagcacaattcctgaaagcttccattatttggcaataaaaggacggattgatttgatcattcaatgggtccaaacggcgaacagttttgcctatattgcacagacagacaaagttgagcagaacgatgttgatcagctgattgagcatttggagcagcaaaaactgctgatggacaacactgatcaacccgtgatggtcaccaaatcaatcaatgaaaatggagtaaaaatggtgataatgtgagttaaattaagtcggcatctcacgacaagtcagaccattaatttatagttttctgtaataatgaaaaatcttgggctgcaattggttgacataggcaaaaacgcaatttttcttcggagagccctaaattgataacagacctatctccacttttttggcctatttttcattttagttattgtcaaataaataaataagcaaatttagacatttaataattaaattaagtttatttgtttaggtcatcaccatttattgagaagatcaaaacaaatgaaaagctgatcaaacacatttccattttcatcttattatggtacggagcaacatttttgttcattattttaatattattattattcaattaaatttattgtttaaagtaattaattaaaaattttatttatcaaaaaaattcctttaagggtatgcgacgcattcatttattacggggtcagcttattcagtacaaaacttgccggcaatcgctacatcaatttcacactcattgctttggttgaagtgccttcgtacgttttttcaccatggctaattgacaggtatcatgtttttaaataatcagaaccggcctttttaaattctcgatttccaagactctcatttttcgtgattttttaaaaaatgccttgacctattatgaatatgacccaaaaattacttgcaactttttggaaaacttgaaatttggattttattattggcacagcgaccggtaattcaattttgctggtctttctgcggggctggtaaaattatcatgaatttttgtttaaattatttaagaaaattttttggcataatgcattttccactacgggattgggattcaaattattgcgggagggttctcgattcaaatcccgcattttccaaaaatgcggggttgctgactgggatcccgcaaaatcacgcgcgggatccctcctgtgcagtttctatcagggatggaacggaattccgatttccgacatttttggggtcggaattccgatttcagacttccgaaaaatttttgggcctagggacttccgaaaaatttttgacccccggaattccgatttcctaaaatttttttggtcctcggaatggcatccctggtttctatgatttcatgttcattccggctataaatacttcattcaaacggcgtgttatagctaatttttactctttctgttcgtatttttgtttttttagaaaaatttttctattcccctaggaatttttcccgaatttacctaaaaagtccggcctctataaaacggtatgctgctaatgccaaattctttccatagaatgggccgtcgcctgttcactgcgtttacccacctgttggccgcgttggcattcttttctggcacgtccattctttggctgccgaatgtgccaccatttgtccaactgtgcctttggctgatcgccaaatttgccattgcttcctcgttcactggcctttttgtgtacgccagcgaagtgttcccgacatcgaagcgtggaatttgtatgggcatttgcacgaccgtctcgcaattgtgttgcatcattttgccgccaatgatccgagtgatggtgaatttatgcattttataattaaataaaaattaatttaataattgaatttaattaaatattatcttgttcaaattatattattttacggaaattttaattaataaattattttacgcatataataaaagtatagttaaacaagatttcaaattttattggcacttttatagcaaagggtacccactagaaaaacaaaaaaaaagtgtgaaacgctttacttttacttatttatttttggtttcttggtttagattagaacttcacgaaaattcattctttttttagcccctctaaactctgcaatttagcgtctctattacaactttcgccatttttccatcattttgacctttttttttgatttcgtccctactcatttgtaatttaatataagtaaatttccaacatatcgtttattgcttatctagtgcatttttaattaatgtttgtaattttgcactttatagctgtccttttcgcctatgatgccaatgtttttctttggcggttacgcattcatcgcaacatttttaacatttttgttgccagaaacgcggggaagagaattgccggattgaattgcacacgcaactcgtgtacaaattggccttaatttaattaattcatgcttttgtatattctcgttttaatatatttgagtatttttggctttttttataaatttattatttaaaggacaactagcagatgatttctttgaaaggacatgtagtaaaatcatgtacacaagggtgctatgccaaaatgataaaagtatgggtgtggagacatggccgagtatgcaattatttcagtcctaaaaaataaaaatcttgcgaaaatgattgttaaaattaataatataattttttttatagattcttaacatttctagttctttatacttcaattaatctttatttttaaaaaaatgattatttcataattttataaaagaatacaaattattaatcaacatttttagcgacttaaattaattttcagatgtttttaaataaatctgggtgattaaaaaaattgcttatgaattagttactgactgattgtccactgacggattgtccacttaccgacggattgtccactgacggattgaccactgacggattgccactgacggattgtccgggagcctaaataaggttttaataaaattattattttaattgataatttatttttccaccagtctataattaactattttaaatatatttattttttaatatttatccgaaacaattattagaattgtaataaattacaaaccacaattttatccatttaaccctgaccaattggtgcatcgacagttgctgatcaagttgcgcgagctggtcgccgttgttgtacacccatggcgaggctggctgttctttgccgaatcagaacggcttgtaattggcgctgcaatttggatgccaccggctgcacagtgatccgcgaccaaacactgggccgaccgtccgggttggtcatcgactttgcggacagtcgcctgtgcatgggtgactcgttgctgaagctgttcgcctgcatggactttgacggattgaattggcaacaaatccctgtggacgatccaatccctgtcgcaattacactgctgcaacgggtaaaaaaaattaatttaattgcaatttaaatggttaaatgttacttaattattatattaatgtatgactacttaattaatgtgtgtttaaccattattaagtgattggttaatgtttaattaccattgacaagtggctaattaacagttaattaccataacaatatttccctactaccactctgttaagtaccctaattaacaataactactatgcttaattacctttgattagtactaaattggtgataaatttcagctttaatgactgtggtgaacacgacttctccgatgaacatctatgtaagttccaaaatttaatcgacttttcaagaaaaaaggaatttcatttgtatatttaaaaaaattaatttaaattattttttccttaatttagcaatgtgttcatccttttctgagtatggagattgctctacggacgaattcaaatgctccaatggcaaatgcatcaatgccacacttgcttgtgatcggaaagatggtgagatgagcagtgatcagaatttttgatttttgaaatttcggagaaaattttgtccatcaaaaccaattctttctaaattcactcatactctcccctcttccgtgccaaaaagctttttttttttaaatttccgtttaaaagcaattttgtttttttgatttcctcattcaaactcgtgagtcaaattttctgatcacagattgcggcgatgccaccgatgagattggctgcgcgaaaaacaacggcaaaagttgccattccaagggggacaacggtgggtgcaagcactcgtgcactgatgtgcaggacggttactattgccattgtcgggacgggttcagaccagacccggccaacccgttcgactgtgtg

SEQ ID NO: 77350 - DNA, 1162 bp, Heterodera glycines
atgcataaattcaccatcactcggatcattggcggcaaaatgatgcaacacaattgcgagacggtcgtgcaaatgcccatacaaattccacgcttcgatgtcgggaacacttcgctggcgtacacaaaaaggccagtgaacgaggaagcaatggcaaatttggcgatcagccaaaggcacagttggacaaatggtggcacattcggcagccaaagaatggacgtgccagaaaagaatgccaacgcggccaacaggtgggtaaacgcagtgaacaggcgacggcccattctatggaaagaatttggcattagcagcataccgttttatagaggccggactttttaggtaaattcgggaaaaattcctaggggaatagaaaaatttttctaaaaaaacaaaaatacgaacagaaagagtaaaaattagctataacacgccgtttgaatgaagtatttatagccggaatgaacatgaaatcatagaaaccagggatgccattccgaggaccaaaaaaattttaggaaatcggaattccgggggtcaaaaatttttcggaagtccctaggcccaaaaatttttcggaagtctgaaatcggaattccgaccccaaaaatgtcggaaatcggaattccgttccatccctgatagaaactgcacaggagggatcccgcgcgtgattttgcgggatcccagtcagcaaccccgcatttttggaaaatgcgggatttgaatcgagaaccctcccgcaataatttgaatcccaatcccgtagtggaaaatgcattatgccaaaaaattttcttaaataatttaaacaaaaattcatgataattttaccagccccgcagaaagaccagcaaaattgaattaccggtcgctgtgccaataataaaatccaaatttcaagttttccaaaaagttgcaagtaatttttgggtcatattcataataggtcaaggcattttttaaaaaatcacgaaaaatgagagtcttggaaatcgagaatttaaaaaggccggttctgattatttaaaaacatgatacctgtcaattagccatggtgaaaaaacgtacgaaggcacttcaaccaaagcaatgagtgtgaaattgatgtagcgattgccggcaagttttgtactgaataagctgaccccgtaataaa

SEQ ID NO: 77351 - DNA, 1081 bp, Heterodera glycines
atggtaattaaacattaaccaatcacttaataatggttaaacacacattaattaagtagtcatacattaatataataattaagtaacatttaaccatttaaattgcaattaaattaattttttttacccgttgcagcagtgtaattgcgacagggattggatcgtccacagggatttgttgccaattcaatccgtcaaagtccatgcaggcgaacagcttcagcaacgagtcacccatgcacaggcgactgtccgcaaagtcgatgaccaacccggacggtcggcccagtgtttggtcgcggatcactgtgcagccggtggcatccaaattgcagcgccaattacaagccgttctgattcggcaaagaacagccagcctcgccatgggtgtacaacaacggcgaccagctcgcgcaacttgatcagcaactgtcgatgcaccaattggtcagggttaaatggataaaattgtggtttgtaatttattacaattctaataattgtttcggataaatattaaaaaataaatatatttaaaatagttaattatagactggtggaaaaataaattatcaattaaaataataattttattaaaaccttatttaggctcccggacaatccgtcagtggcaatccgtcagtggtcaatccgtcagtggacaatccgtcggtaagtggacaatccgtcagtggacaatcagtcagtaactaattcataagcaatttttttaatcacccagatttatttaaaaacatctgaaaattaatttaagtcgctaaaaatgttgattaataatttgtattcttttataaaattatgaaataatcatttttttaaaaataaagattaattgaagtataaagaactagaaatgttaagaatctataaaaaaaattatattattaattttaacaatcattttcgcaagatttttattttttaggactgaaataattgcatactcggccatgtctccacacccatacttttatcattttggcatagcacccttgtgtacatgattttactacatgtcctttcaaagaaatcatctgctagttgtcctttaaataataaa

SEQ ID NO: 77352 - DNA, 390 bp, Heterodera glycines
atgggcagaactccagtgagggtacaacattacatgaggtaagtcatattgcagctaatgatataaaaattgaaaaaatgtatcatgaaatattaattttataaatataagttaaatagattcttttaattaattatatcgccatattatatgaatagaaaaaatgaaaatttaattataggacaaagcaatacaaggaatgatatgggagcaacaccttcgtcggggaggaaattttcataaaaagtctaaaaaaagaaaaaaaaatccagaacaaaaaagtcttaaaactcatttaaagatacatccatcttatttcaagtgcaattcgactttcgtaatttcatttcccgaaacatgtcggggctgaaccctagtttataatatcaa

SEQ ID NO: 77353 - DNA, 642 bp, Heterodera glycines
atgattaaaactgaacaaaaagaggaaaatgaaagtatagaaattaataattatgttaatcaatacggaggagataatgaaaacatggaaattaatgatcaacaaaaaagagaaacaattcataaatttgataaaattaaagaaaaattgagaaaaaaggcaaaatataatcggaaaaaccttgccaaaactgagacaaaaattggaaaattattaggcgcaagtcgcgagaaaatatacaaatggaaaaaagaattaaatttattaatgaaaaagagtttttatgaggggaaaaagaatgaattcattgaacgatttgatgaatttaaaagtttatatggccaacgtaaacagaaagaatttgcgaaggaattgggcattggtgaaagaacatttataaaatggaaaaaagaattgctgccaaattatcataaaagtaagagatttttttaacttaatattttaattaatttttattttagcacaatattccaatgaagaaaaattgagaaaaatgaaacaatacttcaaaatcaaagaaatgaatccaaaaataagtgatgaaaaaattgccaagaaattgggaattgggtctcaaacactgatcagatggaaaaagaaatttgcatcaattccaataaa

SEQ ID NO: 77354 - DNA, 497 bp, Heterodera glycines
atgggcgtttgggctttcgacctattttgttcacatggaccatggagaacgttgaaggaaaagatggttttatgattttttcaagattttacattaaaataaacattttttcttatattaggtgaaaattttcaaaaatttagaattttacagaattctttaaatgaattttttcataatttcaagaatatttgtgagtttacattgtattgaacaaatattttttatcaaattaatgaaaatatccgtccatttttgaaaatgacaactcattcataactctaaatccacatatctttcataagtctcgtctcttctatcatctatcattcatattcgaccgttggcgccagctattctacgttggccttaaaatacaaaattttgaaatcatttttggcttttagaaattgactagtttttgctaaattttcttttttatgaaactttttttcgaaattttggcaaatttaaagttttttatacaatggataaca

SEQ ID NO: 77355 - DNA, 587 bp, Heterodera glycines
atgaataaattgattatttgttttatgatttttgcctcagtggccgagtgggacgttatggccaagcgcgggctaaaacttcgtaagtttgccaaaaccgccggtaaaaagacaggcgaggccgctcttgtcggatctcttttggaattggccgcgataggagtagataagattaaggtaaaatgcatatttttaatttaaatgataaataatattcaaattatatttaagaaatagaaattttttaaattatttaagaaacaaaacatttagggagaagagaccactacgacgaccaccacgccttccaccactacgacgaccaccacgcccagcaccacgacgacccccacgcccaccaccacgacgaccaccacgccgatctcaaatatataattgtttggaccttaccatcggctccaccggttgtgtccctcattgtcttcttttggcgcagaagacgaggcaacggcaaaaaaaacttccaaatggtcccgatggttaaccatggtgcccggaaacggaaatgcctgcaacattcagttggcgccgccaaataattaatgtaaatctttaaacacaataaa

SEQ ID NO: 77356 - DNA, 175 bp, Heterodera glycines
atgccacaagaaatctacatatattatcgaaggttggacaattttttgggttccctggtgcggtcagaccatcaaaaatgtatcaaatttatgaagggtcccaaaatccattaaaaatataattatttcgtgtattttcagttatttcgaagaaataactgacaataagtcgtga

SEQ ID NO: 77357 - DNA, 666 bp, Heterodera glycines
atgggcactgccattgtacggctttttgatgccgctgattgttgccatcaccattctggtaagtggtgtagttgccttgaaagtggcatacggtacatacaaaaatgcttagagacggaatgtcaaaaaaatttcaaaaatttaaaaccctctaaatttggcgcactgtttaagaccaattcgttcattgtcattgttctctcccatcgatctctgcgcactccaacaaattttgttcttggcgcaatggccataacggtaaaatttagaatttttttaaataatttttaaaattgcggtaaattttaaaatttttccatttttttaataatcgttttcaggaattgttgactggtctgcttggtttgccatggcttttgtacttttacacttttggtggctttcggacgtacgaatgggaagggttgccggcactttggtgcacaatgtttccatatttggtccgtccgtttcattttttgaaaattttcaaattaaaaaatgccaaaaatgtcaagactcttggaggaaataatacccccccccctacggcatttctaagcctccgggaatatttatgattatgatctctattgatcagtcaagaattaggggatattaactagaaaatcctacaaatcctttggattttctatccaaattaaa

SEQ ID NO: 77358 - DNA, 132 bp, Heterodera glycines
atgtcttccaatccagcgctaataaaagaaggctttgtggagaaatacaaaagcggctttttgagcagcaaatggaagtcggtgttcgcccgcctctattcggactccacattggcactgtacagtgaccgg

SEQ ID NO: 77359 - DNA, 2336 bp, Heterodera glycines
tatttccttacaggaaataattttttcaaaaaatgtcttccaatccagcgctaataaaagaaggctttgtggagaaatacaaaagcggctttttgagcagcaaatggaaatcggtgttcgcccgcctctattcggactccacattggcactgtacagcgaccgggtacggtacaacacaaatatactgtagttcctaaaatttgttcctaaatgaataaagttgtccggtgtggtaatacggtatatcatatattaacattaaacaccctttgttcttcatataaattattattgttttttaggccgattcacgtccatcggaaaccattttcctcaagaatgtgatcccctatgtttgcattggctttatgacagaccgaatgccggtccgtcgtccatcacttccgccgggcactgcggtgcaacgtaaattaaaattttcaaaaattaattaatttgatttactgtcttaattaggtttgattggcattggcatggacccgagagcagagaaagtccattggattttgttcccatctgagcagattttagagtaaacgcctaattatttttcttttataatttgttgtttttgttgaagggagtggcttaatggcattatgtcgacgctgccgccaccgccaaatccgccgccgcaacagcctacagtaccacagcaaaacattggatttggtactgtaaaactaatttactataaaaaaaaaagattaattttttataattaaatcttgaattatttcatgtttcagttccaccaccaaaatatcctgaccaaccgccaccctatggtggtcagccgatacaaccgcaacagcagtcaccgtattacccgcctccagcggcgggtgggtacggtgcacagccacagtacccgcagcaacagtacccggcccaacagactgtagtcattgacaggacaacaacaccgagcggaggctacggagggtaaacaaaagagcacggatatagaaaagcaggacccgcccaggatttttgcatgtgccctggtcttgtccctgcatttttgtggaaaattggagggattgcagtcccaaaaaaattaattatttttttctctggttcctgtcagcaccattttcaagtctttgcattttcaagctttcggtaccattgaaaattgccaataatgtttggtggaaagaggccagcagatcaaaaatcttggccgatttgaaatattttggaaaacgaataataattttaaaaaaaaacttgatttccattgtctcatgaatttaaaaaataaaatacgcacttagatcgtccggcttcggcaccggtctcgcagctggcatgggcggtgccatgcttggctcgctgctcggctacggcatcggcagttactttgcaccccacgggggttggggcggcgggggatggggaggcggcggatacggaaatggcctgggcgggggatacattcaggtggaaaatgagggatatttaaaaaaaaattaacaatttgcaggataatgacacttacatcaccaacaattactacgggaacaacgatgactcatcaacgcctacgcaaaacgccggaggcaataaattagcgctttttgaaattttaataaaaattttcatagattattcgacgcccgctcaaaatgactatggagacagcggaggcggtggcacatgggacgacggcggtggcggaacatgggacgacgggggcggatttggggacgggggattcgacgggggagggggcgagatggtgtgagagaagcgacggacgaccaaattgaacacaaaacataaacaaaaataaatgcaaaattgaaatgccgaaataggcacaaatccattctaaaaactacgcattgttttgttgtttttcttgaagccacaaacaaacaattttgctgaattcaccttttgaagttaagcatttgccagaaacgaaaatgcaaatttttgcttatgttttttacctttttgtttcattttatcaaaattgaaatttcctttcagtcgctttgtcaccttttattggaattaataaaatttacagaaatgcttgctgcactttttcaggagggtttttggtttcgcacaaattggcatcggcattcgttaagtgatgaaaatgtggtggtggtgatgctttgttttaaaaaaaataattttaaatttaacataaaattcagcaaacggggcaattaattaacgaattcgccggcaaagggagaaaaaaggaaaaattattgaagtttgaaaacatatttccttaagaaaattcatgaaaaatcccctaaaaaaaaatttttttcccggcggcgcctat

SEQ ID NO: 77360 - DNA, 1405 bp, Heterodera glycines
atgtggcacactgcgggccaggggcgaagcatttgcattggacgccaagggcttgacgatggttggcacccttccatgcgatagtaatgtttttatgacagtttatgtaacaaaaatagcctggtgaacttttacgatttaactgacactttgaaaattccaagggtgaattggttttattatttattcactttttccgatttttttttttttgtaattttgtaaataggtccaaaacaccatttttagctttgttaattcgtgaactgcccgcgagtgccgatgatttgtctgtccgtcatgcggttgtccgttttactgatgttgagccattgaacgtccgtttggccgcctcgcgactgttcgcattcattcaaatggggtcactgtttgacgcagaaatggcccaccataagctgcaacgaacatgtttatacatcgacaattgtgccggtaccgaaaaccaaaaaattattccttttttaattggctataatctgtcgaaatgccgttgcttttgtaaaaaagtttccttttccccgaaaattctgtcctctttttcaaaaaatcaaatttctagtaattgcacctaatcaaaagtctaattgtatcttagaaaacgtgtaatacctataatattaagatttactcttttgcctcgtcattttgcaaaaaaaaatttttttttaaatgccctgaaaaatgtctcacaattaggcggttttccttgtcgctgatcacaatttggcgtccattttcgaccaactccgaaccccggtctcgaactcgaacaaagagtcgaaaattcaaaaaaaaatttttttttttttttgactttgattttgcttcaatgcacactaaaaatatgaaaaattgaaagccatcaataaatcattttgtttttaatattactatttactttagtgtttgtctcattttctcgtcattcgttggccaaagttttgagcgaagggcgcattaagttgttgccagaaacgcaagaaggttttgcatatttattggatttttttccataatttacacaaaatttagcaaattttttccattttcagatgtccaaatcattgaccaaacaactcataatcagagttcttcgtcttccaccgcaaattcagtgaacactccgtttggaattttgccaatttgttgtatgaaattttttgtttgttttttaattgctttttgtttagctgagcccgacccagcaaagtttcaatatgagcatagctcgggctatttctacgacccggcaaccggcttttaccatgacccaaaaaccgaattttactactcggccaagagcagaagtgtaagtgttatcattttggtgtagcaaattggctgtaataatcagccttccccccccccccccgaaaataataaa

SEQ ID NO: 77361 - DNA, 323 bp, Heterodera glycines
tgacgaataaaaaagacatagcagcactttgatcaaagtgaataaagaaaaaaaagaagacaaaaaagaaatttttaaaattccataagagagagaaacagcagatcatcaacagacagttaacgaatttgaagcataggtaaatttaagaaatttttgttgtcgacggcacattcaattgttcgccgagagaagagaccatctcacggagtttggaacattcgcgaccactaaaaattaattaaaaaagagtgaaaaataaaattttaacaaaaaaaaatgctgcctgcttttacatcgaagcaactaattttttttttatt

SEQ ID NO: 77362 - DNA, 637 bp, Heterodera glycines
ctctcaacagcgtgctttctcagttcgttatcttcgtccaacagtcaattcgatcaagtgctcgctctcaaggccaatcgcccgctcgttctcgttcgcgattcgattacgctcttcgaaacggtatcgaaatagaaaactcgactcgattcggaacagtacatttcttaaccgatacatcggaaattatagggtcgaaaatttaatcaaattatcgggtttaaatcgttggtgtatttcgttcaaaaattctctatttttcttaacctaaattttctagcggcctagcgaaactcggctcggcttctcttttgcaggcggttgaactgtttcggcaaagtgccacccaacgcttgacagccattttccgtcaattgaacgagctgaagcccaaaatcagacaacgacagcagtgcgttcgggtggctgaacagcgcattgtccgggtcagtctcattcaattatctgatccgttgaattttaattttattacaaatttatttatttttcttttttaaagatcgctcaatcaatgcactttttggtgttcccaacaacaaacgctgaacaaacggcggttgacaaaatgggcgaagtgcagcacaaattgagcaaatgcgctgaacaaacagcgaag

SEQ ID NO: 77363 - DNA, 2368 bp, Heterodera glycines
atggatgcggataagctaaagcctgtgatggatttgcctatgccaacgaccaaaaaacaactccattctctgcttggttttctgacttattatagaaaatttatccattcattcggcacgattgctgctccgcttttcaaattgataagcgaaaaagctgaattcaaaatcggagaacaggaaaaacaagcaatcgaagaattaaagtcaaaaatcattcgagatgttgtgcttcattttccggatttcgatgcagcacagaatgacctaactaggcagtttataatcatgactgatgcgtgtaagaccggcattgcagcaattttatgtcagcctgatccggagaaacagattaggccaatttattttgcctcaagacaatgcaatgtccatgagtcacgctacagtgccaccgaattagaggctttagccgtcagatttggtgtaaaaaagttcgcacaattcatcactatgattccgactcgggtcattacggaccataaagcactaatttggatgttccggagtaaaaatgagacaggaaattcacgtgttgaccgttggcttcttgagttaagctctcgtttcatcctaaaggtggaattccaaccaggaaagaaaaacataattgctgatgttctatctcgttcgggaaaatcgaatgagagcgtcactgaatccttacaggaggaagacattgcctttattgggaaagttcgagtttttgaactcagtaataatgtcgaagatttcactgaacaccgggaaaaatggattgaggagaccaaaaacagcgaaatgcggccaatttatgagtttttggagaaaaaaattatgcctgctgatccgcgaattcgacagagcacaatggacaaatgccatagatttgtgttaattgagaagtttttgcacctttgtgaaaatgacggaaaacttagactctttgttccattatcatttcgtgaaaatttggtgaaagaacggcatgaaggaaagtgttcgggccacatgagcgccaaaaaattgtataaacaattggcagagttatatttttggccaaacatgttttctgattgcattcatgcacataatgcatgcagaatttgtgcacatacccgaaatgcacgttcaaatgaacctcccttaaaagtagttcactcatcagaaccattggaattggtctgtatggacattttggacgttgggccaagtcagtcaaacttcaaatatatttgtgttatcatcgatcatttcaccaagtacttggtcgctgaaccaatcccgaataaatcagcagattctgtagcaaaagtatttgtcgaaaaatttttgttaatctttggaacgccgaaaaaaattcactccgacaaaggaaaggaatttatgaacaccattttcaaaagaataagcgaaattcttgggtttgagaggtcctttacggctgggtatgacccacaggcaaacggtttggcggaacgagtaaatggagttttgattcaaatattaaaaaagtctacagcaagtaattggacgtgggacgaacgattaccgtactcagtttttgcttacaatataacgccatccgagtcaacgggtttttcaccatttcttttaatgtttggcagatcagcgaaaattccgatggataagatcaccgaaatgaattttaaccccttatacacaattgattatgaaaattattttcaattgtttttggaaaacctccttaatattcaaaatgaggccaaacaaaatttggatgagtaccggaaaagaagtaaagattggtatgatgcaaaacctcaagtgaaagccaataaatttgaaatttcggaacgagttatggtggcttttcccggaatgcatcgcaattcacgacacaaaaaattattgtggaatcattttggcccttacaccattacaaaaatctccgaatcgtccgccgaattagtcccagttgataaaacagctgctgaccctattactgttcctttggaaagactcataaaagtgccaaaggcagtccctgacatcgcaacattaccacggggaaaaaacccgtataaaaatgtgctaaatgcaatgattttcatgatttcggcccaactgaattttgaaaatatgccaaaacgtgcgaccgaaaattggcaattggggacaattgctaaagaatgtgtgagggcggataaatatggaaaggaaaaaagtagtgcaaaaattctcagaattaattgcctaaacctgaaattgaaggtaaaaagggaaagaaaggcgaatttttcaggacaaacgcaaacggacgccgggatttgttggacttcggtttgcagtcaaaaagatgccgagcacgaactctgcacggctctga

SEQ ID NO: 77364 - DNA, 311 bp, Heterodera glycines
atgcgcgactttttgcgcacggaccaaaggccgaaagagcgccggtgggcggacgacggcgaaacggcacagggaaaggcgccgcagcaaaagcaaagggacgacgaaaggggcgggggacaggcgcagaagcggcgccgaagacgcggcagcagcgctacggcacagccgacgacggcaccgcaaaagcaacgcgaaacgacggcaccagcgaatggcgccggcggagggatgggaacggaggaaaatgaacagcgaaaggaaaagcaaacgcagggcaacacaagcggaggaggcgaaggaggaacgac

SEQ ID NO: 77365 - DNA, 622 bp, Heterodera glycines
ctcgacggtcgtctgatcgccgtcgctgtcattgatctgttgccccactgtttgtccgccaaatacttcttctacgacccggacttcgccttcctctccctgggcacatattcggcacttcggttggcctttttgtccgcattactctcatttttaattgttttttttgtggcatttttcgtttttaaattttgttggcatttttcactttttcaattcaatttcccttgcgttcgttcagtgaaattgcgttcacccaacagttggcccaacatcgtcccgacctccacttctattacatgggcttctacctgttcgactgtccgaaaatgcgttacaaaaatcggtttcggcccagcgaattgttgtgcgaccactgctttaattgggtgaacaattcaattcaatttttgccatttttgttggggtttttgtggacatttatttggaaagggccccaattttgcctctttttcctctgttgaaatgccaaaaatagcgtttaattaaataaatatttttcattttgttaggtccccgtgacggaatgcgaccgaattctcgaggcgaacggcggccgtttcagcactttccacccgtccgctgagcccactcgtgccga

SEQ ID NO: 77366 - DNA, 384 bp, Heterodera glycines
atgtgccaatttctctcgccggtgcctttcttccttttgcttcttccgctttttctgccgtcgctttgtccctccattttggcacatcagaacaatgcttttgcagcagccgaaaatttgaacgaacatggccaaattgagcagcaaaccactaaaaacaatgacggaatgttgggcaaattgcgcgtggcggtggcgaacgaaaatggcaaaatggtggaaaagcagaaaaagcaacggcaaattgagggggaggaggaaaagcagaggcagcagcacaagttgatgatgaagatgagagaaggcgccggcactttgactgataaaaatgatgcaactaatgatgacaatgacaacaatgagcagtcggtggagacggaaggg

SEQ ID NO: 77367 - DNA, 288 bp, Heterodera glycines
gctcttcggaccaacaacaacaacaacagcatcaacactatcaacagctcccgtcctgctccaactcgggccgaccgtccgacgcggccgaattttttggagtcgctgctgaacagtgctcactgcaccatgaacttgcacttgttgctgaacacatgccgatgatgaacagcaacataatgacatgctgatgatgatggacggtggcagcggcggcgcacaatcgtacgatgtgccgtccaaggcattgtttgaggccgtgtgcaggacatttgaggaacgacgaca

SEQ ID NO: 77368 - DNA, 115 bp, Heterodera glycines
atgagaagaggtacaacatttgtcaaaagaggcacaacggtgattagaagaggtacaatcgtgattaaaagaggtacaaaagtgattagaagaggtacaacagtgattagaagag

SEQ ID NO: 77369 - DNA, 911 bp, Heterodera glycines
atgatggaccatgcgaactgttggttcggggtgggggacactatagtctggccgttatagtctgagccaagtttaaagtatcataacttttttctcagcgggccaaattttataaatttggcatcattctaaagccctatatgtttagtcgatggcaaagagaatggcgaatttttctcctccttctgacaacactgccccaaaaaatttctgtccgaccttgaccaactacaaatccccaaagaaatcgactcagacaactccattcccgactacgccaagttgcttattaagcagcttcattcccttttaagcaccgcctccgtcctaattcattcacaggctgcggctgtcgacgcggtcgaggaggaacgacgactgagaactgtcgttgtgacaaatgtgcccgaaagcaaatcggacaaagcggcggagagagcccgggaggaccgtgccgttgtggacgaaattttgaatgccacggacgtcgaccaggcaccaattgtcttccgcgtcggcaaacgaatggatggacgaccgcgcccgctcaaaatggaattcccgaccaaacatgcagcgcgacacgtcatccgcatgcgcggaaaggtgcaggcattgaatggtctccataatgtccgcgagagcatgaccaaggaacaactgtcggagcggcgaaaattgattgaggattgtgcgaagaaaaggcagacggacagcggtgattgggtgatttatgccaatcaggttgtgctgaggcaggacattgaccatattcgaaaaattttttaaattatccaaccaaatcactacaaattacccataattattatagaaaagtacaaaaatttttccggtcggtaaaaaatttataccaaaaaattacccatccaaacttttttacaaaaaataaa

SEQ ID NO: 77370 - DNA, 64 bp, Heterodera glycines
tgccctaccgagaccgggaccgggacctgagcttttcaaaacccgggaccgggaaccgggaccg

SEQ ID NO: 77371 - DNA, 973 bp, Heterodera glycines
caagttcgggttagggatagaaattggtcaaaataaatgtcattcgtgttaatctaaaatatattttattaacagatgaaccaacgtaatgtatactacatgtggacggtgagttgtattttgatttttaattatataaatgaatttatgaattggaaattgtaaatgatagattcccctttttttagattggcaacttttcccttcgtcccgagcaaatgggcgaatttatgaagagttcgacgttcaggtttttctttttaatgttttttgaattatgaaattggtccatttttggtacttccttgttttgctaccccctccccctcgaaaatttttaaaatttcaaaaaatcatagatattttattaaatcgatgactagcattgcccgtgggacttgaattttggatttttgtcacatttccgccttcttacgccgtaaaatttgtccattggttcagtgccggcccgaacgacaagctgaagtggtgcctgcacatcaacccgaaaggcctcgacgaagaatccaaggactacttgtccctgcatttgctgctcgtccaatgcgacgacgaggaagtgcacgccaaattcaagttcgccatacagaatgccattggcgaggagacaaaagcgctgggtgagtgaattaagtggagggaattgggacgaaatgaatggtgggagatggaaacatccatcgccacggtgtcctgcctccaacgactgacacagcacaccgtgacttcccaactctttcagtagccgatagttgagataaccatttctcctgcagattcgcagcgcgcctgccgatttgtgcagggcacagactggtgctttaagaagttcatccgccgcgactttttgctggacgaacagaacggactgctgcccaacgacgggctgaccatctcttgcgaagtgtccatcctttatgatagtgtaagcaattcatttatgtcttctttt

SEQ ID NO: 77372 - DNA, 1001 bp, Heterodera glycines; identical to SEQ ID NO: 2024
  unsure (1)..(1001): unsure at all n locations

SEQ ID NO: 77373 - DNA, 1545 bp, Heterodera glycines
atgccgccatatggtccggctcacaaccaacagcaacaaatgatgccaccgtcggcgctggtcggcgttccaccgggcgcagctgcaacgaacacttggatggattggaattcgtcagcggcgatgccaccacgcggcacttacccgatggcgccgacgaacgccatgaaggcgggcacacagacgggcacgtacattccgccgcagagtggcggaatgatgccaccgcctgctgggcaggtgccgtactacgccgttgggatgcccacgtcgaccactgctgtgcacggtcaaccgatggaaccggctgcataccatcagcaacaacagcagcaacattaccaagccgttcagcagcagtacacaaattaccaccagcagcagcagccgaacatgatatacaactcacagcaacagcaacaaatgctcttccatcagcagcaacaacaacagctcaatcaacaaatgatgatgcagcagaggcagcaacagcagcctaaaaaaacgctggggccgaatcgtgccggggacgaactgaggtagaccggttatttacatattatttcacgattgttcttacataaaaaaggaatccgtatttgagtatcatttaaaaaaaaacttgagccaaattatttcattaagtgattattaattaattacaaattaattaattacattggtgcagcatttaaactcgtagtgctcagcacagcaatcagttgacggttggccaagatttttaatgcaattgtaccatccgcagccgcaggtctccgctgcctttttgcactcgtcaatttgagcaatttgttttggcggtatctttttgaagaaagaaagtgtaaaacaatggcgcataccatagtagtggaaaaaatatggtacaaaaatttcaatcagtcatactgtagacgtaccggtggagccttaacagaaaacaaaaaaatttttatataaatatatatatatatatgatatcaagttccttgcgttttcgaggtcctgaccacgaattcggtatccatttcggccaattccgaccccggacccaaactcgaacaaaaagtcgaaagtccaaattttcgaatttagcatttttggttcaaaaatggcataaaagattccttattgaaggattgatggctttcagtttgtttccgggttttaaccttatttttaagaaaatactctaattcctaaaattttgacttttcgactgacgcattttctggtcacgccgtgggaacttgttggcacttttaaatttcccggtcgctaaaagcacgcggattgccttcacgcagcaagtgaagttgtaatgctccgcgcagcatgggctcgcccgttcgcccgctttcggaatgcattcggcccacccgcatgggcaagtctcccgcgcggctttgcactccaaatcgtgctcgatttgaggcttaatttttaaacgggggaccaattagcaaaacatcatttagagaattgtctaaaaagttgagtttttcattcgttcaattcggtgctttccgccgaccaaaacaaata

SEQ ID NO: 77374 - DNA, 1593 bp, Heterodera glycines
atgaattcgaccatttttctgtccacgatttgctgcttcctttttttggctttcaacaatctccaaagtgtcgctgctgtggtaaagcaagtgtgttttccaggcatagaaaactacgaaattagcatgtttaatgatcgagatgagtcgatagaagaaatcgaaacagaaacagttgtaacagacggcggaaaacaatgcttaatgcttaatgcagataaatgggatggatatgaagaggatgatgtgatttgtttctatgttgaaactgaggtaattcaaaaaaatttttaagcaactataaaaatatacaccaaaatcatttttgaaatcacctgttatttgattaagaatttaaaatttagcctattaaaatatttaggaaattttattatattttatattttttcaaaaaattccgatttgtgacttccgattcccgacgttttggggtcggaattctgatttccaactttcgaaaaaattttgggccgcggaattcctgtttccgatttccgaaaaatttttgaccctcggaattccgatttccgagaatttttagggtcggaatgccatccctgcccacggtactacacgaaccaatcgcacttctaatattccgtgaaatggctctaaccaactaaaattaatcaaaaaaataatttaaaaactaaatttattttataattttttatttttatctaaattcttaaacttagaaaattattttcaatttgtaacttctccaaaatttctattttttattttttgtggttgggaaattttcgtaattaaaattaaaaagaatttttactttttatgattttttcacaaggctttagtttcttttaacaaaaaatttccttttcttctaatttattttctctcaactccctcccccattcttaccattgcttaaaaattttggtttttctgcccaaattccaaaattcgaaatgaaatgatcaaaatccctgtgctactcgaaccaattgcacttctattatttcgtgaaatgctctaatcaacaaagctacaagattactttatttttgtccaggctccgccagtctcgccttgctcaactctttccgaagtctttttaaaccccaattttattcgagaggtaacgaattattatttttttgctaacttttcccaaataatataaaatgtcttggttgtttcagatgttaggttccgctccagtttctttattgagaactgatgatagtaactatgtcttagacttttcggaaggactgcgacattattattattactttaatcctgctattggtgggatggattttggattctgaacttggaagtgaatgtgcgatatcttggtgctatgacgtcactcaaaaaaccatcaaaacgacccggcaccgaaatctttgctaaaaatattatactctgttgatcgaattctttgctttgttgatgcctatattggcctgttgcataaaagatttttaaaattttgtatgcaattttaatgcttactgattggagcttcagtgattgatttggggatctgcagtgaaattgcaaaaatataaacaaaagggaaacaaaattttatagtca

SEQ ID NO: 77375 - DNA, 1028 bp, Heterodera glycines
atggaaacgcacgtggcaacggcgcagccaaggccagaacggcaaggcacctcgtttacggcgaagcgggcgtctcgggttccgccgcgcaagccggcctctgctgcggctgtggcgtgtccccgcccggattgcccggacctcccggcccggtcggacagcccggatttgacggagtgccgggagcacctggacaaacagggccaaatggtaagtgaaggggcgacaaattcaaaagagggagccaaatgaaggaattcatggagccttaatttgttgacatttttttaggccaagccggtgcgagtggtggcggatcctttggcgcgggctgtggtgaatgtcagcctgcccaacccggtctgcctggcccgcccggacttcccggtccttccggaaacccgggacttcctggcccgaacggaggccaagggccgctgggaccgcctggtccacctgggcctgatggtaagtacatcattctccaacagtcgccattgttcgtggatgcaaaattcccaatttaaggtcaacctggtgagtctggccagtctggccaacccggagcccccggcagaatcacagggtacggcccgacagtcgtcggacccccgggaccacccggacccaacggtaaagcgaaaagattgtcaaaaagacttaattttcatgggatttcagggtacccaggtgctcctggccaaccaggactgcccggctcgtttggacagcccggggggctgggacagcccggcgacgcgggaaagcccggcacgcccggaaaccccggagagaacggcggtccgggagttgccggcgaaattggaaatatgggcacatgcgaccactgcccaacgccacgcaccgccccgggctattaaacggaagaaaacagaacgaacaaaggaaattcgacgcagaaaacttctattttccgtaggaccagacgaaattcgttcagaaaatgtttattttattgtgctaaagatttatttgtcccaaaaatatttttagtagatttaaataaa

SEQ ID NO: 77376 - DNA, 81 bp, Heterodera glycines
atggagaccaacaagcagcagatcaaaaaggaggccgaggagctccgacggctcgcatttttcggcgttgtaatgtcaacg

SEQ ID NO: 77377 - DNA, 1161 bp, Heterodera glycines
atggagactggtagattattttgcaacctcctcagaaaggggtacataattggagaccggcagtttaatggagactggcacataaaaagagcaaatacggtaagtcaatgacttttttttctgctgattcgaaatgccataaattatttaaaaatctacactttgtttaaagcttctaactattatgcattttttttttctacttttaagaatttttttgcaactttttgattttttcgtgaatttttagttgacttttgatgttttttcgcatttaaatttctatccctacttttcgttccggcctaaaaatacacagcacagttaccagaattggtcgtccaaatttgaccttttttccgagttcgggttgcgcatggggtcgaaatgggtctaaatggatgacggatttatgatcagtggccttgaaaacctatgcatttttaatttaaattaaaatgaaaaattgttttgagttaaactgcataagagctgccaaatcgaaatcgaaaaaagagagtgaagaaatgagaatgaataaattggtactttactgttatgtgactaaagccaaatttcaaaaaatcaacaaaagggcgcgcaaaattcacacgataagctgatccatttgataaactttatcagcgatttttacattttttcctcccaagtgatgctgctgtctgctgtgcgattttcgcgcccttttgttgattttttaatttcgagttgtgaaagtccgggctttttgtttatgatggaaaatctctttgctgatgaaatgctataaggaatcactcggaaaaacaaagtcaattatataaaaaagcttagaatttgcggatattataaagcaaaattatattaaatttacgcctaattcctcccttttatcttttgggaaaacgagcaaaatttcaaaagaatgaaaattaaattctatttatacctacttcgatggattatttttttaaatgacaggtctttgaccacgatgttaaccggcaaagggtcagccgtgcgcaattgcccgcggtgattgacgagatcatgaacgaagcaaatgaaggcgccagggcattcattttggcgaatttagagaatgtccgaaaggttaatatggggttaaacggtcgggaaggctcggtcaaaaagaattag

SEQ ID NO: 77378 - DNA, 1477 bp, Heterodera glycines
atgcattttattttattctggtctgcgcaaaactctgagagtagtacaaccgagactgaattaatttcggggtttttagcgccatgtacaaatcacattttaacgaaaaggaacctgaatttttgcacaacgttttggaagtctaaggtaggggatacgaaaaccccaaaaagttaaaagtcgagttccaaaacctaggaagtctgaattaaaaatgacctctgatagagactggagacgggctattttgatgaaaatctgttaacaagtcacaacaaattcttcaaaatttcgcggagggaatttggacatttgtatgaaattggtttcggcagccccccccctccactagcagttatcgtcgttctaaatgcgaacgagaaaggcggtaatttgcgttttcccaaaaaaaaaaaaatttttttttgtaaaatttttattgttatatctaagagaaaaaaagatgaaaagctaagaatcttgtaaatttttaagaactgatagtagttagcaggaaaaattggtatcttcggcacaattaataataattttgaaacaaatgtctatttgcctataaatatataaggtttcgtaatccaatttttgaaagtagaactgagcgggaccgggaattttcgggttgaaaaaccaagacatttctgggtggtaaaaacggaaaaaaacttggactagtccggtcccggtcaaaatcattaagttctagagtttcggtttatttaaagaaaaaatgtagaaacaaaaacagacagcaaaacacaattatttgtttatttttaggtggcgattgagctgaacgcgatgaaggtgatcagaagggcgaagatggaggagtaagttactatttttttaaatcacacaggcccaaaatgtgcctatataaaatacgaggctttttaggccaaaaaaataacaaaagtgtgggtcagtcgatgccgacaaataccgccggttacaaattatgaaaatctgtggcccatttctttgcatatttttactaaaatttaaaaatttttgtatgaatcggatccgtgccaaaattactttttggtttttttatttgtattttctcttctaaaatgatttttatatcaatatttagtcattctcgagatttattttaaaattatcgaagaagttttgagaagttttaccattaatttggaaaaattaatgtgcatatttcacttttatgtgcatatattgaaatttggtagtttatattttatgcacatatttgcgctttaatacatataattccgaaaccgattctaaaatgaaaaccgagaatttaatccgaaaaactggttttaattaaaagcctgtggatatttttttaattatagctttctcttatttgtttatcagattgttgggaccgcaggtggcagggggccagctgaacgatgatggtgatgatgaagaaggagaggaggaagaggggtcggatgatgaatga

SEQ ID NO: 77379 - DNA, 876 bp, Heterodera glycines
atgcccgaccgggcccagacccggggatacccggctttttcaagaccggacctaaaattaattatctattatttcggtactttttctttttcactgtgccatattttttgagttggttaatttatgcgaaaatgaattgtttaatgagacgagtcgtcgttgtgggtgaccagaattggggcgctcaaaaaattctgtgactcatttgtcagtttgaaaattcctaaaatgtcagtttctttaaacgtatattcaaagcaaaatttatgacaaaattaagcattcacttaatatttgtcttaaatgttttttcataaattctttctaggtaattagaaaatctttttgatcaattccaaatatcggatcaggattcgagaaaaatccagacaggatccgatccagttgcggtaataattggcattttgcttctaatttaaagtttccaatttcttcaaatgattttttaggttacttgtgaataaaattcaaattttaaatcatttcgtcggttcttttctggggtcttctctgaatagaaagaaagtttcgttaaaattccaaaaaaaatgaaaccattagctggcgcattaagattgacttgaaattttgcagagagaacttaatattaggctatctgctgcaagctaaatttaatagattagaatttttttttacaaaaattctcatatttttagaacttgaaagtttctcgggagtgtcgtgaatttgattattatttttcatgttttacaaacatgccggtttttgtaaaaaaaaaatttgtacttgggcgaaaaattctgaaatttttcaggccgatgtatttatataaataattaaactgtaaaatttcatgtcatttaaacaaataaa

SEQ ID NO: 77380 - DNA, 860 bp, Heterodera glycines
  unsure (1)..(860): unsure at all n locations
atgaaaaaagaactcagtgtgaatggggataagcgacgtatgggcgagaaatataaagaaatatgcgcgaaacttggcgcaagttcacgttcaatttataaatggaaaaggaaatttggctntagtaagttgaaaaattagggccttaattttattaaataaaaagtcataaaaatgcgtataaaataggaaaatcttatgaattttaatttgaattcaaatcatgcagaggaaccaacaaaattaattcactgaccagtcatttttcattcctacacatcctctccttacaaattagtcaaaataggtccttatttttgtcattctgtgcctccatttatacaaaaaataaaaaaaaataataataataatattttcgtaaacaaatttttttcaatacttttatttttaatatttcctaggttaaattttttttattaattttaattagatctttttggctccaataaaaacgcatagattttaaaatttacgaaagttcgggttttcttgaaagtttttgttcttatatagccaaaaatgcctaaaatgtgaattcttcgtaaataatttatgagaaatatgtccaaaactcgaataaaaaataaattttcatgaaattgagtacaattaaaatcaaatgttcaaaaattttagaggcaaaaggacactcaaaaaaagaaaaaattgaaataatgaaaaggtatcaaaagctaaaaaaagaaggcaagaaattggatgaaattgcaaaggaattaaaaatcagcaaatcgaatttgagacgatggcaaaaggaattgaattttgaaattggaagtaattaaaaataagtcaaaacataaaattactaattaaaaaaa

SEQ ID NO: 77381 - DNA, 714 bp, Heterodera glycines
atgaaaaatgattatccgcaaatgacgaataaacaaatcttgagagaattacaagtgggcacaactctgtatcggtggcaaagcaaattcaaaattggaaatggaaatggaggtgaatttattaaatacttattcaaatcttcagaaaattgttacgatgattttgtttgggacaggaaaagcaccaaatatttttaaaaattggaaacgattctttggaaaataatatcttttagttttttactgttttaccaaagtgaatgtcatcgaaaatttaaaaaaaatcgttggtataaacaaaaaatagctaatttttgaggtgatttaaatgtaaaagtacaaataggtgatgtgccgtcgtgcagatagtcagcgcagtttttatgaaaccataaaatcacgaaaaattgctttacaacaaaaaacgaatttttctttcttttcgcgaacctagctaggagcttgataaaaactgaatttttattatcttgaaattaaactccgtttttcattgataaaaataataaatttttttagaaaaaactatcctttctgataaagaaaaaattaaaataattcacaaatttgataaaatgaaaaactcatatggaaaagacattacacaaaaagatgcaaaacaaattgcacaacaattgggctattgcatcagaacaatttataattggaagaaaaaattttagaaaaaatggtaaa

SEQ ID NO: 77382 - DNA, 98 bp, Heterodera glycines
ctccaacctggaattgctggttgatggactacgtgttcacgtcaatgccgctcagccagcagccgtagccgggtgggactggtaccagccgaccacct

SEQ ID NO: 77383 - DNA, 1143 bp, Heterodera glycines
atgacatcttctgaggacggcgatgaagcagtgggagaaacgaaacatgggaaatcggcacgaaaaatggccaaaaaccatctgccaaaggacgagttcaaacaggtcataggaaggaaaatattgaagcaccagaaaatgggttaaagtttttgggctagaaaaatgaacacccaaaaaaatttacctgaaatagaatttaaaaatgaggctaaattactttttgttttactttttgaaaattaagcataaaattgacaaaacccatgggaaaggaaagggttaaaaaattaatagattttgaaatgcattaaaaataaatagatttatttccttttttttatatttttctaatttttcactcttcttttgattctcaattttctgattactctaattttaacgtacaccgttcaatggagttattacagtaaggttattttcgtttttaccctttatcttttaatggattaattttaatattgttctcatctttatctaatttattgtcatcttcttcaggctttttcgccattggtgcccatcgaacttgcgcagaagaagtttgagcgccgcattgatcagatggagaagcagctttcagaagtgatcgccaatgtgcgcgaggacaattgtggggggaagaaaagagaagaagaagacgaagaagaaaagtgaagaagaaaaggaagaaaagtgcagaagaaaatggaaaagaaaaaaggaacaaaaaacggatcaaaaatgcgcaatttcttaacatcaattcactgcctatttaatgtatttgctgaagcatctttttaatgatttcataaatagctttggaaaaattagcaaatgtgcaaaaacctaatcaaagcaagcaaaaaatgaagccaaaaaaagaagtaacaaatgttggcatacggcaaagggtgtcatggcaactcgtacaattgcttaggtatgcctaaactttaggcctgcttgggcctaggctttgttttgtaaaatatgagtcgccttttgtacaagttgcaaatgacccaccgcaaattgccttatttcatgaaattgcttgagcttaaagcatgttgaaaccgttctggtaaaatccgccagttgtctttttattatcattgcatgaatagaaaatacaaa

SEQ ID NO: 77384 - DNA, 2327 bp, Heterodera glycines
gataatcatttgtccatactttaaggacgaacttaaagcaagcatacacttgtttatttatgtttccatccaaaatcaaatctttgacctttgaatttcaacccttcacccatgccatttgtaccttatcggctcaaaaccatggtatacgatttttggtagtgtaaccatttttctgtttatgtgtgaaattctaccaaaaaaggaggagcaacaacctctggcactgttctactaatgtccgggacaacatcagcaacaagcagcgctaataacactattaatactaataataacaacaacaacggtaacagtacctgtgtgaaagggtcgtcaacaacgcatacggtaacggcgcctccatcggacatcagtttgacggagcggatgaagcatttgctgaacacgggcaatgacgcggatgtgcactttttggttggcagcgatgacaaaaaagaggtgaggaaaatgccaaaaagaagagttataaattaggcatcagagattacgattaatttggcactgaaaacgaattattggaaaatcattggaaataaataaaattatattatttataataaaaatataaaaattttacttcctatgatttgattccctttgccccaaaattaaagcttcttcctgcgcataaactgattttgaagacggcctccaatgtgttcgaggcaatgtttcgatttgacacggaaaacttgaaggcttcaggaaagggtgaattgaaaaatttattttatttaaacttaatcaaatttgaagacccgcagagtgagataaagcctgtcgaagtgccggatgtggaagttggagctttcaaactgatgttgaacttcatttatgccgaagatttacgggagctgaatggggacaaccttttcgccgttctttatgcgggttgggaaattatcaattttctataaacattatataagtattatggtatttgttaatttattattttttatgaatcatttttgttttggtgtccgattcaaaaaatgtataacttttctcgaaaacactaaaattaagcatttttatatgtattattcatctattcaatgttaattaaaaaggctatgatcaaaaaagcaattttattttttttcgaactgaatatgttctacacaaaagtgattttagaaacgatttgtacactcactgttcaaatatgtataaattttaaaatatgactattaattctaaaataaaaaatataattcagctaaaaaatatggcgttgttgggctcgtgaaggcgtgtgttaactacccaaaattggacccgaccaatgtgttccttgtgctagcacaagctcgcttttatgaggaggaggttaggacaagagaaataataaaaaataaaattttaattttgcttttaaatttatatttattttaattttaggacctttcacggcgttgttgggaatacattgaccggaatgtgggcgctgtgcttttctccaaagaatttttgcaaatggagcataaattgttgtgtgaaattttggaccgtgatcagctgatcatcagcggtgaaattgtcatttggaatgcggtaaattaattgggcacaaatttttgaaattctaatttaaaaacaaagaaaagaaataatttgtgttattggttttattaacaattaatttaatctttttaattctctagatcttttgtagcttaataaacaaagaaaatatttcctttccaaagcatttaaatgttttaaaaattaaattttgattgttttgataattaggtacttcgttggtccgatgaacaacttcgccaaaagggcaaagaatgttcggtggaaaatcgtcgcaaaatgctcggcccagcattctttaaagttcgaattccgctcatcccaatgcaggactttgcggaaaaacttggtaaatatttaattaaaaggaatatttactggaaaaactattagcaattaagggggttccgacggtgccgaaggcgccgccggggaaaattcgaacttttgtataaatgtgtttacggactttatccaaaaacacagagtttttatatcaataaaaagataataaaattttgggcccagcggtgatgacaagcgccgctggcaaattttaaaatttaaattacattagttctgagtttttttttgatacaaagaaaagttttaaaatttttagagcttaattttggaaatttgagaatgattacgagtcctgtcgcaactacaggtggtgttcgatcaacattgtcgaattcgagtctggactcgagaaaaatttggatttaaggcctagtctaagggttgaaaatttt

SEQ ID NO: 77385 - DNA, 619 bp, Heterodera glycines
atgaacgaacggcttgaggcgaattatgacgtcgaactgtgggagaacgcggaattctgtcgtaattacattaaggtgtctgtcgtttactatatgatatgtcggccaattcattcgctttcacccccccccccccccaattttattccttttcagtttttcgagtcctttcgtcgtttccgtgcgcgatgcgatcgcgaccataagggcgtttcgatcactgggaattggcgcaaagctaccgaagccgaaccattgcaggaattcttcgatgccgattacattttgcacgatcgtcttgtctatgcggttaaaggcgctgagggaattccacgggaaaacggtgaagaagcaaacggagaagagaaagaggaaaacaaggagggaaaagaagcaaacagagaagagaaagaggaaaacaaagaaggaaaagaagcgaatggagaggaaaaataagaggaaaagattttattctgtgactgcatgttatgtatgttaattttggcgctagttaaaaagttaccgattttgaattctatcaaaaacaaaacttcatgattgccaaacaaaagggggtaatactttggtttgttccccccccccctttttttttgagaaa

SEQ ID NO: 77386 - DNA, 1158 bp, Heterodera glycines
atgcgaaaattgtcatcttcaaaatcacttaaagcttctacaacgcataacaacgagaaaaaagtggcatttttgacaaaaccaattaaaaagttgacagatgaagcccaacaaaatagagcagagaaacaacaaatggatgaggtgaagttgatcaaactgtaataaatagggctgggatttttatgtttttacatattttttctgcggcttagttatggcgagagaagcccaaaaataacattttctccgaacaattttcgaattagagcgacttataaaaacataaaaacacatattttggcgttttcgcacataaaaacatatcgcacatatttcggagtttcgcacatattttgcacatattttggcatttttgaaaaaaatatctaagaaaaacacaaaaaattcaaaaatgcacccctaaaaatcaactttcttgacatttttataggctctttcaaaattttctttatttatttcgtgtaccgaaaatcggattctccattaattcgttactggatatcgaagtttcttgctggaacttactcaactgatggaaaaataatctttaaaacaatttatcaaaaaaggactaattttacccccaaacacctccaaatgttttttatttgcaattgtgcgggcgaaaatgaaaagaatgagttttttggaatttttatgcaaaaatacacttgatttttccaattttgagcacatattttcgcacatattttggcatttttttttgcttacttatagcacatatttcagcattttttagcacatattttattacatatttcaggatttttagcacataaaaatcccagccctactcattatattgtatcgtgccgatgacgctgatctatttgctcattatattgtatataattcaccatttgtcctttcacccccacgcattcatttcggcacttattgtatactgaacacactcccaatttcctcctgattaatatgtatgtatttattgtgcttatgttcaaaactgcaaaaatctatgcttttcatcatataattttatcgatgaaaagctaaaatggatttatttttaaaaaaatacggaaatatgaataggatttataaaaaaaatccaaaaaaagccctcttagcgagcatgggatgataaataaa

SEQ ID NO: 77387 - DNA, 1574 bp, Heterodera glycines
atgccaccgccaccgatgggagccccacagccgcaacagcaggcgcccggaccggcaatgactccaagtgaaatgaaaaagctgaaatcttcaattaattgccttttccccccatttcagcgactgatccgaactacgggaccctcaagaacttggacgccgacatcttcacgaagaacgcgccagcaaaaccggcagcggcaccaaaggcgggacaggcgccacatggaggaggcggaccggcacagacaccaagtgaaaaaatggcgaaattttaaaattttaattctttttcatccccttttcagcgactgattcgaactacgtgaccctcaagaacttggacgccgacatcttcacgaagaacgcgccagcaaaaccggcagctggaggagccgcgtcgcagaagtcagccgccggaggagccatgtcgcagaagtcagcagcgcctgctggaggagcctcggcactgagcaccgcatcgcagaagaccgcagcggcaccggctggaggaacatcggcactgggcaccgcatcgcagaatttgacatatgattttcctctggattacctgaacatgagttcgcagtggggaggcggacggccggtaaagccggcagcggcaccaaaggcgggacaggcaccacatggaggaggcggaccggcacagacaccaagtgaaaaaatgccgaaattttaaaattttaattcttcatcccctttcagctactgattcgaactacgggaccctcaagaacttggacgccgacatcttcacgaagaacgcgccagcaaaaccggcagcggcaccaaaggcgggacaggcgccacatggaggaggcggactggcacagacaccaagtgaaaaaatggcgaaattttaaaattttaattcttcatcccctttcagctactgattcgaactacgggaccctcaagaacttggacgccgacatcttcacgaagaacgcgccagcaaaaccggcagcggcaccaaaggcgggacaggcgccacatggaggaggcggaccggcacagacaccaagtgaaaaaatgccgaaattttaaaattttaattcttcatcccctttcagctactgattcgaactacgggaccctcaagaacttggacgccgacatcttcacgaagaacgcgccagcaaaaccggcagaggcaccaaaggcgggacaggcgccacatggaggaggcggaccggcacagacaccaagtgaaaaaatggcgaaattttaaaattttaattctttttcatccccttttcagcgactgattcgaactacgtgaccctcaagaacttggacgccgacatcttcacgaagaacgcgccagcaaaaccggcagctggaggagccgcgtcgcagaagtcagccgccggaggagccatgtcgcagaagtcagcagcgcctgctggaggagcctcggcactgagcaccgcgtcgcagaagtcagccgccggaggagccatgtcgcagaagtcagcagcgcctgctggaggagcctcggcactgagcaccgcgtcgcagaagtcagccgccggaggagacatgtcgcagaa

SEQ ID NO: 77388 - DNA, 72 bp, Heterodera glycines
atcggatttttggccataatcggaatcggcgatttaatcggaatcggattttgtctggctcggcacatccct

SEQ ID NO: 77389 - DNA, 2367 bp, Heterodera glycines
aaataatgttccaagaagttaacactaagccgacaatcatccaaaaggaagcaatgccaaaggccaaaacctgatgacatttatgcggcactcaacggagcagcatacttttcaaatttggatttaagcgacgcttatttacaaatggaacttgacgaacaatcaaaacagctctgcgctctgaacacgcatcgaggattgttccaatgtcaacgtattccattcggagtcaaatcggcaccatcgatttttcaacatttgatggaccaaatatgcagtggcattccaggcgtttttgcttatcttgatgatgggctcattgcatcaaagacaatggaggaacatgtgtcagcgctttaccaacttttcgcgcgattcaatgaatatggcctccacattcaactggaaaaatgcaaatttcttcaaaaggaattgcttttcttgggccacatcatttcttcagaaggaattcgccctgacccaaaacgatcagaagccatttgcaaaatgccgccaccgcatgagaagacgaccctccgatcattccttggagcattaaattattatggtcgtttcatcaaggaaatatgccaaattcgtgcgccattggaccaactgctcaaaaaggatgaaaattggaaatgggaggcagaacaacagaaagccttcgaaaaggcaaaggagattatgacgtcggaattgctactcacgcattacgacccgtcattgccaattgtcgtcgcagcagacgcttccaaagatggaatcggcgcgacaattagccacattttccccaacaaaagagaaaaagtgatcgaacacgcatcgtgcacactgtcgagcgcacaacgcaattacagccaaatcgagaaagaggctttggcactcgtttttgcagtgcaaaaatttcacaaaatggtgtttggcagaaaattcactctgctcaccgatcacaaaccgctgctggccatctttggttccaagaagggcataccaatttatgccgcgagccgactgcaaagatgggccttaattttgtcaaattacgagttcgacatcaaatatgtcaacacagaagcatttggccaagccgacgtcctttcccggctaattgcaaattacccaaggccagaagaagacattttgattgcaaacatttgcacagaaacggaatgcttcatcaatagtgtattccaagtccaaattgatcaattgccattgacagcggctgagattgcggatgcaacagctaaagacgaaattctctcagaaatttcgagactgtcaaagaatggttggccaaacaaatgcagcaacccgaacatcgctccattcattccgaaacgagacgaaatcgtggaagtggaaggttgtttgctgtaccaacagcgcgtcatcatcccaggaattctacgggatcgagcattgaaggctttacatttgtcacatccaggaattgtgcgaatgaaagcgctcggacgccgtcacatttattggccaggattggattcggaaattgagaaaaccgtcaaatcctgtgaagaatgccaaaacgcacagaaaaatccgacaaaaaacacactcggtcaatggacgccaacaagcaaagtcttagaaagagttcacattgattttgctggtccatgcgacgacggatttatgtattttattatggtggactcctactcaaaatggcccgaagtctgccaaatgaagagcataaattctcaggccacggttggtttcctccgatcgatcatttacagactgggagtcccggaagaaattgtgtcagacaatggaacataatttagatccgccgattttgccaaattttgcacagaattcggcatcaaacacactttcaccccgccataccatccacaatcgaacggacaggcagaaagattcgtcgacacgttcaagcgggcaatgaagaagtgttcgataaatgacaaagattgggccgagaaagcgctcctttcttatcggacgactcccaatgcgacatccaacggctactcgcctgatcaattattctttggacggaagctccgtaccaaaatgtcgcttgttcacccgaggggagagccaattgaacacattgatcatgaacagatcaaacaggcaaaaagagaatatgcttcaaagatgtctgatcaatttgacaagaagcatggagcaaaacacacggaatttggtccgggtgaccccgttttactcctcaattaccggaacaacaaatcccactggctacagggcacaattttggaaagggttaagaattccccaacttttcgagtcaatgtaccgatcttgggaggaagaactgtccaccggcacacaaaccagctgcgccgacgtctc

SEQ ID NO: 77390 - DNA, 1218 bp, Heterodera glycines
atgaacgcggcacaattggaacaaattttgaacgctgtgcttacgcaatccgaaacaaggatgcagcaactgcttggaaatgcagtgccagcgaacaacaacctcaacaatgccaatttggcgagttcaattgacgcccgaatttcgaaattttattacgacgcggagagcggaaacacatttgaacaatggttcaaacgttttcgcacactaatcgaggacgatggaaaagacttacctgaagcgacaaaagtccgtcttctattggggaaattatcggacgaggactacaacaaataccgagacagcgtaagtccgacccaacccgatcaaatttcatgggcggacactctcgacaaattgaaaagtttgtacgccgaaacacgatcgctatttgtcagacgctatgagtgcttcaaaatcagacaacagccaaatcaggacatcacttcattgatcgcacaaatcaatgcgtcctgtgaaaatgcgaatttgagcctcacaaaggagcaactcaaatgcattattttggtcattgctcttcgagatgagcatcacgacctgcggcaaaagtgcttgaaaatgttggaggatggccagaaaaacggcaccgacatcacactgaagcaaattgaagaagagttgcggaccatccaaatggtaaaagaaagcgcactctcgctaatggcacaacccgccgcaacaaacgcaattcacacacgtcctcaacagtggaaggactcaaaaggaaagtcaaaaccttttgtcaaaactgaacaacggagtcacaaccaacagaattgttctaaaaatgtggacaaaggcaaacaccgacagccgactgacccatgtccagcatgtgggtttttaggccattggcgatcggaatgcaaattcaatgatgcaatttgccacaagtgtcagaagaaatgacacatcgacaaagtttgcccactaaagaacagccagccattcatcagaaaaggccgatcagttctcacaattgaagtgaacacaacctgcacagaggttggaactgctgatcactggtattggcgaattttgatcgcagtcaacggcgttaaatacggattaatgtcgacactggtgctcaagccaccatcatcaccagcaaaacgtggtgcaaaattggcaaaccgaaattgtcgcctgccgacattgaagcaaggaactgcaatggagaagcagtaccgataa

SEQ ID NO: 77391 - DNA, 1476 bp, Heterodera glycines
  unsure (1)..(1476): unsure at all n locations
atggcaatgccgccaagttgtcttaagcgttctccatcagtgtcaaattatgggccagcaaaaagagttaaatttaatgacatattgcaaatggaagtttatatccgaaacccagaggaatggacagcatttgatggtattgttaaagtaatacatatccaatttgatgttaaatttaagttcaagttgaatcacaaccgaaccttatcagtggcgaattttttcatgccgaggaaatgcgacgcgaaagttaccccaagggagagaaggtcagaaaatttatatgaatcaattgttgaattttgatttaaagtggttcctttacactgtcgacgacgcttttcagcgtgttcaacaggcgggcggaaacagcacagccaaaattattgaagaagaccgaattagcaaactgaaagagaagcgttgttccactgaagcgggtccgagcgggtaaaatgatttgttgggctttgttcagtccacaaatgtttcgcatttcagcacttctgtccatgacaatgagttggagcttctcgaagagaaggaaaatatcgagtccgttgacaaagaattgccaatggaaattccacttggttggtctacagatttattccttactaaattttcattgctttagaatttgatgacagtgagcaaatgcaaccatcggctgactatttggaaggcaacgaagacgaacaaatggcgggcccatcaaacggagagggcgaggaaaacaatcggttagaacgttttttattgagttttaaaataaaataactcaataattccaattaagaaaaaacatatcgacgaattctgacaagaagaggcagctcatgtccgaaatatcgtccattcttgtgtccctccaatgactgccgataaatgtgctgaagtgttggaccgatctggcaccaaccaaagttcacggtgaaagcattggaacttcaattagcattatacccattttattacggcatttttaactgtgaatgttgcagcgaacttatcgctgaaatgctcggcttgctgcagtcgccgattccgtccaacgaaaagagcgaaactgaacacatcagagaagaggaggaagagagggcgacggaaaggaaggaggcgagggaggacactctaaccgacaaaaagtcagtgcaatttgttaaagggaacctgaaaaccttttttccctaattaaagcgattttctgaatcaatcttccgagccggaggacagtgaagacagcaatttggttgaacctgccggacaagtcgttaaggaaaggcaaaaagaaacgcagcaccaaccgacaagcgaaagcttatttgcgaacggactgaacatcacgcaaagaagggacagcggaacggacgaattgcaaatggaggaggaagaacagagagagaaggagcaaaaagggagggaagaggaggaggaagagactgacgatgacgaaataattgtgattgagcagan

SEQ ID NO: 77392 - DNA, 417 bp, Heterodera glycines
atggaagcaattctaacaaaaaagaaccgtaccaagcttcaacacaacggtcattcatacatttttcacaagccgagtgccgatggtgaagttcacttttgggcctgtgaacaccatcacgcaaaagacatcactttcaaagggcgccttcacactaacctcaacaacaacgttttgcgtgaagttggaaaccaccagtgtgaaccaagtgcagctcgaatggaagcacaacgagtgatcactggaatcaaacgccgtgcggaacaaacaatggaaccaccagcgacaattcgctcattggcactgcagaatgtggccacgccagtccttgcgcaactccctaccaagaatgcgatcaaaagtttttttttgttatgatatttttatgcttaggtaatcaagcgtgtacgtcatgaa

SEQ ID NO: 77393 - DNA, 251 bp, Heterodera glycines
ctatggcacccccacaaagtgtccaagccacgaaatgtccaaaagagtaaaaacccacgaaatgtccaaaatttttcaaaatttataaaaacaaaatgagtctaatttaggatttttaaggttttcggggtcgctgaatacgaatataccctttatattaccccttgcctaaccttaggcccatctgaataataaaaaactcaaattcgagacttggacatttcgtgggctggacattttgtgggtcagcg

SEQ ID NO: 77394 - DNA, 643 bp, Heterodera glycines
atgttagcgggtcgccgaaattctgctacttctattactatcccttttaccgtaaccgatatccgtcctaccaatacaatcggtgtcgagtaagttgttgcgatataagaatcaagtggtaaaacatttttcatatttactttttttttaacaatatttattctcgcatcaattaattctcgttaaattaatcggtatgtgcattaggtaggtaattagtttaattacttaccgtaatttcttggacaaaacaatccatccattccatgcatccttgcttattattaaactatgctttatcatttagaaccaaccccacaatgattgtcttatcatttttagacttatgcttctccctacgacaaacactcctcaaattggcccgagcatcatttcaagtcatttttacacatttttatttgtatttttttatatttatttttttctcagttaccctttttcgttgagtgggtataagccatgctcattctatggctcttacacttatgcgccgtatcgaccgaataagtaagtttttattgcatctgagcaatttatcaacgatgaattttgtttattaaggagcccatctgggtactattatggatggtacaatggcatctcgggattctgagcaaataaa

SEQ ID NO: 77395 - DNA, 201 bp, Heterodera glycines
gcggcggatgggatgagcgcattttgggcggtcgtgaataataatgcatggagagaatgagtgaagaagaagaagaagaagaattcgggatggatgccaaaaaagtaaacattcattttcaattcaaactattgaacataaacaaaacaatgaatttctttcctggtcattttccaattaaataaattgaaatatttacca

SEQ ID NO: 77396 - DNA, 435 bp, Heterodera glycines
atgttccatttgcgtttcgttgtgcttcttctgctggtaattgtcggccttttcattggccccaattttgtttctgctgattgggataaaaaggtggccggttgggacgacaagaaagtgaacaaaggctgggaggaagccgaagcaccgctcaacatccgtgcccgtcgtcagttttttaatttatttaaattccaatttttaaattccaatttaaatttcattacaggcggcggatgggatgagcgcattttgggcattcgtgaacaatgaatggagagaatgagtgaagaagaagaagaagaagaagaattcgggatggatgccaaaaaagtaaacattcattttcaatttaattccccctttccgcccccatttgagcccctttttccaaatttcaattatcaaatgcataaacctgttctttctctccca

SEQ ID NO: 77397 - DNA, 283 bp, Heterodera glycines
ttggtacaacccgaacaatccattccgccgtgacccccaactccgtctgttcaccatcccggcactcgtttgtctgttccgtgccggtgccaatggcagttggatgaacacagcgaaagacttgtgccaaatttacgagtcagaggaccactttgccagtgtggcaacgttggagcgcattctgacaaactttttagacattgcagctgaacgccaaggaatgagtgtcagtgagggacgataaaaagcgatggaatgccaagaaattgcaaatattttcaaa

SEQ ID NO: 77398 - DNA, 1279 bp, Heterodera glycines
atgccgggattccgacaactgaaccggaatacgatgcagaaatatacatccatcaagtgcaagggttatggaacgtcaaatatcccggtgagtacaaaattttcatatttaacgattaccagatacgaccaatcaccaaatctgatgtcaccgactaccaattccccattcttctctaccacaacaacaaccactttgacggcatcaaaaccctgtccaaattcttcaataaacgttactattgcctctcttgtgaaagcgtctacgagcgcaaatctcaacattcaatgaattgctcttcactctgccatggatgtcgggaggttggcgtcgactacccatgcgagccacaacagggatacttcaaaaaatgtgagcactgcaacaacaatttctacaacaaggtctgctatgaacgtcacctacacaaggatctatgcaccaaatttcagcgatgcgaggactgtggggtaatttataatgtaaagtatcacggaaatgtaggtcaccaatgcggggaaaagttttgtcgactttgcaagcaattccatgtaaaagaggatgatgaggataatccgtgcagtagctgcttcatccaacccctaaaaccccataaacttaaaccatacaggatcatcgcttatgattttgaagcgacacaggataaaaaagtaggtaataaattcgaacacgaggtaaactttgcagcggctaccatcatttgtaccgattgcattatcaacggcgactggaacaaatcacttcagggaaaaaagtgccaaatttgcggtcttcaccgctcaatcaccttttcaccctttgactacacggagacaacagtcgaccaaaaaatcatcactcaacaaccgctacgcgaattcgttgaatggctcctttttgaccacaacaaaaagtttccaacagtcgcgtttgcacactttggggggcgctacgacatgacgatgatcatcaaggaggttttggcgcaaggaattcacaatccggacatcatcaaacaagggaaccgactctacgaactcaaaattaatcaaaatgaacatggaccgcttacaattcttcacgacagctacaaccttatgcccattaaattatctggcctcatcaaatcatttgggcttcatataaaagataaacaacattttccacacatgttcaacaaatcatcaaactatgacaacattctctcccatcttcctccacgtgaacaatactgtcctgatcaaatgaaaatccccgatcaacagaaatttgacaaatg

SEQ ID NO: 77399 - DNA, 742 bp, Heterodera glycines
atgcaacaccaccaccaccaccatcatcatggcacggcaccatccgcattcacgccactccaacaacacaagcaacagtcgccagcggcaacaattgtgccacaaggtgagagaatatgcttaacgaattatcgaggctgatcattgatcagaaatttggcatttttccgtggtaatcaataacctccccgagtactcatttttctggttcccaatttcctaaaaaaaaattttcaatgcccaattttctgtgttgtatattcacatacccttttcttctattctaggtaccagaattttggcgtttaattatccgtaattcctcactttccagtgccaaatttgaagaaaatttggcactcagttttccccgtactcaattctctgggtgccaatcagttgtcaaagaatctttggttatccggcacattcaatttgtggcacccacccaatttccggcactatctctctctgctgggaactgtccggcccggctgcgaaaacttcatttctttgcacgtggcgtttggccaatatttttttatttgttggccataagtatgtccatgagcttcttttcaggattagctttttgcgttatgttgccttaagcagccccccatttgcttactcagccacataatccgcttctttgcgctgcttggccgacgatttctcgtcattttaatgccactttttctccttggcacaaaaatctttttttggaattttgataattgga

SEQ ID NO: 77400 - DNA, 557 bp, Heterodera glycines
tttgtggtgccattttatgatgcctggcgaaaaaaaaatttgtggtttcaagaattgagacattatcgagagagccgagggaggagagaatggcgactcaaaaaccgcgaaaagacaggtgaaggccaaaaattagtttagagaattggtcgggaatggggactcaaaaatattgaaatgacataaaaagccaaaatcatagacggattgtcgaagttagggactgaaaattcaaatattttggatttggaataccgaaaaatttgagaaaattaagagcaagggtggggagaatttcggataatttgagaaaattcagagccatttgaattgaaaactaaatcatgaaatttagaagccttagattcaattgctcgggattcaaagaaactaaatcataatgaaatatacagaaaataggactaggatttaaatgtgcctaagtttgggaacgtgaaaacctatagtgaaaggctttcgagatcgttaatcccggatttcaagaatgaagatccagaattaaaaatttggccccttgctcaagactgaaaaagcca

SEQ ID NO: 77401 - DNA, 414 bp, Heterodera glycines
atgtgtcaaaaaaaaagtgccgtgagaaaagtggcggcactgactttttacgcgcgaatggtacggaaaatgttttatgaatgcacatttttaattttggcaggtttatgtgcgaaaattatgagccataatgatcaaaaccaaaatggcacggcataaataatgccaaaaaagttttaaatcctattgtaacagttactgtattattccaatttgtcaattttttgagaattttccatattttttttttttgtaaaatttccagggatatatcatatccaatgaagatatatcatatccaaagggggagagcgaatgttggcactagaaattggaaaagttgcagaaaaacggacacctccagaatattgggcaccataattatgacaacaatttatttacgggtaaaataaa

SEQ ID NO: 77402 - DNA, 2015 bp, Heterodera glycines
atgccgcccatttttgtgcccagtgaattcactttgctgctgatcatgtccctgctcatcttgatgacatcgaacaattatcacaatcattatggccccgtgttggcccaatccgacttggaaacggcggccgatttaaccattttcagtgagtttttatttttattttgaatctaccgacaaattttcaaggacataataaggacagcgatttgatcggggcagaaatcggcaaattttttcggtctctgattgtttttccgctcaaatgaagccaaaatgtcaaatattcggggatttttcgtttttttcttttctttttttttgaatttgccgacacttttcaaggacacaaaacaaaaatgacattgtgcctatcgatcaaacacaaaaaaccaaaactatcaaacccaggaccaaactagattgtcggcacattcctttgatcttcttaattacccgctgccctcattaattatccgctaattgtccatccccttttgctttcagccaatcgtcctcccagggcacgtctctttgtgggcaaatcggcactgcatcaccatcatcaacaagtattggcaccggtgatagccgcttctcctccttcgccaacaacgttggcacaaatgatgcgtgccaatccgttgttggccacactgagcatgttcaacgacaacaacaacagtgacaatgacgatatcagcatcaacaagctggagactctcgacattcggcatggtagccgatttggcacagaaacaacgacaacaacagtgccaaagacagttagcatgccgtcattattggcaaaaagccaatttaagccgacaacggcaaaagggcgtagcatggtaaggaaaatggcactgtaaaacagtcgaatattgattgatcaggactttctcgaggagttaaatttgaaattccgatcggacttccctaggaatggatttttcatgaaattttggatttactcgactttcgggcctggattttatagggtttttagcatatgcgaagcaaattttcggatataacaaaatcactaaccacaccaccgaatttcagcagatggcggcaacggcaaatgcgtcgtcctcactttcggattcaatcgccaattttggcacaacaaaaacgacggcaccgccgcaacaacaacaacagcagcagatggataattttgatctgctataccaaattttcaatgtgtcaatgttcgatttggctgatcagcaggaggaaaagccggaggtgttgacaaaatttgggggaaaaaatgaaaatgccggatttttttaaagaaaacttaaagttttgaaatttttggtctttctacaaggctatgcgagtgtctcgagtcggttcccggactcgtgaatttctcggttttttgggtcttgggttttttttttttgaatttcgctagatcaattcccgctcttgaccctctttaaagacgaaagggagcaggacaaaacgtcgccgccgaaacgtcgccgggacataacgtcgccgcaaaatttttttaattttataaaaaaaaatctagaaaaattgtgataaatttagttaactagcttaatacgaaaaaaattctagaaaaattcaaaaaaaaaatttctatcaagaaaattcaaggaaattaaaaaaaaattttcaagttttttggtttttttccgaaaattcagcaaatttagtttttattaacacttagattttcaaaaaactaaaatacttttaagttttcttgaaatctagaaaatttttatttatttttgcggcgacgtatgtcctggcgacgtttcggcggcgacgttttggggtgtatcccatttaaaatggctactatttttttctacaattatatttcttcccaaaaaaaggaagtcgatcagctgccttttttgcttccattggtaactcgcgcggaagagaggcgaagatcagaagcgtcgaaacacagaagtgggcaaaagcattaagtgatcagattgggactgaaaaataaa

SEQ ID NO: 77403 - DNA, 1334 bp, Heterodera glycines
atgctccatttgccatttgaccaacactccaagcttcatgtacggccaaatgtgtcgtgccgtgaagcaatctccacaatactcaaggttggcacaaattattttatttttattttttggcccagtcggacatttttttcccattttatggtcataaaatgctgaaaatggtatacaattaacacttttgctttgaagcaattttgacaaaaaagtttttgaccaaataaaggggcctaaaagttaattaatgccacctttcgaagaatgctgccaaattctgttatgatcaacaaagaacaaattacgtggtagggcattcgcttaaaaaatgacaaatttttgccacttttcgggacaatttttcaaaacatcttggtaaaatggggtcggaaaattctttgaaattttaatgcaatatgaaaagaaaattgtgcgaaattttctaaaagtgcttcaaatatcttcgtaatgttgtgtgcccatagcatatgcaatttgtctcgaatttgccatttttcccacccaaaaaaaaaaaaaatttttttttcaactttcagaaacgtaacattgtgccggagatgtgcacagtgtgcgtgtccgaggacccgcaaagtgaacagattgacctgtccgttgagttggaggtgctcgcccgccaattggtgcgtaaagaattgtgggtgcacagcgaggtcagtaatgggtgaacgggatggacatggacattctcccctctcgccacatgagaaaattttgaaaagttttaccaaaaactaataatttttcattaatgagaacctaggaaattaaaaaaaaaatttttttttttggaaaaaaatgaaaacctgaaaaaagtaattaatttacacttaataatctctaaagatttttcttcgtttccatgattttttgggcttaccagtggatagaaaattcttgaaaaaattaacgatttcaaacaatcggaattgggggtagaaaaaaaaattttccaggtccgttgatcatgaaaaaaatttttccaagatggggtgatatccaattttgagcatttttgggttcatttttgaagcatttaattgaaaatttagtcgtcccgacgcattcgacacatttttccatgtttttcccccagtgtatggagctgttcaagagcattcaccacgaatttgtgccaaaaacatttctgtccgtcacttattgcggcgtgtgccggcgaatgatcattttccagggctaccgttgtgagaagtgccaggtttgtacaacaacacacagacagagttttggcatttttgttgaatttgccaatttcgatgttccttttaaca

SEQ ID NO: 77404 - DNA, 1521 bp, Heterodera glycines
atggaggaacagttgcgcagcgtttgcgaaaaatacgacggaccgcacgaggaaattgcgaaaatactcagcaatttgttgcccacaacatcggcgacaacaaacagcaacaacaataaccacagtgccaatgccaataataatagtaattttacttattttcttggaccaaattcattaaaaattccaaaaaaaaaaaaaaaaaattcaccaagcagcgaattttattttttgaggcggaatttttggggaaaaattgcaaaaattgacaaaaataatggaaaaaatgcattttatttttatgaagttaggtattaggcatatgcaaatgttgtaaacaggtttcattgaatttattaaaaaaaactaacaataggaggtgagtctccaggttcttccgaaggagggtggaaaattttaagcatttttatgagaatttttcaaaaaaaaaaaaaaaaatttttagctccaacaacattgacaccgcgttcttccgagcggacaacaatggacagcaacgccgacattcattacacacaacagcaacaccaccacaaccatgtgcagcaacagcagcagcaccattttgggtatgatggggttttttttttgaaaaatgcgttgcaaatccaaaaaaaaattttttgaaaatttttccaacgattttttgtttttttgggagaacttgaaaaataagcattcaggaggtggcactggcacctcctactagtatttaaacaattttcaattcctctccaaaaaattcagagacaacagcgccgccgctagtttaacggctgtgcatgagccgtgcaattgcggtggtgacggtggagcagcaccagcggtggtgggcgacgatgggacgacgacggcggaaacggacaatgaacagcaaaaccggcaatgccatcatcatcatcagcattgctatcaccaccaccaacaacagtgccaatgccaacaagggcaccatcattactactttgacggccgaacgcgggaccgttcctcgtccgcgccgaacattaacagtgtgatccgtggcggtggtgtcggtggtggcattatgggccgtggcggtggtggtgggatttgcttgaagttgcacaccaactcaatgcactccggactgcacaacatcatcaacagtgagaaatggccatccgaaaaaaaatttataaatttttaaaccccacgcggactcgaaccatcagtccaatatgacagccgtcagtaccacttgaccactgtatctgaatggaaaatgcaggggaaaatttcgattttcgaggcccaaaaacaatttttttttttcacagccgctaattttccaggcatccaattcccgcccaactcggccggcatgtgccgtcgttctcagaccccgaccctgttgcatgaggtggagtgttcaacgacggttgtggcaaatgttggcggtgccggcggtggacaccatcgccatggcaagggcagaggccaaggcggcagtgccagcaccacgacgcagtggacttg

SEQ ID NO: 77405 - DNA, 384 bp, Heterodera glycines
atgccttcttcattgaacagcgaatacatcggagcaaaagtaaacacattgtgatgttgatgatgggagaatggcatgtcgagggggtaaatttgcatacgacggcacaaattttcgcgactttagccaatttttgagaaattttgattttaggcgacgctgggaaatgttagaaaattttacttaattttgagtcgaattttggaaatttttttgcagagttttgggaccggtgatgctgctaggcgacacgaaaggaaaaatcaggcatttttgcccatgttttaatagtttttcaacaaaaatttagccttttctatggtaggtacaggtcacacgctgcggtacaccccaaaacacagccgagacataacacagccggga

SEQ ID NO: 77406 - DNA, 1101 bp, Heterodera glycines
atggctccattgactcaagctcaaactgagcaagggcgcattgactctttatcaagtgacacccaattggaaaatgaagcaattttggtccaagacagggatgtcgcccaacaaaacgaggaccatggtcagtcttcatattcaatctgataacttttaatttgtttttaaggaccaaaggcccggggacgcccgccaaaaaagacaaggggcccaggccgaacgaacataacaaacactgctgggaatggtggcacccctttgtttgttgacagcccgtccggtaggggcgacagtggtgtcaattcacgcagaattgtggtcagattttcggttgtttttaaaattaagcatttgtttaagctacgatccaaacatatatgccaaatcgaagagagactttacaaagtgctttccgattattctcagcgtccttggcccttaaagaaccaaggtgggttttgaatattttcagccatttttcaaattttaattgtcaattttagctaaacataattggactcgctgcaagggcgattgcgattgtacgtctgctgctcaatgtcaacagaatgcgcaggcctacattgcctctgcaaaatatgaccgtgaatttaccccaaagaagacaatgccgttgaaattgacgaagatggcaaaacagtgtcatcataaacatgcttgtgcttcttctgggacaaatcacagggtggattagattagggtacctcaattatcttttcatttcaggttgattattatgacagcggtcaattcggcgatgcaaactgtcagcattgtggtgctgttttgctagccaatgaagcatatgcaataagaaagcaggggcgtgtgtccccttgctgttccaatggccagtgtcacaccgagcaaatgaaagcggaatttgccgagctgcaaaaccctcctcaaaaattgaaagatttggtcgcggctccggatgaacgcatccgttttgagtttttggacaacacaatgccactcaataatactttttcgtttgcatctgtccatagcgagaaggcaccagcagatcaaatggcaggcagaatggataccgttaaatataatggtgattag

SEQ ID NO: 77407 - DNA, 427 bp, Heterodera glycines
atggcatgctccatcatccaatcaaatttggtgaatattttgatcaaaaaagaaggtaactgatctgataatccgatctgattataaccagatggatgataatttgccgatcaatgaatgccaataatgtattgtgataatgattagaacaaaaagcgcgcaatgcgttggtcaaaaggaacatataatgttgagagtggtcatggaatgtgtgcgggttgatcaatcaatacacaacacaatagcctcaggtctttttttattgatcaatcacagctaattatcacattccaacaaattaaacgcaattagtggctcaaaagagggcttatcaaaacatagaagaattttttagtcaatccccctaattagtccttaatatatatttatatttttagtaatccccctaattaggtcgtcttaatta

SEQ ID NO: 77408 - DNA, 277 bp, Heterodera glycines
atgtgcctgtccttgtccccccccgtgatatgccctctgctgctgctgtcgaatttaggccccattttcaacttttggactgagaaaactaaattttgtgggacgcgccaagccgagaccaaaaactctgacggtgagtgctaggctgattagatgattgattagttctaattaattcattaatttagctaatcatcaagtattcagcacccatcaccatcatcatccaagtaaaaagcgaccgatgctcgagactgttggggagcgggagcggtaa

SEQ ID NO: 77409 - DNA, 1129 bp, Heterodera glycines
atgccacgcatttacaacagtgccacagtccgactcggggcaataaaagggccaaccgtacgttcggttcacaactctctcataaaagccgtaataattgcggttggacagtgtcgaaaaagtgatgtcatagtgccactgaagtgagacggtaaagcattatgccaaacaccacaaaagcagttcgtttaattgtcctacaaggcttttaaactcatctattacggcattttgttagcttcatgtgaattttttgaaaaaaaacaagatgatttcagaattttagaaaatagtttttggagttctcccccctccttggtctacaagagctcattatttgaagaagagataagactttcggtgtagaacataaaaggtaactcgcccagtgggactcgaacccacgaccccagcaatccgtgccgtgctctaaccaactgagctacgggcgcctcttgtagaggttctctcaggtcctttatcccactttctcccacactccgttccttctggcatcacatcggaaaatatttctattgtcactgtcagtaaattatttgaaagttaaaacatttttttaattatttaaaaagtaaaatcgaaaaaaggctgaatgccattgtcaaaatttgccttcatacccaaaagaataatcggccaattgcttccgcgtccgcgtctcttccgtcaagaacaatcgaattgttacttgaatgaaggcaattaaaatagtcattaaaccaaaacagttaattaaaatcataaaattacctcctttgcacccaaaagggcaacctcgacaaattgactgagagtaattaacaaaataaactaattaattatcattgctaaaaccccttacaagacaaatacaaatcattgtccggcattatgtacacatattccttaattaattttttattttatcaattataattcgtaaatttgaccactcattaattaattaattgacctttgtgtagagtccgccatcaaataaattcagtgcaaatttacgcaattggacaatgtcatcaaagcacaacacaacaacttaatttgttgatattgtattttttaatatttacattccatctttttctttatttatttatttattgtcaataaa

SEQ ID NO: 77410 - DNA, 4025 bp, Heterodera glycines
  unsure (1)..(4025): unsure at all n locations
ttgttgtgttgtgctttgatgacattgtccaattgcgtaaatttgcactgaatttatttgatggcggactctacacaaaggtcaattaattaattaatgagtggtcaaatttacgaattataattgataaaataaaaaattaattaaggaatatgtgtacataatgccggacaatgatttgtatttgtcttgtaaggggttttagcaatgataattaattagtttattttgttaattactctcagtcaatttgtcgaggttgcccttttgggtgcaaaggaggtaattttatgattttaattaactgttttggtttaatgactattttaattgccttcattcaagtaacaattcgattgttcttgacggaagagacgcggacgcggaagcaattggccgattattcttttgggtatgaaggcaaattttgacaatggcattcagccttttttcgattttactttttaaataattaaaaaaatgttttaactttcaaataatttactgacagtgacaatagaaatattttccgatgtgatgccagaaggaacggagtgtgggagaaagtgggataaaggacctgagagaacctctacaagaggcgcccgtagctcagttggttagagcacggcacggattgctggggtcgtgggttcgagtcccactgggcgagttaccttttatgttctacaccgaaagtcttatctcttcttcaaataatgagctcttgtagaccaaggaggggggagaactccaaaaactattttctaaaattctgaaatcatcttgttttttttcaaaaaattcacatgaagctaacaaaatgccgtaatagatgagtttaaaagccttgtaggacaattaaacgaactgcttttgtggtgtttggcataatgctttaccgtctcacttcagtggcactatgacatcactttttcgacactgtccaaccgcaattattacggcttttatgagagagttgtgaaccgaacgtacggttggcccttttattgccccgagtcggactgtggcactgttgtaaatgcgtggcatttgagcagatttctgatcagtttgattgatcaccacaaccctttagggatcagtatattccatccttctctacgacacaatttataattatggcattgcgttaaatgaaagttttaagcagtttggcatacgacctgaagtgtaccgtaatgggtcattgttggccagcttcagaaagccatttatgggtatgaaaactggggggggggaataataggctaagggcttttaaaatgaatttttttttttgatttgtgagtgttttttttgtcatcaggtttgagcggatatgtgattacggagtcggatcgtaatacgcgcgttttggtgctgtccaatcgaaggtcggaaggaagcaaaaatgcgtttcgcattttgatgcaattgggatggaaagatggcgaattggtgagcagcgccaactaattatcaaataattgacaaaaatgggtataggtagacattaataactaacattttttgcgcctgtcagaatgtttcaatgagtgccggcagcagcccgttcatttggtcttcccatggcggaagcgcgccgttggcggtgccccggtgcggttttgatggcaacggatgtgccgtttcagtgttcgacatgtataaagtaagaccagcagcagttcactttcactggccagggttggcattccgagtaaaaacttgggaagctgctatatccgagtcggaaggcatttccatggaagataccgaacccttaattctgatcctactcaatgattattttagggatattttttgagtggcatcgctttgtctgcgctgctcattatcgccagtgttacgataattgtctatttgatacagtaagaaagagaaacgaatggaacatttttttacaaattattttacagtgccaaaattgttgaaactcgtaaaaacaatttactgtggaaaataccatttggattgttgaagcgacagaagcaaagggtgagtggttgaaaagatttattgggatattttaaagcgtaattacatgttatatatatatatatatatatatatattataaattaattagccgaaacatttcaatttttaaagttatttaaattgctatcaaaatacaattaataagcattccataatttcatatgccagacatttttcttgcaaatttaagagacccgaacggactgccgaacgcagtcagcactctctgcgctccaaccaaacaaatctttcctcgctgaccaattcgaccaccgacagtttggcacagtccaaaacatttacgctttactcatacaacggggagaagtgcattgtgcgcatttactgctcaacctccttggcgacaatggcattttccgtcgcgcaaatggccgagtgccgaacggtggggcgaggggggcggggggcaatgaatggaggaggcatttagggggaaatcaaattttggaattaaaattcacgtagaagccgaatggggaggaaacttagcaagattcaaatttctgcccccaaacctcatcagcgactcgtcaatacattgaaaattctagaatcagcaccaactaatgctaatgaatcttccaattttaaaatccctataaattttgttttttttttattaatatacaatttttatttctgtttttataagtcgtgatttttgatggaattaatgccttttctttcatacttttgcttgctcattatttttaagtcataagagatttataattaaataaaatttatttaaatggtgtaattcctttaaatgttcagctgcgattgttcgaccatgagaatttgaatcgttttttggggctgagtttggatgggcccaatgttttggctgtgtggaatttctgtgccaggggttcgctcaaagatgtgatattgtccgaaaatgccatggtcaaggacgtggtgttcatccaatcggccatcaacgaactgtgcgaggtgaaaagtcaaaaattaaatgccgaattaaatttcatttaaatttctaaaataaatacattatataatgtttatttcaattagcaatttaaccctcctaaagttcgaaatccaaaaaccgaataagaactcattaatctgtcttttgattaatattattaaatcatttttcttgattttttaaaacgattttattaggtttttagattttccaatgaaaaaaataaatggtttttcacaaaagcttatggtcaaataaatggaagaatacagtattttcttttttttgatctcagggactgtatttcctgcacagttcgcccctccaattccacggtcggctcaaatcgtccgtttgtcttatcaatgaccgctggcaagtgaaaaatttcgtattttgggcttcgctggctcaaaaatgttcaaaaaattgaaacaaaaggtgaagcattgctccgaatgacttctcttaattgaataaatgcctttaagactttttgtggttgtcgcctgaacaattgcggaaaatgggcgacaacactaataataataataatgaccaacaaattgacggttccaaacaaccggacatttacacattggcattgattttcactgaagtataaattaaatgcattaaattttgggttcaatttcacctgcagaaggcggcaccatcggatcatttcatctttttaaaactaaaaaaacatttagatcgttttccatagaaaaattagtgtttacaaacatactttggacacttttggctgtaccatataagatggaattgtgaagcctttatagagtattaattttaattattaatcactaattaatgggtatttgtatggagaaaataaaatattattgtctaaagcaagcactanattaatttcatttataaataattgttaccttaattaactttgtgtcccaatttcgatggntgatatgtgcccgtgttgngaagagagtgacaatacgccgccatgaatacggggaaaacgagcggcgagcag

SEQ ID NO: 77411 - DNA, 929 bp, Heterodera glycines
atggaatactttgtgctggatgagactgtggcgaagctggactgtgatcatatcttccaccccgactgcttgaagccgtggctggcgcgtaacaacgtgagtttcggatgagttcctttttttttgaaatttcccattttccagacttgcccaatttgtcggaagcagatcgacccgtccaagtggggcccggtgatttcggatgtggacgaattggactaagaagataaagcattgatatatgtctgtgtgtgtgtgttccttattataaattgactaaagatgaaacacaacaaatttttccttttagttcgataaaaaataacacgaaaattgctaattaatggatgtggggggcgaatccttttaatttttctgaataattaacccccaccccctatagacacaaaattgtccaacctcctcgcctgatttgtgttcaattcattcaaaagctgacgagtcaatgcaataattttgcaaatttattttctgagtttgctttgtttccccctcccctcattctccgccccatttttctaatttcaaatgcaatgaattgacatcaaattccatttgcaatttatcttttaccaaatttcatttgacatttttaaagtatccaagtttttacctttcattaacaaatgcggtgactgactttctgcattttgacttttcaaatttaattttcaatttgaatttttgccgcgcttttcccccgaggggtgggccaacggataaacgtaggaacacctgctcattgggctttgctttttatgcctttttcaatgacttcttttcgtcctttctcttctccgccccatttttgcaatgaacggacacaagataatttgcaaaagtaaatgtttttcacatttctcccaattttcaattgaccgatggcttcagggggatttaaaaataaa

SEQ ID NO: 77412 - DNA, 854 bp, Heterodera glycines
atgtccttgcagtgcctaacacaggaagaagtgaacacaatttgcaaagacgtcctcgaaagtgagtgttgtgccaaactttgattttttatgtatgaaaaattgggcactcaaattctaaaggcaccaataatttcgttttttaactcctcactctcccttttagatctgatcggtgcctcaacctatcagcataccgaagcagtacgttttgcgcttaaaattgttttgtgattggtggtcgggcacagcctttgcgaggtgtacacaaaaatgaattgccatttgggctttttgtttttgccatgaaaattttgcgtcgcttactttcacaggtttatttatgttgtcctttttgctatttcccctcatttgggtgaaatccccctcatcaaagttcgtcaattattggacaggaaaaagaatagattggcaattcttttgagttttcgatgctaaattttctgaaaagatttcgatttgagcgttttcatttactagcaatgataaaactcgcaaaggctgattgtgagtctggcaatgagaatgtgccaaataatgggtgtaaagtcataaaagtccctgttatttcaggtaaaatggaaccaaagtgtcgttgaggcgagtttgtgttttctcggggggaggaactgaacttaacggacgcaaatttagaaaatcaccgccagattggtccagcttcaaaaaccctataaatattgcgtgagttttttggcttttaactgttttcaaattttgatattcatccattttcgtttaggtgtgtgtaattttgatgcaaacggtttgttttgttttaaatgaagaaccaaaaatctgttaatgccaataaa

SEQ ID NO: 77413 - DNA, 810 bp, Heterodera glycines
  unsure (1)..(810): unsure at all n locations
caatgcatttttagcgtttttgactcaaattacttgtcgcgcaaaatcacaagcacactcgatgcctgcattttggtggtaagtcggacaatgcgaaagggcgatggggactaaaaggtttttgaaaaagttgattgtttttggggcattgtttttggcttggctgttgaataacttaaccgcgggcctttcgggttcaaaaaaaaaattgttgctttttgttttgaagaggggttttagctaaaataaacagttaaaattgtcaattttcgttataattttttaccaaaattccagtcacaaatgtcgcagccgatgcatagcattggagcgctatgaggacggagtgcggtgagtttcgataggcaaatcaacttacgagttgacatcatacatgaaaaaaggagggggaaagggtcaatccgaatttttgccaagtgggtttagccatcggaaaattgtgttatttagaatcaccaaattgcaattttgggcttgtaatgaaagatggtccggcgctaccgagctatgacccccccccccctcttttttcatatatgcttgacatttttctgtattacttaatttgtgtaattcaacttttcagttgtgggcgttgccacgagggatcattgaggttgttttgtggtttaaaggagggaatcgtgttttttaatttaacaattaaatttccaggaaatcgacgatattcaggaagaccattctcagcgttccgcgtccgattcaccgcagcaaacgccgccgccgctttgttttgcaggngcacgagaacccattcggcgcatttcc

SEQ ID NO: 77414 - DNA, 288 bp, Heterodera glycines
caacagacgctgtggccgcagccacctcagtcgcctcgccaacagcaatttggcgcctatggaccacagcagcagcaaccgtttggtgcgccgccgatgcaaaatcctcctcgcacgcgagggcatgttcccactgctcctctcaacactttaaacgggacgcagcagcagacacggccacttcgcaacgtgagtttcggatgaattcctccattttcttgaatttccctttttcagacatgcccaaattgtcagaagcatatcgacccgtccaagtggcgcccgtga

SEQ ID NO: 77415 - DNA, 208 bp, Heterodera glycines
atgaggcttccatttggaggttacacattttttagccaaacatttgaacgtgagtaaatttctttatgctaaaattaagaaaaaaaactaaagtaaaataaataaaacggaaaatgattaaaaaaaagtcatcaaatcttttctccacagtttcagcattaataacggcctctgaataattgggaaagcacgataaatattccacaaa

SEQ ID NO: 77416 - DNA, 914 bp, Heterodera glycines
atgtcactgctcctcgaataccccaatctgttgaatgagcaacagagtgccaagctgttcaatggtgctttcgtcctttcccaattcttcggcatttgtgccgttcttttcgtcgccgtttggatgggtggcgagggtggctttgcgtggcgaagtgacccggacaggtgattattggacggtggttcagcccttggcattttcgggccttcaggcagttccgttaccatccgacggtctctgctttttctccttagccgtctccaaccgcaataatctctccttcccgtcccttgctgcagttcatggccatgggcatacttttcctacagggcgaggccattctcgtctaccgcgtttttagaaatgaacgcaaacgcttcaccaaggtcggcttggccaaaaaattctgtgccaattgcaacgccaatgatggcattcccacccccctttttccattggacttgttaagctcctgcacatgagcatccattcggttgctctattattggctgttgtctctctaaaggcggtctgggactctcatggcaagtgaacgcattgacaaagtgccaaaacattagccatcggactcctaattactcctcatccctccgttagacttccatcgttcccccaacggcgagttacagccacagcccaatttgtactcgttgcacagttggttcggcatttcggccgtctccttttacttcattcaggtccacccctccccaccttttggtgtccaaattctcattttctcctttttcagttcatcatcggctttctcacctttctcttccccggcgcttcgctttccctgcgaaaatttgtgctgcctttccaccaactgttcggcctgatcatttttctttgctgtaccggtgccgctttccttggcatttcggagt

SEQ ID NO: 77417 - DNA, 1413 bp, Heterodera glycines
ctacaatacaaatggaacagcccaatcaggaaataaagacaaagcgaaacaaggagaagctggaacatgagggttcactttatgttcttcacaaactcagtgacgatggacttcggaagtattggcgatgcgagtttttcggagctaacgacaaatgcaaaggtaaatgcataaaataaaataaaaactatttttcaaatacagggcgccttcacactgacattaatggtaatgtcctcaaaataattggaagccacacatgcgacatgagcgccgcacatgtggagtgtcagcgacatataacccagctcaagcggcgtgcagttgagacgtgcgaagcgccggctacaatccgtgcgcaagtattgcagaacactgcaacccccgtgttggttccgaccaaagctgcgacaaaaaggtcaacgtttgcaaatttttatgccaaagtttgattttttcctttgatttaggttataaaacgtgttcgtcatgacgaagatgtaccacctgctgcaccactcagtttggacgcattggaattgccgccctcgtacagaatgtacaatcgaacagagaatgacgaggagaattttttgttggcagataccggcgtttttcaaattcagggacaggctggaccgcaaaggtgaaaaaataaaaaccattaaatttcacaaatttccatattaagaattttgatatttactcgttcttcgacttcggaatggagcggtattatgaaaaattgctgtccgtacaatgttgccactctgtcgtgtgcagttctgctttttccatttagtgggaaatatgaagaaacgaattgctgccgagggtttaactcaggtattgcatttttgtatttttccaatagaattgttcatattaagacttacaacaacaatgccgtctttgctgaaaagagcaaaatgatcacctctatggcttttcttcctgtccatcatctctctgctggcctcactgttttgcaggcacaacttcctcaacaacttatgggcgtcttcaattggtgaattttttgaaacgttaactcaatttttttaattacaccgggagaccgtggttcaacggtgctttgacagatcgaaaacttcaacgggcatttgattgtacccatcctactgtcttccacttcatcaacacaattcgatgtgagcaaaagtcaattgatgcagacatctcacgatgcatcgctggtgaagtccctcctctaaagaagcccaaatatcgtgccgccgatgaaagaattcttcgacttttgcagggctacaatgccatcaacaataacccggctatccaaaatgaccacaattaccatgccaatgtcaatgttaatcccgataacatcaatcatttgctcgttggtgtttctcgcaattatgaaatgcgccc

SEQ ID NO: 77418 - DNA, 803 bp, Heterodera glycines
atgatcaatcgtggtgaagacattgacgaacggactgtccaaaaagcaggcgaaagaagcatcaaggcggaggtaaaatgcattatataaatttacgacctttttattgcttttcaaaaccgcttaaatcctcacaagttcccattcattttatgtactaattgattttttttacaggaaccgaaacggaaagccggacgcggtaattctccatttttgttgttttcagtgtttatagtgactgatgcttaattgtttatttgtgattcgtcaaatatgcccattttgaatttttggccttaaatttgggaattagagtccgtcagcgcctatataggccagaaaaaaaaatcgaactgggccaccacattcattcctatagagattcattcctatagagaaatctgtttttttttaatttacgcatttaatggtgtttatttttgttaggccacaagtccaaacaattttgtaaaataaacacttcatatatcaatttgcttggcagttgagcaacagtccccgatcaatttcgagctatcggcactgaaacgccgtgctgtcaccatcggcggcgaccacacgctgtcatcgaaattgccagacaacaacagccaagaagtgtcatcatcatcaaacatggatcatcccgcgtcgccttttctccgttatcaggggtaaacttgccaaaacaattgtcttttttaattcaaaacgattaaagctccttaacgacccatccgtacactgaaggcgtcacgtggacaatgttcaccgaccctcttgtcatcacggacgagcaa

SEQ ID NO: 77419 - DNA, 144 bp, Heterodera glycines
atgtcttttaaacgcgtgaactccttccaacccgacgtgccaatggccaaaaaatgggatttccgatcaatcgggtaagtgattttaataaataaataaaaaatatttctaaacaatataatacattatagatataccccttga

SEQ ID NO: 77420 - DNA, 389 bp, Heterodera glycines
aaaggttgcgggttggttgcgggtgtttcccgcacgagcccgtgcctatgggaggggtgcagccctttgaagttgccgccccatcaaaaatccacgatgggggggtgtttcaaaaccaaaacctattggaccactttgaagttgccgcctgaccaaatccgatttcccaaattgttgcgggtgtttttttcccgcgccgcgcagcgccgcgggaaggtcatcaatcatccacctgtcaccaaagtgacaggtggaggaaattcaatttaacttttgcaaattttaatcttttgtttcaaaaccttttagcgttttattttctcaatcctgaaattttttttatgatgattttttgatcctgaaattaaaaattctttttgaaaattagc

SEQ ID NO: 77421 - DNA, 780 bp, Heterodera glycines
atggttgagatgggaaccgaaattcaaacatcccgaaatgaacttaaatcttttcaagaagaagtagataaagccaaaaacataacattggagcatgtggaaaagaatgacttgaaaaaagcaaagaaatcagccgacgtcgcaaagggaatcgccagacaggcaaagaccaaatatacatcaactctcgaggaatataatgataaatcggaaaagggttttagcgggatggtggttaggcttaacgaggcgctcggtgagcattttaaacataaggaaattgaaaataaagaagtttcagaagctgaaaaagggccgcaaaaaagagagagattagccaatgaggatgttcaatttaactacgacagtattgatcaaaaatttattgtctatctttcctctgccgtcacccatatagatttgtcaaaacacctcgcatatgttctggggtttaagaatacaaggctatttcacgcggaagaggcgacttatatgccggatttgacgggaggtgtaaggcagctatacatttatgcaccaaatttaatcgaaaacacaattatcggcaaccagatggccccactcttaagaatagttaacgtcgtcgatgacccgggatcaattagtgaagttatatatagcaccgagtattttcatcgtctacagtcgaaacgaatttcagaaattacaattgaaattcacacaccatttggtgaattcgttaaatttcactggggaagttgtattcttacattacattttaagaaaagtatattttaa

SEQ ID NO: 77422 - DNA, 334 bp, Heterodera glycines
atggcacagcaaatgggcgaagcgacaaattcgttggcattggcactgagcaaaggtgcgacgaagacaatgaagagggcattctgaaaaggaatgatgggaaatgccaaagcaagccacggactaccccaatgtagcagaagaagccaatggacatgatcacactcagttaaagcatcagacgccgtccattttcagacactgaacttgccgactcaattagtaccactaattacctaattagagactaattaggtgcagtgccccactcactctgcgctttgcgccaccaactgatcacccaaatcagcacatagcagcaaaactccccgaa

SEQ ID NO: 77423 - DNA, 887 bp, Heterodera glycines
atgcctaaagcagccaaatcaaacgctgtgttaaatcgtcactggatttcaaagttcccggaaggaacttattcaactgatggaaaaattaatccgggactttacaagttgattgatatcgccaaaattttgactggcggtcgggcgaaaattgataaagactgatattaaatatgattttttttttgcgtaaatacacttggtttttccaatttttagcacatatttttgcatttttaacacatatttaggccttttttttggtttttagcacatattttgggtttttttggcacatattttattacatatttcaggatttttagcacataaaaatcccagccctatttatgacacaaaactttaaaaaaaatttaaaaacctattttggcgttttgcccaaaattattaacaaaaaatgcaataaaaacgataaataaactcctaagaatcgaccagccaaaattcctgaaaatacacccctaaaaatcatatccctagtgatgcaaatttgttaagctaaaaaccttacagttttgaaacaattgccaccattgatgaagccaatatttattgaacaatatttttattgtagtttaattgatgttgtcacaatgctgaatgatatttgcaaattttggcaaaatgatcaaaataaatttttgtttaccagtgttatttgggagatggatttggtaaatgaagaggaattaaattatgaaattaaagagaacaaaagtggtgaaaatgcatcaacaaatggaacggaaacaaaaattgctaaacttcgaattgaatttgaacgaaaaatgaaaaatttttgcgaaaatgccaagcaaaatgccatggtagcaacggatcaattggaaaaggcagcaaaaatctga

SEQ ID NO: 77424 - DNA, 2076 bp, Heterodera glycines
atgttaattgcttttatgaaatgtcatcaacaaacacaaattagtaaatattccacgcaaaaatatgaagcttaccttggcactgtgtattttatgggaaagaatttgcaatgtgccaaaatagggaagagatttgaacaatatgaacggacagaatgccaaaaatatcgcaaatatttggggattttgtacgaatatttgtttagagaattcgccggtcacaacacagtgaagccaaaattcatgcttaaaagataccaatttgaaatggaagaaccatcaattatttacgttttgcattcgttggccaaagttttgcgcttttatttaaatccatttattagcaatctttatcaatacaaattaaacaatttgttcagtaacaaacattttattaatgaatttgaaccaaaattgttgaacgcatttggtaatgataatgagcaggaagaaatgccaattaacgaacccattttaaagttggcaatttacacagcgaatgatggccaatcggatgaaattgtggaagaaattattaaccgaataatttttgatcgaaatttaaagaaaatgtttaaaaaggcggaacaaagggccaaagaaaacggtccatggagtgcaaatgaaataagtgaagacgcacataaaataatttggagatcaaaatttgatgactcattgatttgggtgagaagaaagcatttaatgatttgggtaatttaattaagtcaaatttagcaggatgacgatgacgtgttatttgcgggatttgtaaagggacagacaacaaattttggcaaattttatcgttgtcccgtcatcggctgctgctgagagagatgccaacttaaaccgggacaagggcagatgtaggcaaaaatttgaaaatgtttccgagaatttcagaactctgcggcgctcgaatgcacttccaagaaaacaatacaatcgaaaattgttttatttttcctacattttatgattccaatcaactgtgaacatcctcagattcttggaccataaccttttttgatgctcgaaaaagaacagattttggtatcaattcgaaaaaacgatgaaaatgaaaattatggtccaagaaagtgaggatgtttaaaagacaattgaatgggggagaggggataaagcatttaattggtcatcaaaatttgtgaattttcggccaccactgatcggatgtaatatggccacctttaagggagagaaattcagttgcattttctgtgttccgctttagggggggggggggggcacgaattacagtttttcgtatttttgattgtttttcatttgatttataaaaagttacttccatttggattttcaagtcaataaacatatgatttgaacgattttcggcacgggggaatccgaattaatgcgattagacgagcaaaaagtctacccatttcgggtccgattttgtagcgctaaaaaacgaatttttctgtcttggttgttcgaattcttcggaaattgggggggggggggtgacaccaaaatccataattagaaagagcaagacaatttcaaagtttattgcccgatacatcatatgtatatacaataattggtggctgatgacaatacacataaaacatacagacagtgaacaaaagtatggcaaaggggggacccttttgttttgcaaaattttctttgataaaaactcgtgaatatacttttattcgccataattgtgctgttaatgcttaatgttcatcattctgtatcaaaataaacaaaaaaaattttagaccaaaaaaagtgaaaaaaattttcaaaacagtagctttgcaactagcgccaaaaatgccaattttaaattctttttttcttttttcagctttatctccgccgagttggctttctgtgttcgatttttctgccgcctcgtcagcttggactcggaatttcgctgattagccaccgatttgacttttacgtcgacgaacatttcaaggaggaccgggttaaattggacaccagaaaattggacaccggaagactggacaccatcctaaaataaacccaggaattgagttgaaaaataaa

SEQ ID NO: 77425 - DNA, 79 bp, Heterodera glycines
atggacactgtcaattcgccgtcagtcagtgatcaacagctgaaaagcattggggagcaaaagcgcattgcacagcttg

SEQ ID NO: 77426 - DNA, 804 bp, Heterodera glycines
atgaacatttattcggcccaaacttattacaacaacacatcgccagcagaagtgaaaaaggcaatccaaatggaattggattttgttcatcgccttttgctcggcatacaaaatgacaatttgtgggcaatcgaagcgaggcgaattcaaaattttgtaatttttgtgaaagcgccatattatccagttgcaaaaaagttattgccagatatgcacaaaaaagcgactttggaaaacttttacggacaagtttaatcttgattttcagtttggaaagagagaacatttagtggtatcgaatatatcaagattttcaaattgggttggttatgaaaaaatagacactgttaaagtcaaaatgggtcaaaatatgaagctaattttaaagcagaagtcaatcgaatcaatggaaaattggcagcagaacagaactcattatacggagataattgacgaaagctcagagcaacagaacaataattatggacaagggcgatcaaaacgccaattggcaaattgtaaaatatgcggacgacaatgtcagtacattttctacggtgtcaaaagctgtgaaagtgagcagatttgtttcaaaaatgagaaaatgcaataaaatttttaattaatttttttattgttatattaatttaccagattaaatattaattaaattggaattgtcggatattgtaaaatattctttttgaaattgcaggttgtaagcaattctttcgtcgtgtcgtcacaaaacaaattttgttcacttgtccaagacgaaatggagttggaagttgggacaattaa

SEQ ID NO: 77427 - DNA, 604 bp, Heterodera glycines
atggagtttggaaaacgtccttctacacatctttctaccctatcagacaacgcctcaaagaagcccacttcagactatcactacaccattctcaatgaccaacttgaggcgatttcccaacaaatggtcaacaactgtgccgattcgatcaccaaacaacttcttcaaatctgtgtggaccttgtgcagcaggttcagcaataccagtgcgtaattccggagccaatgacgactgggtcatctaagcgggaaacaagacaacgaacggcgccgcagtgtcgcggtgcaaagcatgccggaacggccggggacaaacatcggggcgagtcgccaccaaccggacttaactattgcatgtactcgacgagcttggcgccgagtgcccgatttctaattacagaattgggcctccataccaagctggacaaggccaccgcccgctatacggttattttttggaaaaaattcttcgtaaaaagtgaaataggcaataaattcaaataaatataattaactgatttttatagtaaaagtaaaaaaaaatccgttccgcttttttccataaaacaaaaattattgtgatttgcagtaccagcggtattag

SEQ ID NO: 77428 - DNA, 2075 bp, Heterodera glycines
aattttaatttgcttacgcaaaaattgaagtattggcaagacgaattccttcgctgggaaccgtcaaaattcggcgacatccgccagcttcacgttcccgccgaaatgatctggcggcccgatctgctcgtatacaacaagttcagcttcccctttcattggttgattgttaattgggtctttataaaattgctcagtcggatcggcatcaattcagaccgacgactgaccagattagcccattaactaatcaccttccatagggacccggttcaatccgagtccaatctaattcatagactaattgcccacttaccttggtgattactcgcattttggtttttttgaattgtaattctcacttgcacaaagtgccaacatgaacgtgcgcgagagtgagatgatgaccaatgcgctggtgcagcacgacggccgcgtgtcgcttttccgtgccattatcaccgacatcacttgccacctgaacttggtctgggtcaatcaccgccatatggtccggacaaacaaacccatctgtccttaagcatcggtttccatttgatcagcagatctgccatctgatgctggcctcgtggagttacgacggctctcaggtggagggggggggggggggaatgggcagggggtgacaggaccccgccgcaaaattggtcatggacaccatggaatataaaagacaccgatagataaatttagtattatgccaaaataatcagttcgttatgacaaaatctttaaaatttcttttattcacacgaaatttccaggccccttcaaatttttgtcaaaatttttcccgatttcatgatcattttttgaagtagacctgtccaggttgatgaaatgtcttttttgatcagcataaaaagttatgcaattgggaatttattaacattgaaaatgggtttttgagtaaaagtgtttcattggaaagcctaggaaaattaaaacaaatattttaacaatttaaagtcaaattgatcggtaacccaaatcaaaggaggggaatagcgaaaactgatcactcgcaggtgatgctccgcccggcggaggaggacccgggcctttggatgggcctcaatcggagcagcatgaacacatcggtggtcgagcggaagttcaacaaagtgcagcgcgcttcttcccccgccggcggaccaaaaagcacaaggcgaccgtcattcatgcaaagcacctcactgacccattacattccgaacatggaatggactctgatcgacttccggacacggtccaacctcaagtcaggcaaaaaagagcaatcgatgcttaattagttagcgataatttatttatgcaaaaaaaagaaaaaagtccacaaaagggagtaatccacttactctgcggacatgtcatagattaagtcgacctcgagtatcgttaaggagtttaattttagttttaaattgatttaaagaatttattttaatgatttctttatcaagttgattccacaattttgtagccctccccgcaaagggaataaattttttgcctaatttatattttgtgttaaacctataaaaggggacattaaagcgttcagaaggtttgaaaattttacaaatcttatcattttgattggaattgccacgttttgagatggtacgattgttgccccaacccttacccggacatttgctattacttctccatcaaacgaaacccttcctactacctgttcacgctgatcatgccgtcggcactgatcaccaccattacggtggtcggctttttcacgccccattcgaccactggagaaaatacggagaaggcatgccagaaagaattgtcagttgattaaattatttgagtttaggtcagtcttggagtgacgtcacttttgtcattggcactcattcgtaaatcactcggcaaaagggaaaatggcatttgaatacatcaaatttgatgaaatcaatcataattttgttaattgaattcaatgccattttcccacccattaaacccagtcatcaatcccttaaatggcattaagtggggatggtatcggacaaattgcccgccacttccaa

SEQ ID NO: 77429 - DNA, 920 bp, Heterodera glycines
atggccctcgtgtcatttggctggtggaaatgggcgaaattgtgttgatgatcgtcctttggttgttcttctaccgtcgacttgtccctctgaaaatgccgccggcggacgacgcgttgacagaccgggagagcacagagtcagaggggagacaaagcaatcgttaacaggaaacgtcacttaataagagaaattctgatcatgttcgagacaaaaagattattgctcatttcgtctgttcatacagtgtcacaatcaaattgtaaaaatcggaaaaaacaaagaaaaatagttctattatttattccttcccttttgagtggaagttcgattgactttttcagaagaaaaccagaaaacatggctaaagtatggtttgcatagcattggtcagtctcgcgaagccaaactcattggcacgtttttaattttcatatttatttgcttgccaaccgcagagttaagcagttccccccccccccccccccagttcgccaactcggaaatggcattttttcaaatccattaacaagttttcttttattaattatttaaaaatgccaatagtttgagtgtgccatgacatttttggcaccgttgtgagaaagtggcggacggcacacaaaaaagggagggggacacagaacagacggtggagggcggggagggggtagaaccagaagacatttttcacagcaattcaaaaatattttcagtaataggtatgactggcatggtcactcttttttgggccggtcgagaaacggaggtcaaacaaataaattatttgttattgataagaaaaccattcatgagaactccaaaaatgcagtgcaataaactaaaatgccttcttaaaccccgctaaattaagatattttataaaccagtaatttataagcatatattttttaattaaa

SEQ ID NO: 77430 - DNA, 322 bp, Heterodera glycines
ccgaacattccgacgctggctccttcagtcgatgacggactgttcttccgcaatgggcgtggaacttccgcagacgataaccgagcgactgagcactctgaaggtgccgaaattggggacgaaatggaaaacagagacaaatcatagagcgatcgggtagtaattcgacattgcagaaggatgtgatcgatgctttgctggacaaaaacgcggtgccccccgacctgatcacttcgctgatggccggcgtcggcggctcggctttcagcaaagcgctcgaattggtaccgtcgtacaaccaaagctcgcagaagatggccaa

SEQ ID NO: 77431 - DNA, 1692 bp, Heterodera glycines
atgagtgttctaattgccagaattgctgagctgaatcgagctaacacaattgaaccatcaatcgcaagttctgctgatttgtttggacaagacggaaacggtaggaaattgaaggatacagtatcaaaattatactgttaaatagtcataaatatttttaaataaagcataaaatttttattaacgctttttaggtaaaaaaaaaacatgtaaaacttaaatatttcaattgtaacgaaattagttaaatattttaaagttttcgaataagaaaaatttttaaccaaaaatttttaccaagaaaaacctttggggtgaactttttaaagaatgtcaaaaacttaatattttaaaatattttcaggatcagatgataatgagtttcatctggacgacgaatgtgggcaaaagaaagaagaaagtgaaatgccaacaaacgaaggtaagcatcaaaccctgacaaaaatttggggcaactaagcacaaactttcgaatgataccaactggaaaactattttttcatgcttatttgttagttcctcgagagtcattcatttaaaataaataatttgactttttaagctgctgctgaggaacgattctcacaattacaaaatgatcagaagaaacttttggaaaaagtcaatgaattggaaaaaaagcaaaaagaacagtcaaaaggcgaggagaaattaaaacgaaaataaaatttgtcaatattaaataattatatttaaatttaaaaattgattcgatttttaagctactaagaatcaattgtcaaaaatgttggaaaaaataagtgaatttgagaagaagcaaaaacagcagtagaacaaaaacatgaacaacaaaggtgagtgaatgtaacgacgaagaaatttcaattttaaagaattttttagaggatattattatagtagtgaatttttatttaattaaattatccttttaaattttaaaattaatttagcaactttggaccaattatcaatggtgcaaattgatcaaatgactcgattggaaaacgtcaatgaattagagaaagtaaattaaggggtaaaaatatatttatttttatattttcattaattgggtatttatgcatttaatcaaaataattttgtttgaattttttaaggcacttttaaatttccgacaaaattattgggctaccaatgtttgttatggtaatctcaaaatcattggcgaaaaaaatttgactgtccatcataagggaaatgaatatggtatttttttataatttacttaatattatatttctctttaaaaggttgttgttccgtcttcgctaaatatccgattttcctcaacaataattcgtccgacattttttactatgaaatttcaattaaaaataagaaattgtaagatttttaaactttttcagtaaaatttaaaaatataattattattttaataattattcctttattatttatttttcagttgggtcgtctttggattcgccgtcaaacagcagacaaaattggaattgatgattaaaaagggcacttattatgcatatgactgttatggcgatatttggattaacgaagaagtaaaggaaagaaatgcccaatattcatacggtgctggtgataccgtaggaattggcttcaattcgtccaatcggcaaatctttttcaccaaaaatggacttcgtttgg

SEQ ID NO: 77432 - DNA, 708 bp, Heterodera glycines
atgctgtactgcgacaccgactccgtgtactttgtacgcgcgcggcgaccacccggcccgcaacagcaacaattcctacgctccgagggcgacgcgttcgggcagctgatgcgcgagtggcccggccggcgcattgtccaattcttcagcgccggccctaagaactacggtttccggcaccggtgcgccgcgagcggcggggacgaacgtgcggagcgcaaggtgcgcgggctggagctcacctgcaccgccagccaactgctcccgttcgagcgcatgcgtcagtgctcaacttcttcggccggtgagcacgagggggtgggtgggataacaatggaatgtgtgtgtgtgtgtgtgtgtatgctacccccgaacaggatgcctgacgcggagcagcgagtggccgtcccctgcacccgcttcgtgcgtacgaagcgtgccgaggtgttcacgcgccgcggcaccaagctgtaccagcccgtgtacaccaaagggctggtcgttgcgcttgacgcccgggaggctggcggcggcgccggaaatgcctacttcaccagaccgtttggctggtacgacgacgacgacgacgacgacgacgctgaccgtgacgatgctgaggaggaggaagccgaagatggggaactctcggacgaaagcgacactgatgatgatgatgatgatgatgttgattttttggtacttggataa

SEQ ID NO: 77433 - DNA, 2312 bp, Heterodera glycines
atgacgttgaagcacactgtacgcatgctactcatccccgaggatgtttatcgacgtctgatggacaaccccagtgcagcggcggcgacgtcttctaccacgtgcatgaacaagttgcccacgcccgcaactcccattgagcacacggcacgcaaaatggtggcggcatcgagcaagcacacgaacgacgacgaacgcctcatccactaccaacaggagttcaaacgctaccagaaattgctggaagaggaggcggaacgaccgctcaacgtacagctatcgcaacggacaacaaacgcactgcgtgacactgtgctgcagaaggcttcgccggcaacagcgacgccgccgccagctcgcccccaacggaccacacctctgtccagacgacggggcttacagcatcaaaaccaagcgccgagcgcgtcttcctcttcttcgacaaggccaacaaaaagtagcagcagcagcagtaacgagcaacaacaaccgctcccccagcagactgctgctccacaaaaaattggcgatctgcctaagcaagctgagccgcgtatacatgccgcgatggcgtacgcgcaacagaacccaggcttgcttggcgtcggcggtgaagacggtaagcaaattttgcaccttgcccagggcgcttatcgccccatccggggcagcaaccttgacacgctgctccgctaccactttgtgggtcgtcatcagcagcagcagcagccgcggtcctccactaccacccccaccgccagtgtcgctaaggcaccaccgggctacaaaaccttcgtcaacaatgcgcgtgacgatcttcaaatgtggcgtctgctgtttccggatgaaagggcggcggcggcgggcagtgattcagcgtcaacagtgggcggacaacctcggcgccaccaacctctgcgcggacaaaagaaaactggcgcgggccgcttttccctgagccgcctactacagcctaatcatcatgcacataaatcggttcaaaaaagtgcgacgagcaagaggaagcccaacactgtggagcattccactgccaaacgttttaagcctcaattatggtgattggaagcaacgccgtccgctcactgacggtggaaagtcttttggacccgatttacaaggacgaacggtcgccagcttgcttcaccagcgtagagcccctgctgcgggaggcgaagcgccggcacccggacgcccgtcttacgcgcgctgagatcagccgctacttggcgggccaacgtgtctacaccctgcaccgacaagtgcgacgacgcttccgccgtctgccgactctggcctccggtctacacaccgactggcaggccgacctggccgatttccaacgtctccgcgcgcaaaaccgcgggtacgcctacctgttggtgtgcatagacacgctgagcaggcaagtgtatgtgcagccggtcaagagcaagcgctcggacgacatgatcgcagcgctcaagcgcacctttgcccgctgtggctacacgccgtggcgtctgttgacggacaagggccgtgagttcaccgcctccgctgtccaacgctacttgcgcgacgaagcggaggtgcgtcaccactgcatggaaacatcgccactgtggcacgctgggatggcggagcgtgcaaaccgcagcatcaaagagcgcctgtaccgttacttcacgcaccgtggcacccaatgctggacgcgggtgatccaacgcattgtcagctccctgaacgcgtcgccgaacagcagcatctttggcatgcgccctaatgaagtgtgcttcgacaatgcggagtcgctgcgccagcggatcgccgaccgtgcggaggcggagcgcggtggacgtgcctctcaacatgcgcggttccgccccggtgaccatgtgcgtattgagcgtgcgaggggcgcctttcgcaaaggctacctgcctcggttcactgacgaggtgttcaccgtggatcgggtgtgcacaggcagacgacccatcacctacaagctacgggacatgaacggtgaacccatcaccggcttgttctacgccaacgacatgtgtctggtactggttgttccaccctcgctggacgacagcagcatcagaagcagaggcagcattgataagcgtaaaacgcggaagcgtctacctgatggcatcgacaacaacaacaacaacaaggtgtacgccattgaacgcattctggagcgacggtaccggaaggacggcaccgagtgctgcctcgtcaaatggaaaggctacagcacgcgtcacaacagctggattccggcccacacaatcatataa

SEQ ID NO: 77434 - DNA, 1219 bp, Heterodera glycines
atggattcattcggaactgtcgcctggattctgcgaccaacggctcagacgacaggcactgctgtgggctcaatggagtacgaagaggaggaaaacgggacaggaaagttggtccacagtgtcacagctactgtcaccacacctaccaccgccgagtttagactggaaaaagaagccccctcctccgagaaggacggtgctgaagagggcagcggcggccacggcacactgctgttcatcgaatccgatgatggggaggaggaggaggaggatgaggacattgaagacacccccgtcgccacagactccccctcggctgcgacggcaaccgttgtggatgactcctccgacactgttaaaggggtggagcagcagcgctccagtgagcacagcgacgtgacggacggagcgggcggtggcggtggaagcgaaggcgcaaaactgctcggcggaggagaggaagaggaggtaggtggaggccagctaattttctacctcccccccccccctactgtttgtagcctgttcgaatgccgctgctcaactacctgtgcgcgttcaacgactgttcaatgaaggagcttcaactcctcttccacagtgtccacgcgcgacagcgtatggtgtcgcacctgcaacaacactgccgacttcatactgcgcatctgaaaccggcggagcgtaacattgcgctccactgtcacgacctcagcgtgcaaaacgcgaaccggacgttcgcctgcggtggctatctggagcttaccgtaattcgatgactgtgtagaccaataatggtgcggccttctgtccaggttcgacaatacttcttcgccaaacacgggctaaagctgaagcacccgtacatgccgtgcatgatcgagttcgggggcggcacgcacgcctcctactatccgtaagcggggggtacgcaaaaatgggggaagtgagcgtaaacgccttcagcctggagctcgtccatgtcgtgctggagcgtacgaagcgcgccaaacaggagacggtgaagcaagaagagccataccgtcgtgaatccggcgacgtggctccgacaaagtcgatggcaatgccggaacgacattgttgccgctgttgctgtcgatgcgctaacaactagctttttgagagacatggtcattgtagatttgcgcgcgtgatcacgtgacttattgtgctgttatagtgtttgtgcacttttttttaa

SEQ ID NO: 77435 - DNA, 930 bp, Heterodera glycines
atgaattcgtttaacacaacgatttttattaatgataatgtaaatttatttattgctaaaacattcagctccaaatattttatgataaataaattcctaatatcagaaccatgcaaattttttcttaaaccatttagtttccaaaatgcattttgttttttatcttcaaaaaaccgtggtaaggaggtggcacttttcattgatttaatatatttttattttgtttttttctctcaatattttcttttaactataaattattattttcattttattattttttctttctagtttaaagatttgatgaataattttgagggttaaattattttaattgttagatatgacgagactttttttaatggttaggaaaatagattttggtagtttttggcacatatcttggagatttttaagaaaattttttaaagattggccataaacgatcataaattttcctaaattctttcaattcggattaatcataaaagaaagtagttagagactccattttcaccggattacggtagccccccataggtgtgggaggggtgcatggccaactgagcgccagccatttgagcgccgccaagtgagcgcgggccatttgagcgccagacttttcagtactgaagccaaaacctattgcgcgacttttttttgaaacccaaacctattgcgcgacttttttcttgcaaacccaaacctattgcaggggggtgcgcgacttttttttggtgcgcgactttatgcaaattattttaattaaatttatttaattttaaattattttaaacgtcttaaaggtcaaagacgttgaatttaaattcatttaaaattctccaaaaattccccgcaccaagcggatccgaaccccaggggggcggccagactgacgcactaaccactcggccacattggcaatggata

SEQ ID NO: 77436 - DNA, 120 bp, Heterodera glycines
atggacagcgataacaaggaccgccgggcagtcgttggggttgtataaatagtcaaatatttccattaataataaaattaaataatgtgattaatgaatttacagatgtcatcacattaa

SEQ ID NO: 77437 - DNA, 1242 bp, Heterodera glycines
  unsure (1)..(1242): unsure at all n locations
atgtattttagtccanccaccgcttttgtggccgaatctttgctgggccccgttggttataaattcttcgccggcacattcattatttcattttgtagcacttgctgttatgtgtcaatttttgtgatcattcgatgcaaaaatggcggtaaattttggcattcatttgtttggcattttattttgtgccaaaattcaattcaaaatatttttacagtaatccaacagacgaacacacgagttttacggtcaatggtcataattttgtcgattaacattggcggatatctgaccaatttggccatatatcagttgctgtatgcatttggctcacttttggggtattttaaattaattttaattttaaatttttcaaagttcttaaggcccccaattcgagcttggcaagttggttttatttctggcattctgttaaacgctgctgcgggatcaaatgcgattgttctttattttaacaggtcattatcattatcggattattatttttttttcatttaattaattttaatttattactttattaataattaacttttagcactgaatatcgccgcgtgttcaaaaaagaatttcgcattttattcaatcgtttttgcaacacaaatggtcatttttaataaataaaattttataaaaatattaatctatttgtatttaacttttaattttagcacttgttgttctactatcaaaaaatattgaatacaatttttttaaacaaatatttaaaatttgtttttagctgttcaaactattggcacaaatcaagtgcgaagtgccaacccaaacaataaaatgaacaaaatccgatcaagccaacagagaaatgttcatacgatcaatctgaatcgctaatgatacggaattttcgttgatatttttaacattttttatttaattgaaaaaataatggaatttgattggaattttgtattatgcaagataataattttgtaaaactagaaaaatttattttaaattaaattttaaaataattatttgttttaaaaatgcctcataaacattgctataaactgaaaaaagttaaaataatttgtattatgtttcaaaaaatttatggtcaaaaaggtttcaaaactcaactttttgtgagtacttttgaacataactttttttttgaaagttaattaattttttgaagaaaaaatgcatgccaatacaaagaacatttagcactaatgtagaaaagcctttcaaaaa

SEQ ID NO: 77438 - DNA, 1891 bp, Heterodera glycines
  unsure (1)..(1891): unsure at all n locations
atgccgcctaaaagaaaaacagtcattatcatcgaatgcgtttggaaagccgccaacacgggccgatttgcccattttcagcatggaggaagtgcgacgccatgggaaagacgctgacagaatttgggtcattttccaccaggtagaacaaatatcaattacaaaaaaagtagacacaaaaattatgtatagcaaattttttagggggtttacgatgtaacagaattcattgcaaatcatcccggtggcgacagaattctgctggcggcggggggctcaattgtaattcccatttgcgtatttaatccggnattagcattccggaaccttttttggacagtttatccctcacctaaaaagggacaaagggatgggaaattttgggagggaaatggcaaatttgaatcgtttaaagctttaaaaattccccaggaaatttgaacccccacaaaaaaggttcccccccatttcaatttcccaataaaaaaaaattttttaaggggggcccccccggggggggatcctttttttggtgcggcccccccccaaaaaaatccccccctttttggccccccacacggggaaaaaaccctttttttggcgggaaaaacccccccccccccgtgttgttttaaaaaaaaaatttttttttaacaccccccaaaaaaaaattttttttttttccaaaaaaaaaacacggggggggggcccccccgggggggagaaaattttttattggttgggggaaagggggggggggaaaaaaaaaaaaaaaaaattgggggggttccctccccccaaaaaaaaaaaaaaacccgcggtattgtttttttttttttttttttttttaaaaaaaaaaaaaaaaaaaaaaaaaacccccccccccccccccccccccccggggggggggggggggggggggggggggaaaaaaaaaaaaaatattttttttttttttttttttttttcttccccccccccccggggggggggggggggtttttgtggccgccccgtgtttaaatttttgggggcgcccccccctttttttagtggggggggcccccccggggttttttttttctttttttttttttcccccaagaaaaaaaaggggggaggatttttttccccctcttttttttttgtgattttttttgtggggcccaaaaattctttctaaaaaatattttttacagtaacccaacagacgaacacacgagttttacggtcattgatcatcattttgtccattaacattggcggatatctgaccaatttggccatatatcagttgctgtatgcatttggctcaattttggggtattttaaattaattttaattttaaatttttcaaatttcttaaggcccccaattcgagcttggcaagttggttttatttctggcattctgttaaacgctgctgcgggatcaaatgcgattgttctttattttaacaggtcattatctttatcggattattatttttttttcatttaattaattttaatttattactttattaataattaacttttagcactgaatatcgccgcgtgttcaaaaaagaatttcgcattttattcaatcgtttttgcaacacaaatggtcatttttaataaataaaattttataaaaatattaatctatttgtatttaacttttggaaaataaaacagtttttaaatatttttaaacaaattttaaattaaaaattttttagctgtccaaactattgacacaatccaagtgcgaagtgccaacacaaacaacaacatgaacaacatccgattaagccaacagatgaatgtgcattcgatcaatttgaatcgctattgaaatggacttatatatttttttattttcttttatagtttttttcttaaaaaa

SEQ ID NO: 77439 - DNA, 1223 bp, Heterodera glycines
agaagaaactcaattaggagaagacggttatgcattgtataaacgagcaaataatggagattttgaatacgttaaaggaattaaattaacaaatcaaaatattgcaccttataatccatatttgttattaagatttcaatcgcatattaatgtagaagtttgttctgaaattaatgcggtaaaatatatatataaatatatttataaaggctatgatgctgcaattgtccaatgtgtaaaagaggggccaaatggcgaacaaattcttttaaaatatgatgaagttggacaatatcttgaagcaagatatttgagtccggttgaagcgtgttatcgattatttaagtatgaattacaaggaaagtcgcataaaattgaacgtcttgatgttcatttggaaaatgaacaagtaatttattttgatgaaaatgctaacgatgataatttagaagaagcaatgcaaaaaagaagcaaattaattgcatattttgacttttttaaagactgtccaaatgcgcctaaatttaaatacgtagaaatgccaacttactgtacatttgacaataagaatagaaaatggaaatggccgagaaaaggaacacataaagtaattggaagaatttatacagtaaacccaaaaaataaagaattatattatcttcggtacatgttattgcataaacatgcaacaagttttgaggatttaaaaactgtaaatggtattaaatttaaaacttatgctgaagcatgtttagctatgggtttaacacgagatgatatggaatgggataagtgtttaaacgaagcaagtcaatttaaatttccaaagggattacgagcactttttgcaaatattcttattaattgcgaacccaaatatccaagtttattatgggagaagtataaagatgctttaagtaatgatcttaagaaattatatccagaaaatatagcttaccaaatagctttatctcttttaaatcaaaatctattaaaacaagaaaaaagcttggagtcttttagcgatatgcctaaaataaatgaaaactataataatttttcagaggatcatataatcaatcctaaagaagagcttaatttgactttaaataaatattcaattatgaatgaggaacaaaaaaatatttttgactatataaaagatacaattgaacatcctggagaaaataaaaaaaattgtttttacattgatggtccaggag

SEQ ID NO: 77440 - DNA, 752 bp, Heterodera glycines
atggctaatttcttcatcattccccgtcgaaaaacaattcaacttttattgtttattattttatttaaaataacgcttcaacaaggtgattaattttttgtttttggcattatcatttttatcatacgacattctgtaaaattctttcaaataaaacgccaaatttttgcttaaactttgacgaaatttttttaaataattttattgaaaataaaaaaaatccaaagaaaactaaagaaaaaaataaaatggtttttttaaagacaaattttcttttatttcaaaagtttatttgatttctattttagactcgctcattgaaactaaacaattggtagatcaagcaaaaagtttgtttaaccaaataaaaaagggaaactttggtgccaattcggccattgaatggatacagaaaaatgcgattggcattttgtgtaatagcgaatttgaatcaaaaatggatgaaagtttgaacaaattgcaaaacaaattctgtgattcattggaaaatggcaattatcaaaatttgaaagaaatgttacaaacgacaaaaattgaggaaaaaacatttgacaaaagccaaatggacaaagccatagcaaaagatcaaattaacaagggcaaaaacaagcaaatgtttaaacaactatttaacaattctagcaatctttttgaaattagtgaaaaaattttatgattttgctttctaatcagaggggtgaaaaaatcaaaaaaaaaatttctataactaa

SEQ ID NO: 77441 - DNA, 812 bp, Heterodera glycines
atgaaatggatacagaaaaatgcgattggcattttgtgtaatagcgaattgaaatcaaaaatggatgaaagtttgaaaaaattgcaaaacaaattctgtgattcattggaaaatggcaattatcaaaatttgaaagaaatgttacaaacgacaaaaaatgaggagaaagcatttgacaaaaggcaaatggacaaagccatagcaaaagatcaaatgctcaatgacaacaataagcggatgtttaaaaaactatttaacaattctagcaacattcttgaaattcatgaagatttaattgaaggtaaataataattaaaattttaaatataaaaaaaatccaatttatcgtactcaattgtttcgtaaatcaaaattcgttgaatatttggcacaaagtgtcaattataagttaaaatttgaaaaattcaaatattacgcttaggtaaaatggctaaaaaattcaaagatgttcaaatttttcgttttcagcagaaaggcttgccgtgcgccaacaacaaatgccaaacggttttatgggcagaagaaaaaagcgtgcccgcgacagtgcaattaagggctgtgtcactgcagtgcttttaacattaatctctgctccatatttgggttattattctaacaaatatgccaacgagggcaatgtcatggttcaagtcaatagatgtaaaaagaggtttaatgtccgacattgttaccaagtccagcagtcggttgtcacgcagatttttgagtggacaattctattagccattggactaatctgtgcactgatattttgttcttgtgtccgttga

SEQ ID NO: 77442 - DNA, 4586 bp, Heterodera glycines; identical to SEQ ID NO: 13542
  unsure (1)..(4586): unsure at all n locations

SEQ ID NO: 77443 - DNA, 413 bp, Heterodera glycines
gttattttgggcgccgaatatgtgccgaccaaacatcaaagagaattcctgcaaattgtcgggaggggtcccgacttgaccattatcagccgagtgtcttccaaagtttggctgggcttccaccgtttggccattgtccaggtgagtccaatccagggctgggcgtaactggatttccaattacggaaatccgtaatccgtaattacgcccagccctggtcccaattctcctcattttccgcggatagcccggcgactctccaagcgaacagcccatttgtgcggacggtctttcggtggtgtgcaacggcgaaatttacaaccatcggacgctgaaggacaattctctgctggacaattcgtccgttcggactgtcctctccccccccccccctgttgttcgagccaatttt

SEQ ID NO: 77444 - DNA, 194 bp, Heterodera glycines
ggccaaaatttgcacctcccattttacaacaaagacaaagcgttggaacaggacgagcaaacgcagaagacattcatggacagctgaacagaacggacgaaaattggcggaatgaaatttaaaagtcaaagcaatttttgttttattattttgtgttataattttggcccttttgagtaaaatgagataaaaaa

SEQ ID NO: 77445 - DNA, 2918 bp, Heterodera glycines
cgggccaattaatcacaccaaagcctgtgtccatgctctttcacttttggtgaaatgaatgcagcggtgcctgtgcttcaacatgcgggagtcgatgtgtatgcgggagtgccatctgaagaattaatcaagcgtcttcccaagcccctattgctgatactcgatgatctgatgctgtccgtcgacgagcgatacttgtcagatctgttcaccaaaaaggctcaccatcaccagtttgctgttgtgtttgtcactcaaaatttgtttgagcgcaagatcaaagtggcccgtctgtccgcccagtacctggtactgatgcgggccccaaattcactgctgtccatccgtaacattggcgttcaactttttccgcgtcagcttgacttctttcttgacgcctatcgaaaagcgaccgcccgtccctatggctatttgttgattgatatgcatgcatcgtcggacccatcattgaggctgcgaaccaacatatttaaggatgagcaggaggaagatgaagggacagttgtgttcattcctaaaaatggagcggcataagcagcagcagcaagtaaaggttggcgaactgataaaagagaatgcggattggctctgtgcattggccagaactcgctcagcgaacaaatgcaagaaaatgctacgaaaagcaaacactgagcaactgctagcgctagtggaaatttgtttgaacatagttgcttcccgcttccgtttgtcagctcgtcagaagagacgattgatgccccatgcggacactgtacgtcgggtgagcagagcgagaagtgagcggggcgccaggcgcgtgtttgttcagaaaggcgcaggatttggcggattgttcgctgcccttttaacacccattctaattgaagtggcaaaatctgttgtgtccaccaaaaatgcataaataccacacaccattgttgttttttcatgcattcaccattcattttatggcgaataaatttttacttgtcccacaagaaatttatcgtggtctcacctccatgtcggagacgggtgacatcaatttggatgctgttcggcacgatttgaaccgtgcccgggccgaacgaacacatccatctgcaaagaatgtccactacaaccaacagcttaggcgctatttgaaaatgagaagggagctcgcggacagaccggccaaagttgagctcaccaaaggaatcagtgtactgatgaggagaggtggtgaagatgaagatggtgaagttgtggacacaccaccgcggcctcccgctccaccacccccgccgcctgaaagacgcgcttggcgtggaccaagtcctccccctccacctccgccgcccgggagacgtcctcggcccccacccattcctcccgctcccccttctccaccagggagtcctccgcctcgtcctgaacgtcctcccagaccgagtagagcttctcggagaggtggtcgtctagagcaatgggagaaaaggcgatacgatatacatcgacggcgaccggttgtgcgggaccttcttgctgaagcagctgccgctcctttacccgaaagtgatacagatgatgagtatatgttggagagcgggttcgcgctgccagcgccatcacaatactatggcgatttgcctgtgctaccagacaacgcggacgaaattgaggagatggacaccgcacagcgcaggattgcaaccagaagaaaattaaaaaaggatgaagcagaagataatgatgatgatgatgctttgcatcacaaaaaatacaggatttatcagcgttcacctccacggctcccttccccatctcgagcgaaaccaaaaccaccaccacgccaaccgaccacaaagagagagcaacagaagccaaaaaagttggaactaaaaccaccaaaaattgagccaaaatttgaacccgattcacgaccatcgacatcaaaagtcgcgcctcggtcgaaaaaagagcctgaattcccgcttgacccacggccatccacatccaggcaagccggatacattcctcctccggcacccaaaattgtaccaaaacatgagccgacaaagagacccgtgccataccgtatcccgaaaagagaacccaaaattgttgaagaaacgccacagaggcaacagcaaccacttcctgctgctgtcgtcgaagaaatgcctcctgttcctccgcctaggagggggaccaaacgccgccaccccgtaaatggtgagaatgatggtgaggtgcgcataagaaaacgcgtgaggcaagcgaggagggtgcgagtacagtactcacccgagccgggtccatcaacatctgcacaaagtgatgaacaacaacaacatcgagaactgtttaccatcccgtcaaatcagctgaccatgaatcagcgggttgaacgactgtacatcaaatgcaaccgttatgcggatcgtatgggtgtccgtggcaatacaattaacaccgcaaacggcaaaccgttggcgcatagcaatttgcgaatggccatcaggtatataattgacaggagagcgggccgccctaccattaagccacctggagcggccatatttgaagagaggcttaggcaagatccaattttgtattcatggacggctcctccaaagaaaacagcacagagcacaaccaccaggacggcaccgaaaatcaagaaggaatttcgcccgaaaaagtggagttgatcaactccacgcttgacaagctgtacaacgacccatcctccccagcggcgttcgcaggtgttacagcgctgtggaaagaggcgcgaaaaaagttgaaaaatttacggaagagggatgtgcagcattatttggaggggcaccgcacctaactctgatgcgcccccgaagggtgcgctttccaagagccaaaactgttgcggctgggttcatgaccgatgt

SEQ ID NO: 77446 - DNA, 1678 bp, Heterodera glycines
atgccttcgaatggaaccgagacaatggcactcgataataacagcgacaaaatgggctttgaaattggccaaaatgtaacgcaaatccattccaacaatggcagcaaaaatttgagcagcggaattggacagcatttgctggaacaattcggaatgatcaatgtacttgaaaaagggcaaaaattggagggggggggcgggaaattcgtcgggatttccaaagtttgctttcttattttggcattttgcccaaactcctttatcataaaatttttagcagtttttaattgagcccggcgggatcgggactcccgcgagatttttacgagattcccggtcctgctcccagcaaatttcttgcttccgccgttcccgtaatattttttaccaagctctattttttaagatccaaaatttggaatcctcgccaaaattttgattgactaattaccataattagtaaatttatccaaataatccgtcttttcaggactgcgtgtttcggccaacctttgacaattatttgatgatctttgctttctgtgtgatcttctgtctttcggttgtaggaaattcaattgttgtggtcgtcattttacaggtaattaattaattagttaattatttatcattattaaattttgtatttcatctccctattttatcctttagcaacgttcaatgcgctccgtgacaaatttatatttgcttaatttggcactcagtgacctgttgctgagcgttgtttgtatgttgtcaattttttaaaattattttagacaatttaattaaattttattttaaaatttatttaatttttcttttaaggcatgcccccaactttggtcagttcgctcgtttactgctgggtttttggcgatttgttatgcaaattgctcgcttatttgcaacgttcgcttttttattttatataaaaaataaaaatcctttttaaaaattagcttaaataaatatatattaaatatattgttatttagctgtcgtcgtaaccgcttcagcttacacattggcagcaattgccttggaacgctattacgccatttgtaagccgttgcattcacgtgtttggcacacgcccacccatgccatgttcgtcatcagtttggtttggtaagtttttctttattagcattttataataattatttttacactttatattagagtagagcgggaccgggaattttgggcaaaaccgggaccttttcgggttgaaaaaccgggaatttttggctggtaaaccgggactagtcccggtccggccaaaaccgggacttaggtattcagttgtcccgtctttttcagtaccaggtctcgttcccgttctactctacatatataaatggatttatgtaaatcacgaaaaggggacataggggtattaggattaaacttaggtaattccatttttttctggccctctgatcgggagtttttttttagtccatcagaagctcttgccggggaacagtttaaacgtcgcacttctcattaggatagcacaatgaaaatgtccgtctaattaaggcttgtctccgtcattgccaatgtgttcatgctgtttatgtatgaggagcgcacttacaaccgaaacgggctgaattgtgcaccaaaatttgagccaatcgtccattttgggtatcaggtggcattttaa

SEQ ID NO: 77447 - DNA, 1761 bp, Heterodera glycines
cgccggccaaaggaaattccggcactttttgtccccggcggacgacgcgaaaggtcgaaaaatgaattaacattatcttattaacaatttagcagtttctgtttatacaatccctttattaatccaatggatgctaatccctcgtaaattttagttctgtttttttcgtccccattaaattttaatcttatccaacggaaggtccgctgaacctcgagactcccggcaaagtgatttttgatttgttattgtgccaatttattgtccgctgaaagttccgccccgggccaaaggattaagctgatttaggagaaggagccgagcgggggacggtcctttctgttgctgctgtttgttccattcaattagcgcttttcggattagcttctgaattggaccgctaatctctccagccttcgctttccatttgggcttagtgattggatttgtgtggaatttggcatttgggtcgcgcggtttatcccccaccccctcagcggcagtcctttcaaattccaatcattcccacccccacagtcggcacaaggaccacttaaataaagaggctttcattttggactataaaacattactcccggtgccaacccaatcattttaagtcactattttttgccaaactgaatgaaatcggaaatggttatgtttccgggagcggaaccgtcacttctctgccgggaccacccgaaggcgaattgtgccgactttgagccttctccgctggcattcctccgttccaaattcacaaaggtccttcggttgggtccctttgcgaattcgtcccaaatccgcgctttcttcgcctaatttcaccccgctcgttcgcctcactttatgtcctttcaggctcccactctccagtgcacttcctccgaggagggcaccgactcgccgctgttctcccgtacgacgagtgcccaatcgctgcccgcccccacaacggaccaatcgcagtcgctgtacgaacggacgctgtatcagctgaccaatgacccgcacttccaaaaagtgccattggcaaatgaaacacagcgagcgattaattaatgaaaggattttgaaggaaatcgccctgggcaaacgaatcggattttaccgattgggcaaagaattgggcgcgggaaacttctcaaaagtgaagttgggcgtacacgttttgaccaaaggtacggacgaagggaaggccaatcaaacgaactgagaagagaaagcaaattcagaaaaagtggccataaaagtgatggagaaaagcaaattggaccaaaaggcattggtaaaaagggaaaagggggaggaaaagccaaaggaaaagcggaggaataaataattcagagactgctgacacgcgaaatggaaaacatggaattaatgtgaggaaatcggcggaaaagcgaataaaaaaacacttttgaaggcaccacccgaacataattcgactcttcgaagtggtcacgacactgtccaaagtgatcaggggagggaatacacaagaatggaatgaaaggacacttttgaagacgtatttggtgatggaatacgccggagggggcgaactgtacacttatgtgcacgagacgggaaagctgacggaggaggtggccaagccgatattcggtcggttgggtgcacattttgggaaggcattcattcattcggccattgcagcacaaattgtttctgcggtggcccatttgcacggaaagggcatttgccacagggacataaaaggtggggggggggggg

SEQ ID NO: 77448 - DNA, 415 bp, Heterodera glycines
aagcagcgcaaatggcacagcacggaatgaaaaagaagacgactttacctgcgggggcaaaacaaaaatcaatgaagcgggcgcaaaagggggcaccgacaagaggacccaaaaaggcaccttacattgggaaaacatgaaaatttgatttaatttagggctttaaatcaattgctccaccaaaaaaggcatcggctgtcaaacaagcgaaggtaaatacggaagtcagtcggatgatcaacgagaagaacgaagaaatggtcagagaaagggccgacagagacgtcggaaaaacgacgaagcaaacaaaaaacacttgactatttttgattttgtgatgttacgggaagatttatgacaattggtacacaatttttttttgttttagtgtattaattatgcatttaatatgaaa

SEQ ID NO: 77449 - DNA, 1409 bp, Heterodera glycines
gccgtttcctctgctaaatcttcctccgccctcaaatgggtttcactgattgtgctcattggtcaaacgacagcgctcgtgctgactttgcgttattcgcagacccaaaaatcgcatccctccgacgggcccaaatatttgtcgtcgactgccgttttgatggccgaaatagtcaagtttttcacatgtgtctccgtcttagggtatcagaacaaatggaattttggccgtttgttgcacgattttgacgggagagattcgctgaaagtcggcgtgccagcgttactttatgtgaacggttgcgcctttcgtccattgtcagccgttccctccttttcaggttgtccaaaacaatttgctgtttttggccctttccaaattggacgccgccacttaccaagtcaaaagtgatgcgtttggcgaaccgttctcccatttatttaggtcacttaccaattgaaaattctgaccacggcctttttctccgttacgatgttaaacaaaaagttggacctaatcaaatggatgtctctcattttgcttacttttggcgttgcgcttgtccaggtgagtcggaatgttcacgggcatttcgctaacggaaatgccaactctttatttttatttatttgagtcgatcattgctaaatttcatttgaaattaaagctcccaaaaagtgccgaaagtccgtccctcgctgtcgatgaaaaggcatttggggctgacaatccgccgcaaaaatcgaccggcgatggattcgtcggacttttcgccattttggccgcctgttgctcaagcggatttgccggcgtttatttggagaaaatcctaaagacttcgcaagtccaactttgggttcgcaatttgcagcttggtccgtcctcttcccaatttcccttttcactttccaatttcagcgttcttcagcatttttggtgcctttgcaatgactttgctttacgactgggctcagcttcagcagtggggctttttccacggatacaattgggcatgacttatgtttttcgtgttttcgtaattttgccaaacattcagataatttggacggttattgcactgcaggtatacggtgggtttggttacggtgtttgcctttgcttttgtaggcttacggtgggcttgtgattgcgcttgtcgtcaaatacgcggacaacattctgaaggtgtccctccccatttctgttgcctttcatttgcacttcctttccgatttctccagggtttcgccgtctctctgtccattcttttgagcagtttcgtctcgtgggcgtttctggcagacttcgttccttcgctcactttcactttgggtgcttccattgtcattttgtccacttttctttatggttacgagccaaaacgattggtacaaccggcggaaaggtcg

SEQ ID NO: 77450 - DNA, 1055 bp, Heterodera glycines
atgatgagaagcagtgccgtgcgaacagttggcattttggacaaatcattgagcaaagggaaacatgaggtgggttggtcgttgcgatgccgtgtcactctgtgcgggtgactcggaaaagttggaattagggacattggattcggaaggggcaatttggcgacgcatatttgcgattgaacaaaaacaataacgctttaattgttacaaaagtttggctgcgccctgttgatttttagtgtttgatttaccaccaataaaacaaattcaatgcgtactcattttttgtaattgtcagataaatctttccacattcgctttgctttttgtcgaaatggttcgctacgctcagaataaagtgaccacaattcaaggactccaggaaaggttaaataaaaataatcttttgcactttaattttatccgttaactttcatagattgactggatacggaaagtttgtcggtgtccgacttttggatcttatcgcaatcagagaggcaaagagcaaaacaaacggattatgtaaatacatttgttacagaaagggtacaaaagagatgttaaactgctgcacattttgatgttcttgaaaggccctgtctggaagaaccttttcgggcaggaggcggacaaattggagaggagcaacgaggacccgaagaaatgttgtgaaaatgatatgggaacaacaacacaattgcaacttattttgcagattttctgatcgaaaaagaaccgattgtgaacacattcatttcactgcccaaggacaaaggctctttgaattgcgctgctttcattgctggaattattgaagcatttttgactgtaaaagaaacaaaaaatttaaaaatgaaccttcgtattttactttttaggagagcaatttcccgtgcaaagtcactgcccattggcacatgggcaccgcttatatgatcgaatttgaggaggaagtgattttacgggaaaaaatggaggccagcagatgaatagactctcatttttttgtgtatttgagcagttttttgtttttgttttattgtacaattaaa

SEQ ID NO: 77451 - DNA, 918 bp, Heterodera glycines
atgaaaaagaagaattgtcaatgtcggcaactgattgggcgcatttggctgttttcgcgctattcgaccggttgggcgtgcaatttgcacgccgattacaccgaattggtcgcttcgaattgtgtcagcaacaaactgagtgcgatagaaggtaagcaaatgcactgcagcacaacgacatgcgttttttaggaagtcgccataaacgtcgtttttttctgaccacttttttgcgcaatccgatcgaccgtttcatttctgaatttactcacgtgtccgagcggggtgcgacttggggacgagctcggcttttctgtcggggtcggtcaccgacgccggaggaattgccggcgtgttttgacccgaaagtcggatggagaaacatttcactggacgagtttgaatttgttaaattaataattctgatatttcttttaaaggttcctctcatgcccatataatttggcgtttaatcggtgctttcctttttcttattcgggtaattcgatgattcttaggcaaacacgaatgttatctgacttgaatctcataaattgctacaattcatcttcgatggattcgactgttcgggatcgcattatgctcgagagtgccaagttcaatttgcgtcattttgctttcttcggtcttaaggaaaatatgacggaaagtcaatttctctttgagaaaactttcggactaacgtgagaagaacaaattgcgattcatttatgtcttcttcagttttgacagtgacctggccttgtggaacagaagcaaatccgcccatgtaattcccaccgaccgacaattgggacaaattcggcaaaggaatttattggatttggagctctacgcgtttgctcgccgtgtttttaaacttcgcctttcaaaaaccaaaaaactgcggtaatccga

SEQ ID NO: 77452 - DNA, 159 bp, Heterodera glycines
atgaagagcccaaccaatgagccggtgctcgaatatcgcaagggaagcgcggaaagcgacgctttggagaaggaactgcagaaactgtgggcagagcccatggaagtgccgttggccattggcggggagaagacatttcgcaaggaaaaagcaattagc

SEQ ID NO: 77453 - DNA, 2013 bp, Heterodera glycines; identical to SEQ ID NO: 2040

SEQ ID NO: 77454 - DNA, 1999 bp, Heterodera glycines
gaactgaaagacgaaattgcgatcaagtcgagagcgcgtgaaaatctgatgttcgccgtggaggaaaagccgaaggaggaacggataaagctgtcccagcaaaaggacgagctaatcctcaagtgctccttcaatcagtatgactgtgacatacaaaagtaaatgatgatcaaccgtagtaccaatagtacggtatctgtatccacctatttgacagggattttaaactgtattacgacccgacgtatggcaattgctacacattcaactgggaccgggatgctatggtgacggcacatcgcgccggtgccaactatggtgagcacggttgaggaagagggatcataatcatcattaatgatcagggaaaatttaagaaaaatttatgataaaagtatgataataataaatagatatttactgtgagactgatcggaaaattaagctaagcaatcgccgatcagtagtgttagagaagcaataatcgggcagattgaagtgatcagaataatctatagtagacaaatattgtctattggagtgcactgggatgtaatcaatcacatagtgatcaggatgggaaaaagtgatcaattttgttgattataatggagaaggggaagtaatctatagccgttctattcgggggatcataagaaatatgcacaatacccatttgtaccaaaatattataatgtgagtttttggacaaaaaattcttagaaaaaagtgaatttgaatgaacaaggctataaaaaaaggcctaaatataagtagcttaaaataatgtttaatattttttaaaaattaatttttaacatctcttttttgagaaaaatttttcaaaaaatcccaaaaacaaaatgtttttcttactatttagagcatagagagagaatcaaggaaaattttcccttctgatggtattaatggccctattaaatcccttcatttaatgtcaatcggaaaatccttttcaggcttacgagtgatgctatatgccaacgtgtcagagtatttgccaacctcggaagcagttggcttccggataactgtgcacgacaagtggacagtgccatttgcggatgcatttggctacaatgcaccgacggggttcatgtaagcattaaaattttcgtggaaaaattttatttttggctttaaggtcttcatttggagtgcgaatggtaaggggtgcgtttgattcacccaacattttcatcgaaaattttttccaaaaaattggaattgactttttgaaaaaatctttataattgtgaaaattgcttttttaaaaatttaaaaaaaaactttttgaatttcttggtgggaacctgcagctcttactgtgtaaaatatgtggatttctaggaaatttccaatttttagctaaatgttattttcacattattttttgacacgctaaaacaaaaaaggaattttttgccgtagaaaaaattttttcgcctcgagccaccgtatgggcactgcagcgaggggggcgagaactccgagtcgtacatctacaaggggtatagctactcaatcgaaggctgccatcggagttgcacccaaaatgaggtaagtgatcaacataaattgatcaattggagaatggtaaataatctcccttctgtccccttctaaaggtgatcaggatttgtgggtgtgccgacccgctctacccggtgccggaaaatgcacgatcatgtaaaggttggttgctgtactgtactgtattagaggaatgctcgaacattaaatctttttgagaccgagatccaaaatcacaaaaatatacgaaattctcgactttagactctcgaataattatatttagacttccaatgtgatcagatttttgtgagctttttgtatggcaagcaatttaagtgagtgatccagtggcacgcgattgcatcaaaaacacctcgcgaatgcttggcgatctgatcgcaactggagcattgcgcaactgcaaatgccaccaaccgtgcag

SEQ ID NO: 77455 - DNA, 1264 bp, Heterodera glycines
atgatcagtgacgaactgaacagtgacgaaacgatcagtgacgaaatgatcggccaccagtatttcatgtcttcgtgatttcatgttttcttgcttgaatattttattttatttttcataatgccattaattttgtaatttgttaatcaactatccatccatttttaggtatactgatcattactttctctcggcacttctttattccattttccttggaccttttgcggttgatcgcgtctatttttcttcgaagcttcacttcaaaatattggtggaatatttcggtgggaacgaaatcggaggaagcggatggaaacggcagcgcattaagcgcattttgattttattaagtattatcggcacttctacggccgctttcaagttgggtggtgggagtggatctgtggtgagttaaatatcattattaaaataaaattcaacaaaaaatatttattggcactttttcgtacaatcagccgtccgagcgtccgggagatgaaaacccccgccgccggcacgataatcgcctccgttagagcgcacaaaagaagtgatcactaaaggaacggctgtccgcaaaaagatgaataccttttaggttgttttgtatgtattagtgtgtgtatttattgtattgtgcgtgtaatatgttttgatagattatatacatatgaatatgtaactgttcgtcttaaatatatgagtaagaaatgtattgttccattttttgaatttgccttcgtatttggggcacgactttttcgactatctagttttataactgattattagggacgtgaattttaggttttaactattttttttgctcaattgatttgaagaaaggagctcaaaaaacgcatttccgcataaaaatttttcgattctgatgtcattatcggtcactagaaatcactattttggcgacttcgtcactaaaatagttaaaaatcactattttggcgttttgtcactattttttcactattttgtcatttttgggcaaaattccttaacaaaaatgcaataaaaccaaaaaatacacccctaagaatcgagctaaaatttttcaaaaaaatacacccctaagaatcgagctaaaatttttcaaaatatactcctatgaaatcaaaaaaaaattttctcaaaaatttactttcttggcaaaaatttttaatttaaaaaatttttttaggtaactattttgggttttttggtcttaaaaatcccagtccaactcatttgcaactgcaaatagtga

SEQ ID NO: 77456 - DNA, 886 bp, Heterodera glycines
atgaaattgtgtctatttttatttttatttatgtttttaattgttgaaattgcaaaagttggatcagaagagaaaaagctgcaacaaaagtcatttgatgaaatatttggagaaaaatgggaagaaaaagaagaaaaacaacgaaatgagcagaaaaaaagagaaataatcagaaaatattataaaataaaagaaaaaattaagcaaaaaggaagaaaatatccaaaaaaagaatggcataaaattgatcagaaaatagcgaaaaaattggggacaaatagtaattatattcaaaaatggattaaagaatttggtgttcaaaaaaataaatgtcataaatcaaaaactgatgaagaaaaaattgaaattattcaaaaattcattaaaatgacaaatgaatataaacaaaaaagaaaatattcgttaaaagaatggaaacaaaattatgccgaaatttgcaagaaaatcggagtaagccaattcgcaattggtaaatggaagaaaaaatttggcattcgctgtagaataacggagaaagaaaaaatggaaaaaatgaaaaaatattggaaaataaaaagtgaaaatccaaaaatgagtgacaaagaaactgcaaaaatattgcaaattgatagaacgaccatttcaaaatggaagaaacagcttggaggagagattttggaggatttaaataaattttcaaacaagaaaattatttacgacataaaaactgattaattcttatattttatcgaaccattgtcaaaataactggcatataatccgtttatttttctcaattggatacgctgaatttgcttctattgtaaataatttttcttagtaacgaaccatcattgttatgatttccgactgtccatataataaa

SEQ ID NO: 77457 - DNA, 639 bp, Heterodera glycines
atggaaataaaaaaggaagagaaagagaaaatgggaaagggtacgaaatttaaaagtgagagaaaaataaaatgggaagaagtgtccaacacattccgatcggatcaaaaattcgcctccctggtcccggagagtccgcagggaaatccccgatcattcaacggcgcatccagcggcgcctccaattctttttcttttggctgggacggcggcttggtggcggaggatggtcccgagcgcctcccccaaaacggtcttcatcatccgacgacagttctcgaggagtcccgtcgttggcgttgaacaccaaaaagcccttgcccgtgattcccggccctctgtggagggcgctcactcctttctttcctctgtcattctcgtcgctaatttttttgcgacagggacggccttcgaagaatccctccctccctcccgaggccccccgcacccgaaattttttaaggaaaaaagtttttccttgctggtacccccccccccccagacctagcctcacccaaattttccaaaacttttgctaaattttcaaaaaaccgacaattttttgatgaaaatctgctaaaaatggctcaaaagcgcgaaatttgtcacttttttggacaaaattcgttaacaaatcaa

SEQ ID NO: 77458 - DNA, 1254 bp, Heterodera glycines
agtgaaaacgaaatgggacacgaaggtcaaaaagcaaaaacgggaattgaaaaatgtcatcgagaaacacaaaaatgtattttcgacccaccattatgacctcggggattgtaaaggaaaagcacctcctatcttgaccacctctgatgtacctgctaaaacgaaaccgtacccagtgccagagaaatatgaacgagaattaaaatcacagatcgaaaaaatgctgaaagcgggcgttataactgaaagctttaccccttgggcccataatgttgttttggtaaaaaaatcaaatggccaattacgtccttgcgttgattttcgaccattaaacaaaatcacgattcccgacccatatccaataccgagaatggataagacaattttacgggtcgctggtcaaacattttattcaaccttggatttggcctccggattttggcagattccattggattccgaaagttcttataaatgtggcattgttaccccttggggactttatcaaatggtaaaattgccattcggactgagaaatgcgccaagcatttttcagaggaccatggacaaagctttggagggtattcggaatgtaaccgtatacattgatgacattttggtccatacaaatacggaagaggagcatttggagactttggaaagagtattttgccgattgaatgaattcggattaaaattaaaaagagagaaatgcgaatttttgaaaaatgaatgcacatatttgggccatattttaaatgggaagggctatcggccctcattgaataatcaggaagtgattgaaggattcccagagccgaaaaatgctagggaagtaaaaagatttttgggtatgatgtctttcttccgtaaatttatccaaaattttgcggaaattgcaaatccgttacaacagttaacgaggggaaaaatccctgaatttgtatggggaaatcgcgaaaaagaggcatttgagaaattaaaaaataatttactgaatgcccaatgcctaagggcgccgaattacgaattgcctttttatcttttcaccgatgcgtctgctattgcctatgcgtgagcgcttatgcagagccaaaatggcaatgatttatactctgtcggttattggtcccgaactttgtctaccacagaatcaaacttccgcccacacacggggaattagcggcaatagtacatgccgtacaaaatttcagaccaattatttagtggcagatgcattatcgagagttgcaa

SEQ ID NO: 77459 - DNA, 1493 bp, Heterodera glycines
atgaatggcgaagagtgggtgatcttggtgcgatatatctgcgacaattgccgccggtttccgaatatgatggtcagcgtactttttggagaatttggaaaagtcatgaggtaagtattttccgaaatttaggtaccaaaccccctccttacccctccttgggtcatggcaactcgtacaaaaggcaactcgtacaaaggcaactcgttcaaaaaaaagtctaagaattttcaaataaaacttagaattttttcattaaaaaaattaaatggatgttctagaaactttttaaaacacttaaattttcaaaaaatttaagaaaattaaaaaaatcagctgaaaaattagtaaaaaactttaaagaattttttaaaggtttttctaggctagaaaatccatttaaattttttttttatctaaattgtaaattttagttgaaaattctagaaatttttttgtacgaattgcctttgtacgagttgcatattcgctttctctttcctcgcctccactctctctcccgctctcttcctctcgctctcacatctctgcgaaatttaccatcaccttctaacgatgacgatgatgatgacgataacggtctctggtttggctcgatgcccacacaaaacagtgttgcggaaacaccaccttgcaaacctgctacttcttttactaaactatgcattgttgtacataaaatttgcaacttgtcacgcattcattattttaaattttaatcttccatttgttatttatgcattttaaaaaagtgcagttccgtataatcatgcctttataaagccaaaatcatgtacaatagcattcatccccacaaccctcttagttacaataggacgataacgtttcgacaactttacagaaataaccgtcccgtccttaatgttgggcctcaggaaattggggtactcaatcaaaattgaacaaatgtcgtcatcatcatcatcttcgttgacacacaaatggatacttagaatatgcgtcaacaactataaaaaaattcgtcccccaaattggacccgcgaggtctgcgtggacccgttcgaatggatatttggcctcaggccatttatattcggggtccacacgcggttcatttgacgcatttcgttgacaaatgtgacactcttccacataattttcaacttcttcagaccaattatgccaccacacgaaatctctggctcgggctttgcatctcacaatgccaaaatgtgcccgatgaatcatttttaaaaccctttttctcatttcctgcggaattattatttgtctccccaactttttccgaattattttcccatcgaggtataatttatctctctctctaaagtacggcatcaactcatcatcatcgatcggttccacccagcttgcctttatctgtgacagtactcgggacagtatactatcttcaaatgtctctttttctatagtttttcgatgtaaacctatttcatcatcaactgtca

SEQ ID NO: 77460 - DNA, 2130 bp, Heterodera glycines
cagttcatatgagctgttgtgcttcgacaggccgacatcaacagaatgacgcacaaaatgcggttgacccgtgtgctcacgtggtccacgtgctcatgtgctaccaaatggttagaaaattgcgaattaaattcgggaaagtttttatggcattttgcattgccatttaaggcggggaggacgaagaatttgtgcgcaaggcaatcgaaagtttggtgaagaaattgaaggtggtcgagaacggcgctttgttggtttcaaggttttgacctctcgttttaaggatcgtcgtgagcaattgtccgttcgtttttcattcccctcctattttttgtgtccatttcggtccctcccaattttttagggaatcgcttatttccgcggtcacttccggcggcaaacaatcaaccagttgtgttacaattccggtcactaattgcctcaatcacattaattgtcccatttcttttctcagcgttcattggatggccgactgcaagtggccggcagaaaagggctgccccacgttgtctacgcgcgcatttggcggtggccaaatgtcagtaattggccattcgtttgcccatttttccggtgcctttgactcccatccgtccttttctgcttcctcttctcaccatttgccttccgtcccaattgaccaccaaagtgccaattccaatgctttcgatgcgccattccctcccattccgtcgttcgttccccaaccacaacaaaatcagcagcggtgtccactgatcgttcactgtttaggcgagggacaacaacagcaaatcgggccgtttcagcagcaggtaaagtttcaatggcatggctttttaaatgctctttctaaattaatttgtccatcttttttcagatgtgtccccaaaatacgactgaccaaagtcaaacgcatcggttcactcattgtattttctgaccaatgattcctttgccgttaaacaattctttcattgaagacaatttcgaactgcttcaactcccttcagttcggagtatcttttaattgtgcctttgagaacatttcactgtcaacggatggttctttttcagaattgcccgaccattggtgttccatcgcttattttgagttagatactcagtcgggcgagctgttcaaagtgccatggcaaatcaaagaggtgccattgcataaatgttaatttgtttcatcggacaatatttaattctttcaatttcaggttgcaattgacggcggaatggacccttccggcgctttgtccgctcgcttttgtttgggcgcacttgcgaatgttcaccggaggttttaccactttgtaatgaaagaaaatggcactttaagtgaagcatcggaacgggcacgaatgcacattggcaaaggggtgggcacacaaagggacagaaaaggggcaaattggcactgccaacgactgatcagttggattttggggaatgaatgacctaaaagtgatcaaaatccgttgacaattggatcaaaggaggaaagatttgtacaacagttaaatcttatcttacaatgatttacactttcataatttataggtttcgttgaaatttgctgacaattgcgaggccgtttttctcaagtccgtcgggtcaaaattaaaaaatgtactgaatttgttttctgttctctttttctcagatgtctctcccaaaaaagcgttttcgtacgaaggtttatgaattttgtagttattggtcaaattttggtaaactttcagccattttatggactttgagtttggcggaggatccggcgggtatgcctttttttaattgtcataaatacgaccacatgtttgcattacatacctcaatgcttttgtaactataaaaaacctcaagcttccaaaaaccaaaaaattttaagattttttatcggaatttttttaaagaaattagaaagtaaaaaattaaaaaaatcggggaaacgatggggggagggaaatagtgtaccatcagagacttgtatacctttttccccttttagaggcgactcgattgttcacaaaatttgtcccggcgtcgagcgaaaagtgttcgaccttcgctgggcgtacgtcgaaatgtgccgtcgacgtgaaaatgcccaactctccg

SEQ ID NO: 77461 - DNA, 242 bp, Heterodera glycines
atgcgtacgccgtcgccggctttccctcgcaaatgccctcgtcttcgctgtgcagtgaacgcagtgccgaaacgggggtcgaccatctgcgaagggtccggtcaaaacagtggcaattgttgttgtgcatttgttactttgcttctgttcagatgtgctgcaccgtttcgcttagttttgtcaaaggatggggcgaagggtacggacggaggacaatcaaagagacgccatgttggattgag

SEQ ID NO: 77462 - DNA, 261 bp, Heterodera glycines
gaattgagcaaattgttggagattgccgactacggcatgcagtacagggcggtcagccacgtgggcgccgttctcggctcttcacgcgacacgggcaccaaatcggccgaccccaatgacccaaccgtgccgaaggagcaggtgccaccacgatggttggagaattggcggaatcgacgggcaaaagcggcacagaaaagggaaagcaatgagaaagggaaagagagcgaagtgattttggacggaaatcgggacaattaa

SEQ ID NO: 77463 - DNA, 1402 bp, Heterodera glycines
atgctggaaaatgtgatggcaaatgccgacaatcagtttgggacggggaaaccgagacaaacgatcaacggacgatggacaattggacaaatggtagaaaaacaaaggcaattacatcaacaaatgatcagccaacagcagcagcagcagcagcagcaggtaataaaagaaaaagtgaggataattgccaatgaatcgcggtcactccccccccccctccccttagacattttgtccacgctcccccccccccccctcgattagacactttgtcactcccccctttagacgagtatgtccacccctccccctttagacactttctcgacccgtccgcccaattgttacggtccaatcgttttcccaccgacggccccgcgaggggcgccctccccgaatttcgtcaccaatttgtcgcgctttgcctcagccccagccgccgccaacaacctgaattgtactcccgccaatttttgtagaaagaattcgcaacgatggctatgcaaatccatgggaagagaagcgaacaaaacaaaagaaaactgacgaacgaacggaggaaaagccaaaagagggaaattacggaggttgctaaagcacgagactctcgagcagttttgtggaaaatatcaataaaaatctctcaaaaattattagccaatggaatcgaacggccaaagacattaattttgacgaatgaacggattgccaaattgcctgacctcccaaatggacaaaagtcgaataatttaacattgaaaggtgggggagggggggggggggaatgaaataaattttcataaaattaaatccaatggtcagaaaacgaacccatccctttgtccgaattcctacacgaagacatccgaccggccgttgacggcgaacggatggggcctcaggcgaaatatgcgggacaaacgaacgaatacaaagaagactggggaaaacagttcacgaagacaaacggacgaagttaagaagagtaacaaagcgagagagaaagtaaaaaacaattccaggatattatggcccattaaaagccatcgacagagaaaacgaacagacaaatggaagggaagacacgggtaaaatgggacaaacggaaagagcataaaaagcatggaatggaaggcaaaaaatgcttaaaacaattgcagacattaatccaccgccggaagggacgcgcattaaaatggacggacgaaacgatggaaaagcgaatgaaagggaaaggcaatggcacagaaaagacggcacaatcagtccgtatgtgaacgcaccggaagaaataacggggagccgattccgaaacatcgacgaacaatttaatgcgatgaacggaggaaatgggggacgaggccaaaaccgatatgtgaagatggatttgctgaacgaatga

SEQ ID NO: 77464 - DNA, 1681 bp, Heterodera glycines
tgccgaattaaatttttaacagaaaaactccgaatttcatacgggaatgaatatgtttcaagccaaccgtataaatctgcagttgtttccatacaattgtatccaaatgcgaaatattatcgaatttatgataattttggcgatgaaacatcaagggcagatttaattttgcatgacattgcaataattaaagtaattgattaattaaatatttatgaataaattaatcattcaaatttatttagattaaaaacccaattaaatttacatcaaatgttcgaccaatttgtttatttggtattggtggtaatttttaataagtttaattcaattaaattaatattttttacccaataagtcttaacacaataaactcccaaaataattttatatttaaaaaaaaaaatattttgttagtttttgtaaaaaaaaatgtttaattgatgttaatatatttttgtaatatttttacaaaatgatttttaataatatttggttttcaatgaaaaaacaaaactttaagattcaacgcgcgcaaaatttctgatgagaaattcaaaatcagaaactaccaaatttattattgccggttggggaatgactcggccacagtgcgcgaaggaccaaaataagactcgaaatgatcaattgaattatggcaaaatgcgaatgatttcgacacaaaaatgccgagaaatggccaatgaaaaaaaaaattgtaaattgttagatttacttcatttttaattttaaattattgaatttagcgtttcaatggtctgctagcgatgacgctgaaattgaatcgatgctaaatgaatttgaaacatacgggttggacacaacattttgtgtggtgcccgatccgagcattggcgaaccggtacggtagaattaatactgtacaaacttactgtatacaattagtaggggaaaatgcatagaaaataaaaataattaggtaatatgaattatttaatatttttttactgtagggtgatagcggtagtccattgatgctgaaaattggcacaaacaattggatccaattgggcgtcgcaaccaaaacgagctgcaattccaaagacccaacaagcaccgaagaactctttggtaaatgcatttaaaaataattgtatttatttttacaaaaaacaatcgtcaatgtctttttttatatctataaaaattttgtttttagcatcatttaattgtagggttccatgtgattgggattttggaataatttgcggggagacacatataggtaatcaaaaagcgactatagagcccaaaattttgaaattgccgggaccggggccgggacttggaaaataaagcgggtcgggatcccaggaatgggactcccgtttttccgggactcccggtctcggtggtttgtccaaaaaacgggaccggggctggaagtcccggcaaaatcgcgacggctccagtcccgtccgggctctagaaattaatatacatttctttttttaattcttcttttctctccaacgctcgattaattttcggcgttcgggttttcctcttctttttaaaaattagaataattagcatcaattgacaaaaaacatttattattcatttagctcaatacactccgattgattgcgcatggattgccaacggaacacatggcgaagtgaaatgcataggatgg

SEQ ID NO: 77465 - DNA, 1055 bp, Heterodera glycines
atgctttccacaatttgctatttaagcattgttcttggttcgtcttcggtttttttcgttgctctctacccgttggctaagcgttacaccaattggccacaactcattcttggtattcaaaatcgtcacttccaaacaaattagaaaaagtgtttttatagcatcagtcgactacctcggtctgtaaaataggaatccgaaataatttttcgacaactactctatcaaaagttaaaaacccgggactgggatggcaaaatatctttggtactgaataagtatacatatagaaaagattttacttttcggttttttgtaaaaaataataaaaatgataattcgaagatttttgcctaataaataataattaaattgaccatttaattcaaaatctgttaataaacttcccccttcttatgctaaaggtatcactttcaattggggtgctctactcggatttacggctgtaaccggcacattctcttccgctgtgtgtgtgccgctttacttggcttgcgtttgttggacgatcatttacgacacgatttatgctcaacaggcaaatccattaaacgccaatcaaatacgcatttaacctgattaaggataaaaaagacgatcttttgattggcattgggtccaccgctgtccaatttggtgaccatagcaatttgtggcttacttttgcctcacttggaatgcttagcaatttgctatttctgggatttgtttcagagcagttatggccctattttctttctttattcggtttgtcctttttgagtcacttatctcaattcttttcagcttctgggtctcatttggcttggcaattgggcactttacatgttgatgatccaagtgattgttggcaaaagtttcttgcaaatcaatggttaggcactgtgattttttgtggtatcttgctgagcaatttgttgaagaaaggcgaaacgaatgatgggaactcggaggaagaattggaaatggatgaacaggaaaaatttatgatgtactttgttcagagaaacatgaatgttaatttttacacataa

SEQ ID NO: 77466 - DNA, 436 bp, Heterodera glycines
atgctccgcctccgaagagagccaaaaaatatggacttggaagacaacccggaggagcagcgaatgcaattgaccaggcacatggccaatagagtagccaagtacctaaacttggaagaagtggtaattaatatattacagatgcaaattttttaaattgattgatccctaggaaattgaaccgaccaatcggcttgtctgcacgtatcaatttcaaataagaatgaatacgcgacccattgaacagagggaccacggaataactgcggtcactctcgaatctgcgtgaaaattgaagcaaattccacaccggacttggttagcacccacctcggttcatacaaatcatctggttttggcgcattagcagaggaacggagagttgggtagtgccgacaagacgggagattttcataaccgacaaagaaccgattga

SEQ ID NO: 77467 - DNA, 483 bp, Heterodera glycines
atggaaatagatgatttcataaagaaattcacggaaaaacgcgttattggccatacgaggtaaacatttttccgaaaggagtttgcttttcccgtgaggtctgctcatctatgttttatttttataaaattaagttaataaatatatgattaaaaataaaataagctatagaaaaataaaaaaaacaaattataaagaggtaaatattttcagaaggctaaaggccgaaaagcttgccgaattgcttcgccaacaatgccaataccaaccgcagcacccgtctccttctgcacttggaatgaccactcaaactcagtattcgtctcaaggggtggcagcctcaatgtatcctgtccttggccaggcttatacgagcccagccaattttcggcattcttatatgagttaggagaacggttcaaccggagattacttggacacgcacttattattttctatcaattttttgccccgacaaataaa

SEQ ID NO: 77468 - DNA, 876 bp, Heterodera glycines
atgctaattgcatttatgaaaggtcaccaagaaattcaattcagtgagtattcaagacaaaaatatgaagcacaccttggcatcatgcattttatgagaatgaattggcaatgtgacaaaattgcggtggagtttgaagaatatgaacggacagaatgccaaaaatatcgcaaatatttggacattttgcacgaatatttgtgcagagaatacgttgggattcacacaaagaagccaaaatttgtgcttaaaaataaaattgaaattgaaggaccaataatttatgcggtgaattgtttggccacaatttttcaattttattttaattcggaagagagtgagtttaatgaatataaattaaacagattatttaattataattatgaaccaaaattattgaataatgagaagagattggattatgaacaaaaattgtcaattaatgaaatgattttgcaattggcaattgacacagcgaatgaatggcaaacaaatgaaagtttagacggaataattcgacaaaattgtggagataaatttgacaaaaagttagagaaaatgttcaaaaaagcggaaaaaaggacaaaagaatacggtccttggggtgccaatgaaataaatgatgacaagcatctgataattgcgtattcggaatttgatgatcaatggaaatgggtaagacttaacgttcaatgtaaattaaataaattcaaaatttagattgatgatgctctattttcggaatttgtcaaaggattagcgacaaatttggagaatttttttaagatggctaaagaatattcaaattatttacgtctaaagaaagagaaaggatattatattatctttaatgaaaaacgaatgatattcttttgg

SEQ ID NO: 77469 - DNA, 1444 bp, Heterodera glycines
atgccagttgttgctgctgttggtaagaggaaattttttaaattctctgaaatttttttatattttttaattattacagtaagccttgctgttgtggctgtacctgtgtcgggccgtgccaatgttgtaacccaccactgctgatcaaattgccaaggtccaggcaatcgatgttttgaaaattttttcctaatttttcccgaattttcaggacttgcccctgctgttgcaaatgctgtggctgttgctgttgcaggccatgtaaaatccaaaaagtttttaattttttaaccaaaaaagttttaggctgttgctgctgcggttgcggcggcggtggcggacgtaagaagcgctcaattgtcctccgctcggccattgaagcggccaaaaccggaaaacgtgagaattttcaaaatatattaccgtattttccaaaaaatatacacggcatttcaaaaaacgcatacatgataccttaaaaattcgccggtgaatttagtaatttaaggcctttatttttgatctccctcaagtatgggaattaatgttaataaatatttttaaaaaaaattagggacttacggtgctttattttaggaacactaaatagggtaatcaggacgacatataggttgaagtaatacggtacttgtttttttttgtcacggtacaccaaccccaagcctaattccaattttgacggtaccaacctgctcttactcagaaaatttaaaaaaaatttaatttttagctgctccaccagccaccaaaatgccaatgtcatcacagccatgcccaccagcagaagatataaactgcaaacccacaacagcgcgcagcggcgccactgagtgccaaaagtgtggagctgcagcaattagtgccaataaaagtcgcgcaagacgaatggcatttggcgccacatttttattcgcttgatttttcaaaatttgtcattattatatttatttttgtgagctcttttttgggggtttattttatttatacaaatgctggcggtggtggtggaataaaattggattttgccattcaaaatttgtccgattttaagcaaaatttaaaattaatcaaaattatttgtcttttaatttcgcaaatttatttaaaatacctgcaaattattttaattttcagcaattaattttaaatttctttgttttttatttaaaaattactacgcactgcctcagaagtatctatgagaatgtttaattgtgtcaacaaattaattgtcttcagaaattaattttgtcatcattggccgtcgtaattgggcaattattactaattaaaatttgaagtggagccaagcggaatcgaaccagcaaaagaaagaagaaagcagaacacactacccacttgactttatgcacaaacactctcgccttgttaaaagtaaaaatgaaaacaaaaaatttaatta

SEQ ID NO: 77470 - DNA, 1713 bp, Heterodera glycines
atgccatccctgatagggaccgccggaccctctgttcctagttttttgaaaaattgcaccgcaaaaaagtgggtttgaaaagaaaaaaatagtcaatttatgaaccgttaataatttgatttccgatcaactttttaccgtcggatccaatcgaaaaatcttagtcgacccatcaaccccttttaatgcatcccgccagcccctaaaaatttatttttcagcattttttgatttttggaaattttttgaatttaattgaaattttttcgaattttccaaaatcccgcaatcccgcgcgggatcccgcaaattttaaatgcgggatttgcgggatttgcgggattaatcccgcgggatcccgtcccgcaaagaattttcagtaccaatcccgcagcgggatccgcaaatttgaaatttccgggctctagtgttgataggctttttatgcattttattcaaatttgcccacctgtgtgtccacaaatcgtactcgcgtgtgcaccggatcgcgcaccctcgtggttactgtacgcacaattcggcgctgttcttgatcatctcccccgtgtacagtagtggcgtatactgtatgctcatcgtagccctcgtcatcggccgatgcactaacattgcttaaacaaaatagttgattaaatctttaactaaaaaaatttatggtataattattaacccatttccaccgcccatggaaaatgcagcgaaatgatgttgaggagatgctaaaaataaaaacaaattaccaaatgcatttataattttgttgaagattaattttgtctaaaaatatttaaaaaaaacaaataaataattagctaattattatattaataggtagggatgcaacttttagtgatttaactattttttttttgctcgattgttttgaagaaaggagctcaaaaaacgcatttctgcgttgaaatttttcgatttggatctcactatcgatcactagaaatcactattttcacgcttcgtcactaaaatagtgaaaattcactattttggcgttttatcactattttttaactatttcgacatttttcagagattttattagcaaaaatgcaataaaatcaaaaaatacacccctaagaatcgatctaaaaaaatttcaaaaaatacactcctaagaatcgaccaaaatttttttttaaatacaccactaagaattggaaaattttttcaaaaattctcccccaaaattttttttcttgacaaaatttttgatttaaaaaatatcattatttgctaagagaattttataaaggaaatgtagctcatttgcaactgcaaccagtgaataaaaattatttttgcttaatttttggctgaaaattaggtcactatttgtcactatttcggactttttgccactatttggtcactattttggcatttttactcactattttagttaactatttcgagatttttcgtcactaaaagttgcatcattaataggaattaatgttgactaatttaaagcgaatcaaaagtatttttcaggtgtcagccttgttttgtaataaaagttgcacgagaatgtgagatcggaatgatcgggaatagaaaagtcagggtgatcgggatcacgatttttacccgggatgaaggatttacgggaatgacaaaatcaaaattcatttgtggaagaattaattttcattaaaaattcctttatcaaataaa

SEQ ID NO: 77471 - DNA, 1500 bp, Heterodera glycines
atgccttcaaagcaacaaaataaaaggaagaaggaactggagcgctatcgacggcggacggagcaatctgtcagcccggttcgctcacccgtccctgacgggagtgcagatgggaatggagcggcatcgcccaggggcttcaacaccccaaacattagtgctctgcaattgagcacgccggcttcttccactggaagtaaaagaaggggtagaccccagaaagccggagcgaagccaatcttggctacccaagaaagggtgtctctcattgacacacctcgaactgcggtcactcaaagtgaccagggttcgccgtgcaaaaaaaggggaaaggtcgccgagtgtggccaacccatgtttgccaatgaagctattgctttgacgcctctttcgactcaaagtcgtggagggcgaccagttaagcaactgggagggcatgccggtaaaggaagaggcaaaaccaacgagtgtatgagcaaatgctctgaaatggaccaaactgtggaaaacgctctaagtccggcaccctcgcacattgtgtttgaaaaaattgatttcagctctgtgcaaattaatttcgccacatcgcgaaattttgcctgtaaaatttggaaatgggcagcaatcggcctttacgaacgtgatggcgaaacaccgattgccccaagatctggcccaagatacattgagacctgttggaatgatatgacccagtttctcaatgacggctttgctgccacatacttggcatacttggcaaccatatcacaacgaaaagtggtcgttgttgacccaatggtatggagcaatggcctggacagagtcatgccttacaaaaatatgacatttgggtacgaccctaatgttccggcagaagttatacttttgccagtacatttccctggacattggactctcattgtccatgatgtgcaatttggcactcattttgccgattctttgcctaccacatatggcaggttggatccgcaactgacggataaaattaaaaatatcatttcggatattttgccgtcagcagtgttgacagggattgttgatgtcgaaaatctgacggtccaacacgatggtaatagttgtgggtacttcgtgtgcctgtatgctgagtcatggcttatgaacaatcgcacatttgttctgcctgatttatccatcaattatgaaaaaaagcgcattttatggcacattaacgagctgtatggctctgataatgtgccatatcatccaagggaaggggtgccaactccttgcccaattgtctatcggcatacggatgaagcgcagtcgacatccaaggccgctgagctaatggaagttgatgaatatgatgatataatgatcatcgaaccacatacaagtggacaggcagttgatgccattctcacccaggcccaagtggccggtgaaaaccaagctgacacgcttggtttggtgtcggagtcttgcatcccgcaagagccaattgcgcaggctgatgat

SEQ ID NO: 77472 - DNA, 1166 bp, Heterodera glycines
atggcgttcccattaggcggcccagccacatgcatggcaaaggccagtgcaagtctgggcgttatttccatatcatggtcgcaaagcagaccgatatgggtgccctggtcgcaaagcagaccggcactgtgtcatggtcgcaaagcagaccgacacggttggctatggtcgcaaagcagaccagcctcgccatggtcgcaaagcagaccggcgtgtgcactacatatcatggtcgctaagctgaccgatatgttgccatggtcgcaaagcagaccggcacgtgcacaaatctcatcatggtcgcaaagcagaccgataagatttgaaaacaaataaaaatgtgagtctcaaaagggtcataaggacagaaatctttacaattgactgaataatatttttaaaaatttaagaacattttttttctgtcaagtgtaaagacttcttaattctattttggagcttatgcgtgacaaagtgtacgaaacttaattcctaactaacctcagatttgggttagtaaaactattggcttagtgtacaccttgccataatttttgtatatatgagcatctaaaaattttttcttattttattcatttcatggtcaaatcgatgaattttaaagatttaaaccggccaaacatagcaattgcttcagaacatttttttatttcacaacttatttacgggatggaattggtataagcccacaatgttgagcgattttggtttttcaaaaagttacaataattgattttcatatgctttaaaattacaatttttaagattttttcaacaaagaaaattgtttccgttttcaatttatgaattgccgaatgcaatcaaaaattttgagctcagaaacatttgaccggctatttcatatggttgaaaagtataaattttttaaaataagttttttcaacaaagaaaattttttccttttttcaatttttgaactgccgaatgcaatcacaattttagagcttattaaacatttgaccggttactttgagaaaaattgaaacttgccagcaatccgctttgccattgaaatgtttgtccaccagagcatttaaacggggcgaaagcaatgccaatttgggccgagttgaagatggtcagaaatgcccatccaaagtgttgcaaaaaatcagctgaaaaaa

SEQ ID NO: 77473 - DNA, 396 bp, Heterodera glycines
atgtcaatgatccaaactgaattagtttccatgtacacagaaacaaatgtgagttttatagatagattatttattttatgcttttgtaaaattataattattcaaagatagcatgcttaaaaagttaacaatttgaaaacaatggaacttctttgaaaagtattaatctaataacttatttagcatagcctataaacagattgaaaaatttaatataatattatatattgaaaaaattcatatttttaacaacattaaagcaaaccatcgaagtaattttggcggtttcccgtcgttctgcaaaagtgttttgcctaagtttacgggcagacatgctcagatattgttcagagtacgatgattcccaatcttgtgagttttaaaaagaataataaa

SEQ ID NO: 77474 - DNA, 2162 bp, Heterodera glycines
atggccagtaatccaaatgcacaactgttggatgcatgcgaaaaaggggcggccttgaatcacagttcgtttgtgaatttatcatgaaatttcggttaaaattggcaattcaaaataaatttttaatatgctttaaagtgacaaatcattttgtttttattcctttttagtcaaatccctaattgagcgcggggcgaatgtgaactttgccgatgaaaacggtctttcccctttgatgggggcatgtgtcttcggtcacattaggattgtgtcctatcttatcgagttgggcgcgacaattgagcaaaaggatgtcaagggtcagttaccgtatttatctgcccaataggcctccggcacttttttagatggagagacaatgcttttaattggggacatatttttatgtagaaaaattgggaccaaattccatttaaaataagaatggtcaagtacccggtaattgtaccggtggcagctcccctttttcgaaaaaaatttcaatgcgaaactcgaaaattttaaatttcgactttttgtttcaaatcgcgtcacattacggaattgaatcgaaatgcgtgtaaaaatcgaattcgcagacccagaaaaccaaaatggctttagcttgaaaaatttttttttaaatttttctccaaaagtaggttacaaatttttttcagttttttattcctttgttcgtgtgtaccttataaaattattaaaaatttataaaaatatttttcaatgcttaaataatataaataaatcattttaggtttgaccgccctgggacatgctgtcaatgaaaatcagattgaatccgtcaaaatgttaaccggaaaaaacgcgaactgtttggtgtttgccaacgacaatcgctcgccgttggtcatcgcctgtcaggaaggccgcatggaaatccgtcagtgacttccgaaatatggcaaaattgcatttcaaaacgaatttcacagtttgagttcatcttttttgttagtgaaaatttgtcacttttttcggtgccattcgcgtgatttttttaaaaattatattgctaattcccctttcacagtgagccatttgaatttgaatcactgtgacgagcacggaattactccgcttatggtcgcaacccaagaagaaaagttggacgttgtctgtttcttgttgcaaaacggagccgacaaaagtcagactgatgcaaaaggtcagttttttgatggcatttaattagccaataaaaaacaatttaagggagaaccgcgctcgcatttgccgatgacctgtgcgattcgaaagaacgtaaccagcttttgaagttgttgagtgaccgctaattgtgagaggaaagggacggtgatcagaaaattctttgtcagtgattagaaaatgttttgccgttgttgattttgaccgtttaatgtgttcatttctaaattcgttggtgcttctttttactcatccataaagcgccttttaaacaaatcaaatggaagccaaatttggcccaagctttcagttgacaaattgtcaaaacattttgccgttctctcattttcgtctctcttctctctgtctgtttctcctatgccattttctcattgatttatccgtccgttttttggcgtcctttttccgcccagtgaatgttctccagtgcagccacttgcgcacttttgcctctatttcccttcgggcgttttatattcaatgaaaataattcatgatttttgtttcatcactaaattaaaatctccagcatcaccaacagattattttgggcagatttggtgccataataataatggcaccgaccgcagaaaacaaaactttgaattgggccactaaacgactcaagcgacgacaagctttgaaaataggcggtggtttacgccgaaaagtcaaaaggcgaaagtgctacacaaaggaaggtcttgaggtgtccgtggagtttcggaatgaaatttggtgggtgcatagagcacccatgggttcttaagaaaagtgattttattttctgcgaaatgaatactagtgccgagatatgacgtgtcaattatttaattgtgaaaatattattttattacggtgcgcctattgtgaaatgtatctctgtttccatcatttttataatgactaccatatgtgcgaaaacgaataaa

SEQ ID NO: 77475 - DNA, 142 bp, Heterodera glycines
ttgacacgtcatatctcggcactagtattcatttcgcagaaaataaaatcacttttcttaagaacccatgggtgctctatgcacccaccaaatttcattccgaaactccacggacacctcaagaccttcctttgtgtagcac

SEQ ID NO: 77476 - DNA, 511 bp, Heterodera glycines
atgatacactcacgttggggcgatcaagacatctcgatcaccctagaaaattataataatgagtatatgttccatcagattggccatctcccccccccccccctccacattctcatttatgggatctgttttttttttgttcccacccgatttaatctgctacagaagtgactaatgggagcgttgaaaaggcaattatccaccgattaacacttttctttccatctcgtgtacagctacataaaaatcatttttaaatttagttgtattcttttttcgcattcgtatcctatttttcacactcttgcaacacaaaaatttcctcggctaatctaaaacctattaactctagagatcgtctacggaccagagtcgtatacggatttttacggactacggatttttatccttaatccgtatgagtgcctaatccgtaatcctgatccgtattttctaaaaatgccgatctctaattaaaaccatcttttattctaatttttgtgacattaaa

SEQ ID NO: 77477 - DNA, 284 bp, Heterodera glycines
atggggttatcccagttttagtatcctttttgaaaaacaaaaattttaataaattattcggtagctcaactagcgccaaatttatttgtatgatttttgatccaaaatgtttcagtcagttgcccattgaattgctcactgaacactctgaggaaattgagcatttgattctggacgagaacgagcttgacgagcaggccttggaggacatccctcgcctggacaagctggagacgctgagtttgaatgggtcggtcgatcggcaatttaacaggcgaaaataa

SEQ ID NO: 77478 - DNA, 329 bp, Heterodera glycines
atgctacacccttcaacccattgcgcgcgcaaaatctcacgcaagcagtacagcaacgcgccggacggagcggaagagtgtggcggcaacgcggacgcgcttttgcgcaaagcgagccgaaagctgtcacaactaagcgggctgggcgacttccagcagcgctgcaataccgccaccagtcgccgtcgctgttcatcgacggaatccttgctggcggcgctgaatggtcacggctctgtggtgtccgcaggcgccgactcgtccaccgccagccatcgttcatctacggacgacctgaccgtgctcgactgctccaaccttagccttgg

SEQ ID NO: 77479 - DNA, 702 bp, Heterodera glycines
atgattgccgaagtggaacggctgttgacacgaaaaaggtccgcaccggtgcatgcaagttttgggaacattgacgacgacgatgaggaggagggcgagattcttgacgtctcgtttgttgaggaggaagaagacaatacgggcgaagcgcccttaaacccactttcatatttgaccaagcaatcagcggctcaacaagaaacgttgcggcatgaaaaatgggcacaagaagagagaaagcgaagggaagaggagcagagaaagcagcgagaaaatgaacgtagacggcgagaagaagaggagaggcgtcgtaagacagaagaagatagaaggaagactgcagagaaagcagccaaggaaaagaaggcaaaggaagagaaagaggcaagtgaaaagaaggcaagggaggaaaaactggcacgggaaaagaaggaagagcaaagaatagcaaaggaaaagaaaggcgagaaagagaccaaggataaaaaggctgaggaggagagagtagcaaaggaaagaaaggcagaggatgagagagtggcaaaagaaagaaaggcagaggaagagagagtggcaatggtaacaaaggcagaagaggaaagagcggcaaaggcggaagcggagagagtggcaatggtaacaaacgcagaagaggaaagagcggcaaaggcggaagcggagagagcggaaaacgagacctag

SEQ ID NO: 77480 - DNA, 741 bp, Heterodera glycines
atggatgagtcgaaacgggaaaatttttcccctcaaaatgatgatgacgtcatcacaattggagacaacaacaacactcaaacactgcttgacctgcaaccggggccctcaaaaaggggacgcaagcctcgcttggacaaaatccatgaggaaattgcttccgcaatgaagaaagcaaaagccatggaagctgaaggtttggctttttctgcaaatttctttaaattagccaaattttagtggatgaatcgcccaaaaaacaaccgaccaatgtgtttgagtacccgaccatattttggaaattggcccgcccaaaggttttggctaatatttaatttgaaaaaataggaaaatttcttaagtatggagtgttcacgttcatgtgcaaagagtgtcgtgatgacaatttccggcaggggaacagccgattcaaactcatcaatcagaatggcgagcagcaacgccttgagttcacccaatcgttttgccaagactgtgcaaagctgaactttgattgcaccgatctgatcatgaagcacctaaagaaggatgaaccggcaacgacgacgacgacgatggcaaagagtttccgctggatcaaagatgggggaaagtgaaccgagatggcacaccacgatataaggacgatctcattttgaagaatttatacttgttgatcaaatgacaaactctttctttgtaattttgccgagcaatacgccaggctttgttggaaataaa

SEQ ID NO: 77481 - DNA, 1285 bp, Heterodera glycines
aaattgaaagcaagtttattttaaatagcaatacattagtttatcatttcatctattttggttatgaattattgcatgcaccaacatatccatcttggacttcagtttcaattctaaagtatgtcataagtttaaaaatcgccgccgtcactttttgcgggattacagagacctcattttctcttcatccctatacagtgcggcggtgacacagcaattggtgcactgttgttactatctggctacgcttctaaaaaaacagcggatacaaaatgcactagtaccaaaaagaaattagaatttgttttaatgcatttttttgtatattttaaatttaatgtttatgaacggatgggtatttcaaattttttttaccataattaatttttttttttaaattccatttttaaggaaaacgcaaaacaattccaatttgtggacgtccgcttggcattcgtcgattcaattcacaacaattcattgttgctgacgccgtgcttggcttactgctcatcaattttgaagaaggtgctgctcattgctagaaattctgagaaacaattaaaaaaaaattattattaaaaattgttaattaacaaacaatattgaacgcaattaattagggaaaaaatcattaataacaattaattcgttaacaaagaaaatgagaagtggtaaatgtcgttaattaaaaaccaattaattctatgtttagaatttaatagacattaatgcttattaaattaattatttatggtcaaatggtaaaaaacaaggacttcctaattaggcacacacaaaaaaatatgaaaaattgggcaatttcaggccaatttagaaaatttgaagataattagacacactaataattttgataaagcaccgccaggaaaccttagaaaaatttttgcgaattttgttggaaaatttgataatactgcttaaaaaagaaacataaaataagcaaaatgctgaaaaataggcaaacccccctttcttttaaggcacatgaaaaaaaatttaaaaaaaaattttattttccaacattttttccagagacaaaagaagtgctgttgccaagtataactgttgtggacaagaaacgctttgggcttcccagacgatttggacattgtggacaatgacacaattttgttcaccgattttgtccgcaaaatatggctacagtgattgtgatttggcattttttgagcacgtccgggacggacggtgtgccaattggattttaatcaaaaccaattatttgcttaattaaaaaattaaa

SEQ ID NO: 77482 - DNA, 1114 bp, Heterodera glycines
atgttttctgtaattccattgaatgatttgtgtcaattagcaaataattcatgcttattgagtaaacattttaataattcgccaattctcaatggaatcttaaaaaatgctgaaataattgaccacctatcgaagaaattacaattcgatgaatcagaaaaaggtagggatatccaattcatcgcagtttggagatcatcccttcttttagcacttctttccattgtcaagcgcaatgttgaccgtcttcatcaattatgcaatgaatggataaataccggacacttctcatctattcccgaccattaccggttattgtacgcattttgctgtgccgttcgtgccaaactcagttatttacttaaggattatttcgtaagtttttagaatgaattataaaataacagttcgatcagttgtctctccgacattgtgacgatgggttgctgaagggcaatgatttggaggatgaaagtctgtccaaattcgcttctttcttgtgccgcaaatttcttcctccgccctcagaagtgccggaacatcagaccgatgtgttttatccagaataacaattaaatcaacatttaaactaagatttagtcaaaaaaagcgcctaatttactgccaaattctgtccaaatttcgtcttcagaattgccttcgctcgaatatttcttcaacaatttttataagcttcaagtccccgtcatcattcgtggaatggtctttttttcatttataaagtttatatacatataattaaacatttatttaggtgaatgggtggccggcatttgaaaaatggagcttttcttatttgaactcgatttgtgggcatcgtttggtccctgttgaattgggtagtaaatacacggtccgtatggaatatttttggcctttttaacgaaaatttttgttcaaaaattaggatgacgactggcgccagcagatgatgagtttcaaccaatatttggacgattttgtttttcccactaccaatgtgagttataatcaaagcatttttttgcaaattctttttcctttttgtttgatttttcaagaaaaatgggtaaatttttttgaaaattatgcacagttttcttaacatatttta

SEQ ID NO: 77483 - DNA, 246 bp, Heterodera glycines
atgtgcgccgcaactgattggtcgtcgtggaggtaaatggccaaaggccgtcgatgttcagcgccacccgcgggcgagtcgaacgcctcggcaatggcatcctgcagagatccatggaagaacggcgcatgctgggccccgtatctgtacaaatgatagtgaaattataaaattaatattcctcaatttcaggaccccaaacgagttaaatgacgattgaattccatttttgcaaatgtcttcaaa

SEQ ID NO: 77484 - DNA, 1215 bp, Heterodera glycines
atggacggagacggcgacgaaagctattgcgactcggacttggagttggagcggagctcgtcggcgaacaatgtcaaccaactgccgttggtgcccaccgaattcacttccattccggaggccatgcagaattttaatgccgtttttgactcgaggtttgtcagttgtggcttcaacattttgagccggtttgtcattgtgagatatggtgcctagtttaaagttacaacttttgaatttcactaaaatccaaataggagacccttttactctttatggactattgtctagtcctgcaaaattgccgttggttacgaacctgacctccatttcgacgagttctgggttgattcgaaaaagaatttgtggtctatctttcgattgttggctatggattaggaattcatccaaatggatgtcagattcgttatcatcgacccctaaaaccccaaaaacaaatgggtcctccctccattttggtatttagtaaaattcaaaagttgccatttttaaactagcgcccacatcaatcaccgatgagaagaaggctttattttgaagacatttgcaaaaatggaattcaatcgtcatttaactcgtttggggtcctgaaattgaggaatattaattttataatttcactatcatttgtacagatacggggcccagcatgcgccgttcttccatggatctctgcaggatgccattgccgaggcgttcgactcgcccgcgggtggcgctgaacatcgacggcctttggccatttacctccacgacgaccaatcagttgcggcgcacatcttcgctcaaacggttttcacaccttttttgcttgattcttgctatattctcgaaaatgaatgggttacactgattaaacacgtggaaacatccgattcgggtgtaatgcaaaaattgagacgaaaactaaaatttttcgggttttttcccatttttttgctgtgattaatttttatttgcttaatcaggtgatgtccaatgtgaatgtgagcaacctgctcaagtgtcagttcattttgtgggcttgggacgtttcgttggcggacaacaaaaagcatttgttcgattggttggagttggccaacctgaccgaagtgtccaactacatcaaaatggtgccgcgttccaaatttccgatgcttattgtgctgatcaaggagcgtgccgtgatctcgcgcgcctccgccattcagg

SEQ ID NO: 77485 - DNA, 875 bp, Heterodera glycines
atggctttgagtttggaagctaagagacatatttaccgccgcgagtttaattcgttaataagggtgggtcgtcgtagggtcggggggggaggggtcgtaacggaggggcaaaaaatttttattgagaaatttccttagcgaaattcaattaaggtggccgtctccttttgttcgactatttccaacactttgcattttcttccgacgaaattcgatcgcaaatgggcgaatccatttctcagaatgagcacccttttctgggcattgccttctacaatttgcacccttgcaaagtcgagaatttaattcttttttatattttagtattaatgatttttaaagcctttaattttcggtaatttaagggcaatgtgcgagagagtctctgttttttgtgcccaaagcaaaaattgtcattttttgatgaaactctgttaacaaattgcattaaaaattccaaaatgttttaagtactctcgaaatttaatttcatattttttcaagtattcccgaattatttgtagattctcgaaatttttaaaaatgttttcaatttttgaagaattttttaaattggaggatggcaattttaaaaaacgagccaacacggttgaaaaacattgattcttttggttatattttgggaaatttcttttgaacagcaaatgcttttgatcaaaatgttttcttataaatttgccttttttcagacttccgaactgatgcgatcgcttaagccacgcaattttgtcctcaggtcgtcgtttatcgatcatttaaagcaattatcaaattatttatcctctccctttcagtttcctttcaacgatcggttcgctgttcaaaacgaattggccattagcactttttactaa

SEQ ID NO: 77486 - DNA, 2410 bp, Heterodera glycines
atgcaatcgatcgtggttgccagccctggcctccacccttatcaacgacttttcaaacgacaattcggggcagaattcgatgaggaaattcagccaggcatggtggtcatggtaggcaaagtccaactcacacgcccttcaaatttcaaagtttcacaactttacattttgccagagaaaagtccatttttttctggtgacgaaagatcggtctttaatccaattgtggccgttgaactcaacaaagcaccatttaattatgaatttccctttcccccgtcccttcccaatatccgtttcagcgaaggcgttttggcagcagcaatttcagcgtgcaccgatcgtttggaagccgattatcccatttcacaattagtacagtgccagaagtgactcattctaccacgaactcgttcactgcatggatttaccaatggctggagacaaagaagcaactggttgattatgccaaacgatgggaagaggatcaaccactgcagatgaagctctcaaaagcggataaagccaagccctgcgggcatggttttatcattgagaattggcgcgagaaattggaaaccggattttatttaaaaattaaaattttcatgtcttatcaggatgccaaaaaatacgacgcgtatgaggactttctgcgcatccgagacggaggagacgaaggcgaattccggcccatgcagtcgttggactcattaaacaaaagggagtttcgatttgttggccgcacgttttcagattgggcctcaggcgacatggacgatgcccgaattggacaagcactgctcggccttggcgaaaaactgcctgttcaaggactcacttgggacagcttgacgcaacggcacccggcgctctcatctctatgcgaaggacaacaacaaaccgcactgtttatgatggaccccatccgacgattggtcttcatgcaggcgccgccagggaccggaaaaacgtattgttcagctacaattgcggcggccatactttctgaggatccggacgccacagttctgtgtgttgcgcccttgaacatcgcaactgctcgtctctgcgaagaaatgcaaaaagcattgcaaaaggcaggttctgaaattccccttttggcacttttcagcggaaacggaaaatatcggtatgctgtgcacctccaaaaaatttcaaagcatttgttggcaaccgcagtgagtggcccagatcttcaagaagctcttaaagatgggctcgaaaagaagaaagtgtcacggtatttggagcaatgtgccgcaaatccccgacagactgacgaaggaacggttgccaaaatttttcttggaattgaaaaaggcgtgcactcttttgcaccctttcacttggcgaacaaattgcgcccatttttgaaaatgtcagccacataattttagatgaagccggacagcgccctattcccaacttttgtctttcctctccttatttagatcaatcaaaaaggtcctggtcaccggcgacaagtaccaattgcacgtaaacatgatggaattgccaccagcagtgcaccacggattcggacttgacaccgccatcatcaactttgacaattcgctcccggttgactcaacaaccctcacaacttcattcagatcgcacccattcatcacaaaatgcattgaggccgggacatatgccgataaaggggaaaaaatcgctgcaggacgaacggaggacgaaatgacccttttaaccaagaacagcaacttcaaattgcccgtaaaaaattcgccgctgctgttcatgcacatcactgatcagatggagcaggaggaaacatcattctcgtcaacgaatccacgacagactgatgccacaattgctcttttacacattttggttccaaatttacaaggcacaattcgcgtggtgtgtttgtacgccggacaaacgctgacattgctcagcggtgcaacgaggaaagcattgaggaagtgatcgtcaccactgccgactctacacagggatacgaggccgatttgacaattgtgacaacaacattctcgttggaccaaatgggcagccgctcacggcatttggattttatatgggaaataagttgccatacttcactcaaaaaacttcgggacccattaatcagccaaatcaatccccctctccctcccattttcaagcatttccagcacagaacacatatgcttcagcagccggccgaaacagcggacgaacattttacgcgcgaggtgccaatgcccaacaaatacaaggcgtttgcttccgatgtcaaaagaaaggccacactgtgcgaaactgccccaatcgattcgtcggcgagcgctaaaaacaatcacattaccggcacaccaattgcttcctcgcttaattcttttcaaattttaataaa

SEQ ID NO: 77487 - DNA, 661 bp, Heterodera glycines
atgcctatgacacggaatagccctttccacggtaagtggtattttttggatgttccaattttggcgcaataatttttgaaaagtacccgatcaccaattttaatatccaatcctctgacatttttgtcatactgtattttcatgcgtagttgagcctcgtggctttgttctgctgcacttttccaagcctttctcaaacaacttatcaatcgttgtttgaattcagactcgtctgttattgcaatcggatttgggactctagagtccaaaatttggtctactgcaaaaattggatcccttccaaaaacaagaaagaaaggactttccccggttgattcatgaactgaggtattataacagaaattagcaaagtctaaaaaatcatcaaaatgtgggtcctgaggtgaaatgtatttggccattatattatggaaggttctaaaggtccgttcagttatggcattgccttgtgagtaatgtggagtggcaaatttttggtttatgtaaagaagtgaacaaaattctttaaagaattcagaagtgaaagaagttgcctggtccgaaattaattcagtacatccgccgaattttaaataacaaaaaccagtgacctgagggaaatgggaatgtaaatgcgtgggggcgaattttgaattttaaa

SEQ ID NO: 77488 - DNA, 1404 bp, Heterodera glycines
acacactgatggcaacacttacgaagtgaacttggtggatgaacaaagagacgatcccgaagccgccacatatattgactttctttcaactggcgaatttcctcctgattttactgacgaagagaaggacaatttggcagcacagtccgtaaatttatatttaaattcaggaattctttattttaaaattcaaaattcgcccccacgcatttacattcccatttccctcaggtcactggtttttgttatttaaaattcggcggatgtactgaattaatttcggaccaggcaacttctttcacttctgaattctttaaagaattttgttcacttctttacataaaccaaaaatttgccactccacattactcacaaggcaatgccataactgaacggacctttagaaccttccataatataatggccaaatacatttcacctcaggacccacattttgatgattttttagactttgctaatttctgttataatacctcagttcatgaatcaaccggggaaagtcctttctttcttgtttttggaagggatccaatttttgcagtagaccaaattttggactctagagtcccaaatccgattgcaataacagacgagtctgaattcaaacaacgattgataagttgtttgagaaaggcttggaaaagtgcagcagaacaaagccacgaggctcaactacgcatgaaaatacagtatgacaaaaatgtcagaggattggatattaaaattggtgatcgggtacttttcaaaaattattgcgccaaaattggaacatccaaaaaataccacttaccgtggaaagggctattccgtgtcataggcatagaagggatgcatgcaacaattgttagctgtttaatccctcaatcaaaaccaaaaagagttcatattaatcaattaaaaaagtgctttgatataacaggtccggcatgcacccttcctgcacttccgaaagacgaacaggaaactcttcaaaaagcagatgcggaggagatgaacgacctgcccggctacgatcatccgcagcaagcattggaggcaaaacaaactgatgaaccggtcaatctggggttaaacgaggaaactcctcttacaaattcggaaaccatttctttaaaaacaaatccgaacgattttccagttaatgaaaatgagaattttaatggccgtgcccttagggaccgaaacaaaataacaataccaaaaagatttaggtcagatttttaatcaattacaaatcaggacttttgataatgattttaatcaatttaattaattttaatgtttcattttccctctttcaggatgcaccgacggcgccaaacatcgatgaatcaatttccagctaatcaattcctaatgcttattacgtttttccgaccataa

SEQ ID NO: 77489 - DNA, 3213 bp, Heterodera glycines
  unsure (1)..(3213): unsure at all n locations
agcacaagtctaggccattctgaaaattcaccaaacctnaaaagcaaagccaaaacaacaaattgggaaggcattggacccaaattaaccaaatttctttgtctgatcacaattttcttgcctttggtgtcatcaaattcaccaaaaattccttcaaaatctcctatggcattattgccgattaatccgatggtatgccagacttcccaaatgggaatgttatggtctattcctccaacccgaggatgtcctcagatttcactgaatcactcacaagtcccaatatttcggacctattggatttactatccaaacgttttcgaacatttaactaaggcatgggcatgccgaaaaataagaaaaacggttcaaaaatatacgactctcactggtgttcctatttctaagacccgtgacccaattgttctggaaatgtcttataatgagtgtgtccaaatggtcaaacaaaaaacatgtaaaataggccctctaatccatgagtcaggattatggcacacaaatcaaaaaattgatctcaccccacggggatggttcgtcggttcatggaattggaaaaatgaatccaatgaaaattgttatttatttgaaactgaaatcacttccaaatttggtgaatcatttattcacactcctttaggggattcatcggattgccctcatcagaaagggaaatgtcttctagaagacaacacactgataatttgggagccctcagataccaaaaattgtgagtacctttcgtggggacctaaaaaaggtcacattatggacaatatttggatagcaatggacgacccacttttactggaatttgcaccaaacccaaaacaaatcaataattgcgataaaattttaaccctttctctccaaggttttgcggttggatatcaagaggaacccgagaatcaccgaacaattcaaaacagtggaattaaaacttcacgaagtaaaagggcttttgagggactgatcacggactcacaattgcagtccgaactttcatttttaagttggaatatttctaaaacattccaattttcttttgagcacgccctttcctccttatgtcaaaaattggaagagattaattgttcctctcgaggatatcaatttccaggccaatgaatgttttgaacatattccattgaaatttaaggttgggggaaccgaaaaatatgcatttttgaataccataacgatgattattgttcctgactcaagaaaagccccttgcgtagaatttagaaacaaattctgcacattggcaacgaatattattctattgatcaagtcacagcagtcatgaaacatattaaaaatattaatacaattaaaagtctaaattttgaaattgctgaaattccaaaaattccccattattcgtttcatcacctggtaattgcaaatgttactgacattttggcccactcttatgccaataatttagttaaagtaagccaaatttcttaccaaatccacaaggaagaaacaattaccaagattatgcctgccaaggaatggatagacatcaaaaagaaattaaccgaaacattccttggtgatttttctgattggttttggaaaattgctacagtattaataataattttgtttgtcgattttgttttacgatggtactttgtgatcaaaaatcaatattcttctaatggtaacgcaccaccttcgcactttagaaaaggcccaaattcctcaaaacgccttagtgttcataatgaactgatctttacccaaattaagccattaaataacccttccgatcattccaacactttaacaaataactcagacaataatccgaatcttttacaatgtacaaataaaccagtcaggtgcctaatggactcaggatcgagcatcactgttggcccacgttcgatcgcacatcagctcaaatgcaaagtggaaccgacatttcttgaagcaattagcgcatccggacatctgatggtatgccgagaaaaagcagacgttgaatttgaattggtaggtatcagaaccaaaataacattatattttttgaatgattccgaatttaactacattcgtaattaccaaattttaatcggattggacacctttgaaaaattacctgtaatttcttttgacgttgcagcgcgtaaacttattattaatggaaaaagcactccattggggaaatcctataataatttagttgagaatttaagaattgcagctctcaaaaattgcactttaggaccaaacagccaaaacttaattgatgcacaaattgaggccataattccatcaatcaatacaataacagttaccaatcccgagtctaaacttattcaagcgaatgtaggcctaattccatctgtctcgtgccctcacgagggtaaaatacgcattgccctcattaatccgaccagcgaaccaattttattatacaagggcatgcacttagcttttgttaatgagttacaagaaaatgatggcattttaacagaacgtccgatggaacaaattttgtcgctcgataaaaatacaaaactcaaaattgatcctacttttaaagtcgatttttcaaaatcgaatttaaaaggagatgaccttaatgcgttaaaatcgcttataaatgagtttgatgacatcttttcgaagagccaatacgacttgggttcttttacaggcggggaacataattttcttaccacaactgagtaacctatttcttctccccctcttagaatgccttataaatatagggaggaactcaaaaaacacattgatcagcttttagcctcagaaattatggttgaatcagatacaccatgggtgacccctttcgtagtagttcaaaaaaaggatggtgggatccgtccttgcttagattttagaaaacttaatgacgttacagtacccgacagatacccattaccaagattggatgccatcatggaaaaaaaggaaattgtagtttttatagttctattgacctcgcctcgggctatttacaaattaaattaggcgatgaaacgtcttataaatgcggggtaataacagaggataatgtttatcagatgaaatatctccctttcggcttaaaaaacgccacagctgccttctcgagggcaatggcagttgtgcttagtggcttagatgatagctccttagcatatgtagatggcatcttagactgttccaaaaatg

SEQ ID NO: 77490 - DNA, 429 bp, Heterodera glycines
atgagcggcggagaccaaaatgacctaagcatttcggtcattgatcggaatttttgggttggcaaaacccaagtgaaagtgaatgacgttgaaagagcccatctggatgtcttaaggttagaagacggaatgaaccgagcagttaggacattaaataggcgcactaatcaaaacactgaggcaattaataataatgcagctgatattaatttaaatatttcaactttacaggcacaaatcacgactttgacggatcaaattgtgaatccaacaacggggacaaccaaaggcactggcgtgagcaaagcatcgacacagtcagtcggctcacaacgcaccaacacgatggcaccgcaactgaacgttcctccacagaatacacctgcattggccgaagatgaactccaagggattttcgcactcacttca

SEQ ID NO: 77491 - DNA, 246 bp, Heterodera glycines
cgctgacccacaaaatgtccagcccacgaaatgtccaagtctcgaatttgagtttttattattcagatgggcctaaggttaggcaaggggtaatataaagggtatattcgtattcagcgaccccgaaaaccctaaaaatcctaaattagactcattttgtttttataaattttgaaaaattttggacatttcgtgggtttttactcttttggacatttcgtggcttggacactttgtgggggtgcc

SEQ ID NO: 77492 - DNA, 730 bp, Heterodera glycines
atgtctgaagccgacccgaattttgtcaaaagtgaggcgatcagcaacggatcaagcatttgtgccatgagttccaacaatgcgttgactgaaatgatgcggcgtgagaagaaaaaattgttgggaaacgtcgatgtccacgggagcagattgttcaatattcgttgagcccgctatcgacttcgatagcgccttcaggcaaattctttaatcaattcatccgttttaatttaataaaaaaattcagttccagcgtgggaggacgaaatctttcgggcgccccacttcccaatcccattttggaacatgcactctcaggccacgtctgccctcgctcgtacaaacaacggactggaagcaactcatcttcattttatggtctttaattttttaaaagcaaattgaaaagaaacatttagaaaggcctctgtcaccaccccgccctctcggacttcatttgtggggttaatgaaagcatcgacagacaggtggacgctgcccgatctgctcgccatttcattcacaagcgacacaaacgatacatcctccaggatgctgtcattttgcgaattttggcggacgcgtcgtacaacaacaacggtgacatccatgatcttatgacggcgctcggtttacaaattgagggatatgcaggaaaattgaaggatttcgagaattttgatgattcaattgtccacgtcgtaaagaattttattgaatgtttaataaa

SEQ ID NO: 77493 - DNA, 129 bp, Heterodera glycines
aaattgtacaaaacttactagttttttgaaaaaaaaaatttaaaaaaattccgacttttcatcaaaaatttcggaagtcggaattccgaccccaaaaatgtcggaaaccggaagtctttccgtgccata

SEQ ID NO: 77494 - DNA, 639 bp, Heterodera glycines
atggaattgcctaattcaacattcgattttgtcggtggcattggtcatagattaacgcatttaaaccttcagattgacttcagctcctcagcatatcctcggacacaacgggtaagctctatcattggcatcatgacagaagcattggcattttgactaccaataagccgacattggtcaatcgacaatgattttgatcaccaccaattttcagttctgatcactctatccctaatttgttcgattacagacctttgaacttttcaagttccaaatgtcggacatgcttcagccggcccgggcggtcgagctggagcagaactttcaccgctttttggccacaacacctgagcttggcgagctgttcgcgcgtttgccctcaagagttgtttactatccgttgatcgccgattgctataataggcaaattgatcaatttgtttacctatttctgatcagaatctatttgttgccctcaggatcttctatggacgatcgaagcatccgatcaattgcccgggcccggtccgctgcgaattgccctcattgcctggactcaaatgtgccgtgggcagacgtcgctatgaacattttgccataaaccgaaatttggtagggggcctataagcagaaaataaa

SEQ ID NO: 77495 - DNA, 150 bp, Heterodera glycines
atgggaagaccccaaatatgtggtgaagccgggcaatgtgcaaagcgtttggctgcattggcccggaatcatcagccgaggccgaatgtacactgtgccggcggagcagaatttcatgctccactttcgcaactggagcatggtactacc

SEQ ID NO: 77496 - DNA, 858 bp, Heterodera glycines
atgaagcacacaaagaaaatggtcatggttccggaaaccgaatacattgcgcttatgaacatagtgaagagtatgggtagccgaggcgatcctatacaagatgaaaaaacatcattagactcaaatatacataaaaatttgaatgataaaacaatcggagctgatattaaaatgaaacgacactcttggctgtacaaacggagacgtcaactcaaagagctgatggaaaataaaccacagaaagtgatcatagaaggaaacccgagttctgcaataccaaacgttgctccatatatgggaattcataaaataccaaaaatagaaacagccgtagaacaagagaataagcgtcagccgttacgattaataagagcatcacgtaaaaagaaaagtgaaaacgtgtttgaatcctcggcagattattcttcggctacagaatgtagcagtagtacgccaatacgttcccaagacgtaaaattaagtcagaaaaatttttcaaaaattatgaatattattggaaaaaatccggacaaatttggaatcgatatgcaatcaggacaggttttgactaattttaataagccagtcaccggatcgaattatactgaatcactgaaattattatcaggtgaagatatttctctgcctagaggtcatacattttttgttcaacgtttgaagagggaaccggaaattgcaaaatacttatttaatttacaacagggtaaaggaaagaagagaagaactaaaagaaaactagtccttgtccaggttaaccctataaaaacccaaggattaaatagagaaaaaccgccatttaaaccagattatgggcaaaactatagaaagtcaacttga

SEQ ID NO: 77497 - DNA, 357 bp, Heterodera glycines
atggagaaaaatatacaattatcggttgataaagaattggagcgtgaacctttaccaccgccggaccaacaaatggaacgcgaacaaccactcatacaaccaaaaatcgaaccgcctgatgaagatttcccacaagaaaaatcgtcatcgtttataccaacagcccctcaaacttttgaaaacgatttgtcatgtgagaaatttccaccacttgccaaaatatccgagtccgacccgcagactctttttaaaacagccaaattgacaacagagtggtcgcagaaggaaacagtagaattatctggcagttcggcagatttaacacaatggctcgaatacatcatgaaacccgaataa

SEQ ID NO: 77498 - DNA, 744 bp, Heterodera glycines
atgctttcgaatttggcatttattttgtgcctttttaccggtgacgaagcgaatgtcgacgcgattagcggagaagaagaaaatgccatcggcgagcaccgacaaaagcatggcgatgaacagagaaatggcgaaacagaaggtggacggggcaaaacaaggcgcacaaacgccggtgcaaacggcgacaaacgcagccaattgggagagaaggatcagcgaaaggacgaccttatgccatcccctggggacgaatgggatgatcagagacggcacaagcaaatgtcatccccggcaaagacatagcaaaagagctaacaaacaaagggtggaccacatagccccccccccccaggcaacgtcattgatcccctgggggcaaatggaaagaccagcagagatggccaatgcttttcctaccagaatcggtggtgctcagcttctccagctgccccgtcctcgtcgacatggttctgaaagtgaatgccatgccgttttttgctttgttttgccgtgccctctcccacccgaccagcgctctttcgatgactaatgccgcggactcgtcgaatttgtacatgcaatggagcggcgcttcctcgtaaaagtcgcccaccgccaccacatgctgaaaaagaatggcaaacgaacatcgaaaggcaatttgatcagctaaaacggagccaaccttttcggcacgaatgcaatcccaccaaaggccgtgctaaagcaaaaaatggggga

SEQ ID NO: 77499 - DNA, 637 bp, Heterodera glycines
atgaagagaagcgcgactaaaaacaactcatttcacttttcaattatcttttatctggcattaattggaacagccagcggagcaggagaaacttcgaaaagcacaaagcaaaaaagtaatttaacagaatattttattcaaaaatagtttttctaatcattatcaattaatatgtgaatatttttgatcagatgagacgaatttgccggtggaaattgaaaacgaactcatcacactcacccaaattgtccaagagtcaaaagatgatcgaattgccgatttattttcatgggcccttaaaactcaaccaagcataagagctaggacttttgaaaaattttgtgatgaacgaaaaatcactgagggaaaaacgacggaagaacgcgtcaaaaattgcgttatgcaatgcattttggaaaaatcaattccgttttcattccacaatgccgaaaacattgccgatttgctgaaaatgttgctgatggagcgcaaaaatttgttagcccatttaatgcacaaggaactaatggggccggaaatgaaggtaaacgatggcggaatagcctatttattgaatttgaggccccttattaaataaagtcagccctctctcttcccgagagggttcgaaaataaa

SEQ ID NO: 77500 - DNA, 1387 bp, Heterodera glycines
atgtgtgtgtgtgtatggaattgttcaattggaggattttttgtgcgcagaagaaagcggtcgttgggtgtactgcttgaatcggaaaagtgaattcggtcaatcaccgattttcgctgattaacgattagacatgaaaaaaaatgatcaaaaaattgtcgttttatgcaatcaattctttattttagtttttttatttttgatgaaagcttcggattttccgaaatttttttggacgctaggactaaagcgccgctataaatcaaagccatgggaggttcatttttaaaattcttgtatttaaaaaaaacttttatattgccacggtttaaaaataaaacagcaaaatccgggttaaacatttatttaaaatccccgaatttatcgataaaaaacaaaaatacatatgcaattttctggaaaatgaatgaaataaaattgccaaattctaaaaaaaaacaaaaataagttcataacaattaaatataaattttataattattttttattccattgaataaaaactgatcatttccacgacttgaatctgaagcaaaacacaaatattattattatcattattcattgatcaaatcattggtcgggaacaggaagaagcatctgatcaagctttccgcgcgcattgttttttaacattgggaggcccttaaatgcgcccaaaaatcgcgcaataatttttcattgataaggctaattggggggggggggggtgatttatttgttgcccaaggcaaatgaagcggaaaaagccttttttatgaataaataattaatgtttttattcgcaaatcaaatcatcacaacacaataggggctgtgctgtgtttgggtgcgcgttttgtgtgctttttttgcatggcgagattaatgatcaagctgatcaacacagggagagatctcctaaaaatgtgtatttgtgatcgtgagttattgtgcagaatgatcagagaactcaaaaccagattttttttaattgaatgaaaaaagggaaaaactcatttttcataaatttttgatcgaaattttaaaaaatatcaatttaaaaaattagctattttagtggaagaaccgccaaaatgaaagaaaaaaaagataaatttattttaatcaaaatttttattaatttatattaataaaaaggtgtaattataaaggaaaactgcagcttctgcagaaaacggttgaatgcttctttgtattttgtgaatggatctcggttaacgggtcaattcatctccgaaaaatgcgacagcagcccattcattgttcacccaacggatcattaatgaaatgtttttcaattaattggttttatttaattgctttgaaacagatttatctaacgggcaatgaaaagccgaataaa

SEQ ID NO: 77501 - DNA, 565 bp, Heterodera glycines
atgtatcatacagtaattttactgatcatttgccatctacttcatacagtaatctcgctggcttctgtgctcgtttcatcgccgtttgataatttccgaattgagtgcccacagtcatcgggcgcacaacggttgtcaattcgtatggtcgaatcgcaaggccagaagcgccaggacactgtattcgtgctcagttgtcagcacattgttgaggtaatgtgtagtacggtatacggtagtttacagtgagaatgggtggcagcttttccaaaataattaattattttaaatttcttaataattgcaaatctctgtgaaatgtgcaaatcaggagtgggtttgaggcttactgcaccactcttcttacaaattaacacaattttttaaaattaatcattttgctaaaaaatttagaaataaaagaggaaaagtgcaaataattttaattgctaatgattaagtcccgctttacatttgaaatcatttaattcttaatgtcatcattttcaaatctattaaaccaaaaagtaattagccgattatacaatattttaaattcatgaaa

SEQ ID NO: 77502 - DNA, 258 bp, Heterodera glycines
atgtcggtccgcaaaagtcggtccgcaaatgtcggtccgcaaaagtcggtccgcaaaagtcggtccgcaaaagtcggtccgcaaaagtcggtccgcaaaagtcggtccgcaaaagtcggtccgcaaaagtcggtccgcaaatgtcggtccgcaaaagtcggtccgcaaaagtcggtccgcaaatgtcggtccgcaaaagtcggtccgcaaaagtcggtccgcaaatgtcggtccgcaaaagtcggtccgcaaaagtcg

SEQ ID NO: 77503 - DNA, 1612 bp, Heterodera glycines
atggcacctcccgccgaaaaaaagaaaaagcattcctccgccgaccgccgtctcatttcttcaactaatgcaaatcaacagaaacagccgttgggttcgcttgtgacatcgtatggaaaacggcgaagtgttcgcgtggccgtgaaaaagaaccgacggtaatgaaattttgaaaattaccaatttgaaatttaattggttttccgcatttttagctgggtttgcaacgacattttgatggacattttccccctttttgatcgtctccaactcggcctcaaattggcactgatttctccacgtttcgatgcgctggtggacaaacattttgatggcacaaacgaattgacactttcgagaacaatcagaattttgaaaacgggagtaaaaaccaaactaactgtacttatggatagcaatctcaacaattttgtgcgatttccgttccccaacaagccgatgcccatcaaaattcgttttcatttacttcgaattgagtaagtcaaagaattattatttattggttttcagtgtcgcagagcccgattctgacatccatttcgacccaatttgaattctgaaaccagattcggacaaaaattcaacaacaatgatgaaacaaaatgcacgaaataaacggagaaaatgatttttaattttcatacttttgaacagcttttgtcgagaattacatttttgtccgaatccggatttgaattgagtaattgggtcgaaatggtgtcagaatctggttcgccgaccctaaaaaacttcaaaaaaaatttttttcgagacctgaggggggggggggggaccaccattactcttatcaaaaacattccttttcaggcacatagaccattttgtcgtcaccttccttcgttccaaccagcaaatttttgacaaaggcacagctttccgtttgtatgtgccattatcctataaacccagtgtgcagccaatttgggatgtttttgtgcgtgaaatttggcccatctttgcgaccaacattcgccatttgcacatttgcgatggccatcatttggacaattttcgtcgtctcatttcgcccacaattctcaccgatctcaatcaattgaattcaatcgattccgaatcggtctttcccgaagcgattattggtgattttgatggaccaaatgcaactgctggtcaaattctgtccaaatggttgcacactccgacaaatgatggccagccgaagcaattgaattgccgaaattattatcacgcatcaatgaccgtccacgaatggctccgcaatttcaaagaggtcaaaagaacactaatctgtttttaatctgccatattttcaattgtttaggcatttctccgtgccaccgcttctgcttgctaccaaattcgtcttgaactttctaagtcaacgcaaattgagcaatttgaactgaagaacgaacggatcggcgaaaagctgacagtggagaaaaagggcgaaaatggacatacttatagtgttgattggctgttaaagcgatgccaaattgggaagacggttcagtgggaggaagaaaagacgacgaacaatttgaacaatggtccactttatactttttggagcttcatccattgg

SEQ ID NO: 77504 - DNA, 866 bp, Heterodera glycines
atgatgcctttttatttccatatttttccatatttcagggttttaaaattttggactcccttaaatcgaaaaattttggaaagaatacaaaaattgtgcaaaaattcttgatgagcaaaattcgcgtaatgtttttttttacaaaatttagttttttgctttttctaagttcaattttttcagtaaataataaataaataggaggtctcaattatgacattctatactcatcagggctgcacgcaattgcggattgcggattacggaaattgcgggatttttggacccccgtaattgcggattgcgggttgcggatttttgggatttatccgcaattttgatccgtaatttgactattggattatttttcgagacgatttcttgtaagattattttttataaaatgaatttttttctaatactgaatactgtaaataaactttatatacccctcataataattaatttaaggcaacatcccccagtccatctgccttggagacaagacaaaaagccgaagttgaagtaaatgaatatttgcgggatccaaaaattaaatccagggtcgatccagcattatactgggaagttaattcacaaaaatggccaatgattggtgccgttgtacggaaatttctttctccgcctgcaacaagttcagaaagtgagaggcttttctcaacggccggtctaatttcagatgacttgcgaaagagtttattaccagaaaatcttgcaaaacttttgtttcttcatcacaatttgcttttaaccggtttctcaattgaatgattttgttttataaatttgctttttaatatgcttttaaattgctttaaaagatttataggattttttaaaataaa

SEQ ID NO: 77505 - DNA, 60 bp, Heterodera glycines
ggcttttttgcttgccaaatgaggcttttgaaaattttcatctgcgagccctggtcatat

SEQ ID NO: 77506 - DNA, 350 bp, Heterodera glycines
aagaaaagaacttagcagaagcacgtgccaagtttgaaaaaatcatgaagaaaatgtataataaagcaaaagaaaatgcgacaaaaatggaacaaaatgaaatggagcagaaaatatttctgactggcaatggacagttatttggcatggatatggcacaaacatcatcatcattatcatcatcatcattatcctcattgaccttagcaccatcaccatcaccatcattttcatcatcatcatcatcatcatcgaaatcggcatcaaaaaatgccgatgctaacaaaaattatggcgagaaaaaggacgaactcattttgcatttgctaaactacgaagtggaaagcgtg

SEQ ID NO: 77507 - DNA, 298 bp, Heterodera glycines
atgatcatttgggcaagggtattttgatttagcaccgtatgatacgaccaaaacccataaaaagcgcaataacttatttaaaaaactcatcgaaaaaaaatcacaataaattgaaaattaagaaattgatggatccggatgagggattttacgacaaaaatgaggacaatgtgacgctggccattgattttacggtggaagaagaaaaagggacaaaaaagcggaaattggccgatggttaagcccacccaatcgctcattttctgttgattactttgattaccatttacaaaataaa

SEQ ID NO: 77508 - DNA, 1115 bp, Heterodera glycines
atgctaaattcgaaaatttggactttcgagtttttgttcgaattcgcgtccggggttcagaattggccgaaatggataccagattcgtggtaagtgcccccgaaaacgcaaggaacttgttttatgacaataaaacattcactgacgcattttccactgacgcattttctactgacgcattttccactgacgcattttccgggcgccatccagtgttctgagcattgaagaaatgttcggcatttatcagttccattgccatccgaattttcgcggtgtgccaggactttacccgttgaaatttcccactcaaacccgaattcctgacttgaacatttccgtgggaaatagaggcacactcacacttgaaattgagaaattttctgaatttgcacgagagaaagtgaggagcaaccgttacagtgcggccgtgcaaatgaagggatttgagtggaaaatattggcaatacgaacaaaaacggaaaaaaatcaaaaatgtttgggcttttatcttcagtgcgtcccttcgacgaatggtgaaaaatggagaatttttaattgcattaattaattttgattaccaaagatggaaattggagttgcaaatgttctatcacttatcgaattgtttcacaaaagagcggaacggaggatttgtcgcgaaaaatgaccatacttttaacaaggaagagaacgactggggattcaaatatttcattacttttacggtgagtggcagaaaagaattttttttcaaatttgctaaatgttttgtcaaaaaatgatcattttatgtcaattttcaataaaattcaagggcaagggtattttgatttagcaccgtatggtacgaccaaaaaccataaaaaacgcaataatttatttaaaaaaacccatcgacaaaacgaaaaaaaatcatgcaataaattgaaaattaagaaattgatggatccggatgagggattttacgacaaaaatgaggacaaagtgacgctggccattgattttacggtggaagaagaaaaagggacaaaaaagcggaaattggccgatggttaagcccacccaatcactcattttctgttcattactttgattaccatttacaaaataaa

SEQ ID NO: 77509 - DNA, 819 bp, Heterodera glycines
atgcaaattccaattccaaatttgtccaatgttttcttggcccttgttcagacgcgtcttttcgactttgaggtgggaaatacgacgaaccatcttcttaatttaacagagttcctaagttttttgaaattcagcaaaaaagaactggaattcattttcaaaagctgagcctgagttgctacatgggaaaaagttaaatttttaatgaaatttggtgttacaatttgattcctttaaaaaaaatttccagccctcaaaattcaaaaaatcagaaaaattgggagaaactgaatataagcaattattgtactttaatgtgtatttacaatattatacattcttaggattttgctcaccaaagtttgcgttacatttgtcaaaatgccggccaattgttcgaatctaaggaatttttacaaattgatcagaatttgctctgtgaattattcgagaatgatcagttggtgatcggcaaggaatttgaaatttggaaagctgtaatttgaattcaaaatatttatataaatactcatttaattaaaatattttttcgtttaggcactccgttgggccgacgaaaagtgccgtcaagatgccatcgaatgttcagcagagaatcgtcgatcagtgcttggcccggcactgctcaaaattcgattccctctcatctcaacggaggatttttcagaaagcatcggtcgaatgaaatctttgaaaagggagagcaaataattattcttttttgcagttccatccagtgcgtgaccggaaaatcggtcagtggaaaatgcgtcagtgataaaaatactttaaaataaa

SEQ ID NO: 77510 - DNA, 521 bp, Heterodera glycines
atgaaaatgaatttttatgaggaaaaaaagaaagaattcattgaacgatttgatgaatttaaaagtttatatggccaaggcaaacagaaagaatttgtgaaggaattgggcattggtgaaaagacatttcgaaaatggaaaaaagaattagcgccaaagtaccataaaagtaagtgaactttctgggttttattataagtttttaaattttaagcacaaaataaatattccaatgaggacaaattgagaaaggtcaaacaatatttggaaataaaagaaagaaatcctaaaatcaacaacgaaataattgccaagaaattgggacttggaatttcaacattaaacagatggaaaaggaaatttgcttaattttttgaattatgtgatttttttgataattgtttttgtctctgttattatttcaaagaaagaaaggtgctcaaaaaagaaaattatgaaggcatataaatgcaaatgacaaaattcaaaatttggcataaaaattaattgttattaataaa

SEQ ID NO: 77511 - DNA, 320 bp, Heterodera glycines
atggcaaaaataaatttgtggcttttaatatttattatattttgcttattttacgaaattaaatccggcaaaattcgacaaaattttgacgaaatatttggcgacagatgggacaaaaataaaagtgaagaaaatgttataaaaaaggaacaaaatgatcaaaacgagcaaaatgaaaactcagcaacagttgatcaaatgggtggaaaaatggaaattgtccaaatgatcaacaaaaaagagaaaccattcagaaatttgatgcaattaaagaaaagttaaaagaaaaaggaaaatatgaaaatgaaaaaagaaataaa

SEQ ID NO: 77512 - DNA, 1067 bp, Heterodera glycines
agggataaattaattgacataaagataaagattttgcctatttttacaaatgcaattgaaaccaatgctgatctcaagaataatcaggatattcaaatcgcaatccaagttttttttaaaatttattttacagtattttgtcctactccacctcattcacaatgtgatcatcgcgatttcggtgccatcaatctatttgctgtttacattcgcattttggcacaaacagtgctaccaccaagcacacatttcacaagccaagaaaatggttcaaaaatttatataaatttatttttttgaaaaagatttaattttaaatatattttatcaattaggcatttctccaagtgttcattttatcttctatgaattcattggccagtttcatctatgtgcttatgcaagtaatggagctcaaccaatggatgatcacttttacccattttgattggttaataattttaattaaatataattagtaatttctttttttcaattaaggctcagcgttcacggtaatttatcattaaatgaaattaattaaataaatttttaaaaaatttaaggggctccatcaatcgttttccttttgctgaacaaaacaattcgaaatgattgccgtaaaattatcaaaaatattttcggtccgacgaaaattgctggaagaatttttgtgtcgatcaaaaagattttccatctaaatcatgtgtatcctcagcaaaatgctgttatcgttcttccaactcctccaaatcgttactgataaactggcatatttttgggaattttgcaatttttcgtttttcataatccattgccgatgataaaagttttttttatatataattttgtttgttttttgatttaattgaggaagtaaagctttttacaaattttccatattttttttatttttaaccggttttgttttattaggcctttactgtttgtcggtaatgttggacaatgatttaacaaattctcaaatattgtttttcaactaaaattttttaattctaatcaaaataattaaagaaaagttgaatgaaaagggtaaatataataaa

SEQ ID NO: 77513 - DNA, 1408 bp, Heterodera glycines
atgcgacggcaaattcgaattgagaggcctccgtttgccatttcagtccagcctgaccaaaatcgaagagatggcctcgggcgcggcctattgccaactgacggactttctcttcccgacccaagtgccgctcaaaaaagtgaaatggaccagccgatcggacgtggattgggtgcccaattggcgcgtgttgcagcaatcgtggaaacccatcggaattgccaaagtttgaatcaaaatgcaacaaatttggagttaatttgcaggggaggaccaattcatttgggaagttggaaaattggggtgaggggatgcctaaacgaataaaagaattcaaacggatgtcaaatcccattgcatttcagcctgtgcccgtgcagagtcttatccgggccaagtttcaggacaactttgagtttttgcaatggtcagtctcgttcccattcattcgatcgttccttttccctttaggttcaaaaagttcttcgacgcaaattacgatggtcataaatacgactctttggcggcacggaatttcgaagtccgttttgagggatttgggctcaaatgctttaaaatcacttttccattgtcacttcacacacaaagatgggtctcggaaatatattttttatccctaaaatccgtaccattttttcttcccatgtccatcccccctttttttcattcattcatttccaatttcttaggagtttcccgccgctttgcctggtggtagtaaacagcgtgcgcctccgcccattgcgtctgccgttgcggcgcgtcgcgctccgtcgatgtccgccacaaacactgcgcaaaaatacggcggctccgctttgccggcaccttctcagagccgtgcccaaactgccaccaaaggttttttaatttggagataggaaatgatgtcaaataactttttaccccacattacagcagccaaaccgcctgctgctcaacctctcgtcggaccgtcgcccgccgctccgcgccgtgccagcccccgctttatgggctcctcccagcgcccgccctccgccgtgggacgtcatccaccgcaacaaacaaacggcggtagaacgggtggaagcaccggcggaaggccaaaaacggcgagtgcatttgccagcaaagcgacaccgaaggcggcgtcgacggcgacggaagtgaacaatttgaaacagcaagtccaaacactggagacacaggtaagaaacgggggagtacaacgctttgtaaatcttaccatcgtttaatttgcttttagaattccgaagtcactgctaatctggcgattgagcgcgaacgtgcgcagctgatggaacgcgagcggaacttttatttcgacaaattgcgcagcattgaaatcctttgcggcgcctgcgcactgtccgacggcgaataa

SEQ ID NO: 77514 - DNA, 760 bp, Heterodera glycines
atgggcacaccgatcaaaggggaagagggtcagttggtgctggtggcatgtttcctgggactgtttgtgagtgtctgtctcctcggatttagtgtctcgaatcttggaaaatggctcgagtagcaataaagtttcacaaacagtgtctgattgattatctaaatacaactgttttaataggtccttttaatttcgcctctctttgctcaggttgttccgcttcctgctcaacttcgtccaacaattcaatggccgccgattgtccgttggattcgcatgaccgcggcagcggtggccaaatcccagagaaattggttggtacagaaggcgtcggcagagagcacacatcggtggccaatggccatcgttcgttgttggccagcgcgacactgaccccggcgatggtttcgtcgtcgcaccattccgccacaaattcgccggtccgtcgtttagccgttctttgaccaaagacggagttagcaatttccaacagacatatgtacctattaacagttcaatcaaaatattttcctatgtaatttttcactgttttctaaaagaatttgcttttcttttaaggtgtccgccaatttgatgcccatttttcaccattcggccgccccacaacagcaaatgcttcaacaacatcagtcattcaacgcctttgtcccaccaattccgctgcttaacactcatcagccaaatgcttctcaaattagtaaaccatgattacctttcaacgatattaatcactggaata

SEQ ID NO: 77515 - DNA, 2209 bp, Heterodera glycines
  unsure (1)..(2209): unsure at all n locations
atgaatttgtttttcccagcgtcgtctcgtgaacaaaaagataaaaacgatggaggcggcacaacaacaaacaacaacggttcttccggaagcgatcaactgaccggaaatgacccagcaaatgccggggacgcaacagctaatttgcccccgggcgttcctcccgaaatcgctgcggcaataagtggtggcaacgatctctttgtaagtgagggaaaacagcggctaaagtgtttttcaggacagccaattcaccccatttcaatttactctttttgcaggttcacattcaccttggagatgccattgccctggcggtgggcaatgatgttcagcacatccacgggccggcaacgatcagaatggtctcccaatcgacgacgccgcaatcggcgattccgatgaatgttccggaaggacatattgtacagcagattttggatagacaggtgaatgacttcattttcaagtaaataatgactcttttgcatcaattttttccctgcagggcaatctgtcccacattatcatgtcncaagagccccccgccggcgttgggccaatgctcggccaacatgtcattaccgcaacgacagtaatgtcccaaattccgtccgctccatcgacgacggcggcacagcagcgacaaatgggttaccaagtgaggagggcgtcaatgaatttgccaatgacaatttccagtctgttcagctccatccttcggctgccaccgtaccactaaaacatttccgttccaacaattcgccaccgcgttcgacagatgtttcgccgctgaacgatgcggtgactttgtcacggcagaagcaacaccagggaatggccacggattcgggcgctgtttacccaagcggagttgttccattactcaaatggagtgatcttcaacagcaccaccaacagcaacgcgagcactaccaaagccaaagtggaccattcggaaggcagcatcaacagggtcgagggcaccataccgtgccttccccgttcaacgtatacaatttggctgattcggaaaccgtctcttcggccccgcggcattcgcccggtttttatgtgcatggctcgacaactatgggcgggatggacaatgtacgttttttaaaatttttttccctttatttaccatttgaattcattttcagcgtgttggtccttcggaaacccttccaactgttgcatatcaccaaaaccaccagcaacaacactcccaacatcaacattctgctcccggtggtgccgacactttcgattcggtcaatttcccaacacaaatttcgtcagtgattgatgatgatgagaaggaacggctcagagacactctttcctccattcagccaccgattctctcaaaaggtgtgaatattcagatgaattttcttaactaataattttgtacgaatttcagtgactgaccgtgatgccgaagtgatatggcaagtaatcgacacttctgaggctgctgcttccggtggtccgttcccgcaaattgacacctccgaattcgtctacaaattgactctgtttgaccctgtcaaacattcacaaacattccacaaaaccgaggcgggagtgaatgtgttgcatttgcagcaattgaatcccggcactgaatatatggtggggttggcttggctgcgcttcgcttcgtttttcaattttcttttctttttaggtcgctgttcgtgccgaattgcccgaacgcggcatcaacggacacccttcgacctttacttcctttcgcactttgtccacttctcccgaaacgccttcgctgccaaaattggtcggccgacaacagaattgtttttcaattcagtggaagtcacccaattgcaacggagcgccaattctcagttactgtcttcaaatggctaaggttgaaaaagcaatttccaagcagcacatggagtctgaacgattcagggaaagatggcctcatttgagacggtttacgacggtgcccacgagcaaacggtggtctccgggatggacagtggcgcgttgtatcgtttccgtgtgttcgcgcgcaacgaaatgggccaatctgagagttcgcccgttctgacggtgtaccccgagaggagtgacactggcggacgaatgccgccagcctatcaccaccaccatgttcagcaccattaccatgctcaacaacaacaacagcatggcggaatagtacaacgtggcg

SEQ ID NO: 77516 - DNA, 1318 bp, Heterodera glycines
atgtcgagaattggtccgcctttgcgcccgacttctccgagttggaggagaactccaaatacgtggagaaggagggcgaatttgatgcgcatgacgaggacgcaagtgagggggacgagaagatggaaattgcggcggtgtgttttgtcattttaatgaaattttagtttttttcttttttttactgtaatctaacgttttaatccaaaggttaacaccgtcttttttgctttttttaaaaatcattaagagagttttttggaaaattacaaaatttattagagaaagatggaagtcgaaactctcataaaaattaaaaaaaaaatttttttttgattatttgtaaattttcaaaaattttcgctcatgtttctaacaaaaaataatatagaaaattaaaaaaaaaaattttttttgttccaaaaatgtggtcatctacactaatatattattaatccacgagtttttcgtaaaaaaaatttaaaatttgtttaaaaaaatacaccaaaaattttccgaagcacctcaacaatcagttaaatgataagaaattttaaaaatacaaaaaaaaatttgccaaaaattatcccgcaggacgaggaggaggacgtgttggacgtggtgcacatcacggtgtccgtccaactttgctcgtccgacgaatcggagccggaagacttttgcaccgacttggaggtgggcaggtcgctgtggtttgtgccggtcggccctgagttggaagtcgctgacgaaggtgggcctttgtgtttgtttgttttttcgagtttttatagcatttagtgctctcgattataattagggggccgttgggcgaaaaaaccacaaattagatgggtcgaattgaggcaaaaaaaaaaaaatcaaattgactcacactggaacttttcgaattgtaaatgtcaaaatcaattttcgatttgctattgtaaaattttcggcttttttgtctctggcccacaaactgatcagaaaaattcgataaaatgaaaaatactaataaaaaatacgttaatttatttgcgatttttcctcttacattttaatgcccatttggtcatggggttcgagccagctcgacagatggtgaattatttttgaatttcttaaaatattatttcagttgactttttttttattcagatcacttttttattcaatttggtgtgtgagtcagggccaaacagccgaattttttgtttaaaagtgatttcaacactttctgttcgaaatgttcctttgtaaagtgaatgacatggcattttttggcatttcatcctccctcatataatggccgtta

SEQ ID NO: 77517 - DNA, 761 bp, Heterodera glycines
atgattaaaaaggagaaggctgttgctacattttacatacataagtaaaatatttataaacaaatttttttaagaaaattacaagaaaaaaaataattttttaaaattttttcagcgatttttttaaaaactttatgatgaattattgtatttcaaaaaagattccaaaaaaactgctgtaaattaacaattttttttttaaattttcttataaaaaaaatttctaggtgcgaaagcccgggagggggacgactggggtaaaaaatttgtaaaaatattccttaatattccttttttttcttatatttgaaattgcttattaattcaaaaaaataacaacaaaacaacgaaaaaataattaaaaaataattgaagacgaatgccaaacagaagatgtgacaacaaaaaatgtcgtcaatctgtgcataatcattttgattttttttaatttttaagttcatagtgaaatgcttttgcgctttcttattaatttttttaaaattgttttagtatcaattttgattgagttattatattatttttatcattttgatttttttatatttacagttcatttgcaatttttgtgcttccgtattgttttatttttaattatttttattgttgaactttaattcggattttcttatttttattttacctatattttccttcatttcttacacttcattctgtttcatttattattataattattattattttaattatattattactcagttttatataataataaa

SEQ ID NO: 77518 - DNA, 364 bp, Heterodera glycines
atgcaaatgcggatgggggaactggtcgccgtcatctgctggcatcaacatgagcaacggcaaaatactgtgaaaaatgcctgcctacgcgtgggatgtgttgtggataaggtcaagcgtacaaaggaaaagccagtttaaataaaaatatttattttaaatatttaatttagcatccatacgaattcaaatgttgtcagcaaaagcaaagtgaatgggagaagggatgcgcatgctttggcatttatatgaaggcacttttggagacaataactgctgtaaagcctgggctatggattaatggaaatgttggctaaacgtaaaatattttaaaacttaatttaaaatcatatttatgaataaa

SEQ ID NO: 77519 - DNA, 660 bp, Heterodera glycines
atggcagccgatttgcacattatcaatcagactttttcaatcaaaaagtcaaatttgaaagttgggccaaaattggcctcaatttcgtcgccagggttgagaaaagaaaccgctggttggaggccgtcaattgagtcgacaaagaaagtgggagagcctaaattcattcattaattaacccaaatgattttataattaattaattaaagtttaatgattggcaatttcccactggtcaatctgacgccgttcttcgtgaaaatgatttgtttgctggccaaatcgatgccgcagccgacgatgtcgccaatttggaatttggcatccgaattgaacgatactttgaaaacattttcttttgccaattggccataaaaatggccatcgttgaaataggcaaaagtgccagggaattttccgggcatttgatggcacaacggagtgttttttgtcacaaagccaatgccaatgccaaagtcacaatgggaatcactgtaaaaacatgggcataaaacataaatgaaactacaaaaatatgcataaaatattctccacaaattcaacccaaattttcaaatggtttaaactaagttttcaaaagtgtttctcgcccttttgggcgttttgtaaattcaggaaaggttaagaaaaatgagataa

SEQ ID NO: 77520 - DNA, 1089 bp, Heterodera glycines
atgaaaatttggcgttcttttatttttttatttttgtggttacaaaaagcaatatcaattgctgcagctgatattcaggcgaatggtatgttttaaatttttcagcttttagtgtcgttctcagtcttttcacgaaaaacccccaaaatatggatttatatggactaaaaacagaataaacccaactcatccatacccaattttcttgtgtaaattccaaaaaaggaccaaaacatggacccaaaaagcaaaaattgcaaatatggatttattcctgaaaacccctaaaatatggatttatattgctaaaaaactaatagtatttgatttatcagtgccaaaagaaaatttgataatttttaatatgaaaaatttttgtccaaaagtgtaaattttactgcgtttttccaattttttgtgccttttttgtagtttttgttcatttttttatgtcttttaccttttttgtgcttatttttcgtgcttattttatgtgcctattttaaaaatttcgtgcctaaaagtctggtctcaatttattagattctttgtccaaattatcattttttggattgtcaggatgaattttaaaaaataaagttagttttgtggacaagaggcgctttatttttaacgctaaaaattgaaatagaatttaaaatgttaattcctttagtaacttactattatataaactcaccatttttcagaatcaaatatggattcaattataaggcaactgattgagaaaaatcgtgacaaaattgatcaaatttttgcggatttggtaatttaaaatgttttttgttatatctttttcattggacagaaaaaagagaaagaaaaaagaaaggagcaaatgctttctgaagaagaaccgctgcaaattgtaagtcaatgaatacgacgtttaacttattgacaaatcgaaatttaaaaaaaattaatttctttttatcattttcatttttatttagattagagatacaataacaattgactaccaatggaacacttcggactgtcaaagtgatcgtatgattttgattccaacaattattaaagtcaaacattatggaaaaaagaaag

SEQ ID NO: 77521 - DNA, 1132 bp, Heterodera glycines
atgagcagcgaatatttggcgtcgagggcacagattgtgaccaaaattgccaaatatccgtacgtggaggactaccggtgggcctccaaatttttttggctttataccaaatttttggcacattttctagccgtgcaattctcaacatggacgaggtacgtgtttagtaaaattatattccatttttttgaaagctaatttgtcaccattttcagaagcagttcatcaacatcaggtgagtgtgccagccaaaaatttcttaaattaaatggaaaatttaaaatgaatgaaatttaattaatgataatttatttattttttcaaaattctgaaaaacacttagtcaagcgtttttaaactttcgccagcaatttcgagttccgccacccaaaagggagcaatttaacccaacatcgtttttcccactgaaatttaaaaaaaagtcaaaaatttattagatttttaactatcctgaacggttttctgggaaaaataaaatcaatttcttttccaattttttaaaatttttcagcaaatttgaaaatttatataaaaaatgtttaatgatttatggtcttactaatccattatggaatgtttgaatttgagattatgcatttcaaggatttcaattgacaaaatgctgcaaaaaacactcgcacttttttttggacattaaatttctctcgccccccacagattggtcattatcgaaatgcgcaaccactttgccacgctgtacgacatgctgatgaagaacattgacaagatcaagaagccgcgctcgtcccacgcggagcacatgatgtactaattggacattgggcccccgttaattgattgttggagcggcggcggcggatgggacggaatggtgcgaaaattggcgggtgtttaattgcttgattgatcgacgattttataattgatgaatgatgttttgaaatgatcattatcaatcattattaactaattgtttcttattttccctttcttgacaaatcacacattcattcatccattcatttctcctttctgctgattttctactgtttctatcgtctcccatattttttttgtcaattatttttgttgcacgaagcgccaaaaaaatttgattgttcgtaataaa

SEQ ID NO: 77522 - DNA, 3048 bp, Heterodera glycines
  unsure (1)..(3048): unsure at all n locations
atgggccgaggttggcattttttagcatctgccaaagtccaatttattgccgttggcacacattgtcagggttggacatctacaaaaatgtggacaagttctcgatcggatcccatgtgactggtttttgactcttgaatttattttcgaaaaaaccggttttttaaacctttttggggaaaggaaccaaagccgcgctgatacgaatagcatgtttttcagtcccagctatctgacctgaatttttttttttatgcttggatcctgaatgtcaaacaaaaaaatcatttgcgtacacacggactcgaaccaccggttgatttcgttgtgtggtggtccctgctttgtgggccgtgtgtggcctgctaggggtacgagtccgcgtgcctgcaaatggttattttttgttcgactcaaaaatgactcattgttagaattcggatttgaattcgaattttgccttaccataaaaaattttttaaccggtccatttaaaagggtacaatttttaggaaaagggcaaaaaaatccgaaaaatttgttgaaataattttcttttttttctagaggggtacctccaagcctcgaaactctcaaaccctaaaactctcgttttttcaaggactaccatctgaggccgtgncaagcaacactgatcgaaatcttcaagatggtcaccacaaatgctcctccatcttcataattttttcattttttcccaccattttttatgtgtaatattttaactttgaaaaaaaaagcttaacataaaaatttttataaataaaaataaagtttttaattttgttaaatccgctgatgtttttatgttgcattttctacattattttatttatttattttttttataattcaatgattttttaaacacagaaatattatttaaaagattgtgtgtgccctccaattaaccgcgacaacagcacaaaatgagtgtccccaacaacaataaatcggcatcatcatcgacacacaaaaaggtgccatagaaattatgccaccaccatttaccataattagtgtaaattgagtttttgtttttcagaagattgaggactacaaacaggagctactgaaggtacattattttgaatggtcaagttacaaaaaaaaacattacaaaatttttgaaaactacaaaaattttccgattattgaattcgagacatttcaagatattttaactggggttttgatggctctgcttttccaacagatctcttgaatttttttaaattttatatattcaatgaaattaaaattcgacctgaatctcggtttttcatggatccggatacctttttcggcaattcggattttaaatttgaaactttaacaaaaatgaattgtttaaaatacaatttgttttcccaccttttcaggaagcggagatcatcgttgagcaaaagtaaaccaattttggaatttttggcccatttttccaatttttctctgccccacagattcccctccaaagtggtcgagttcaacgaactgctcaagaaccccaaataccagtacgcgcgtctggccgaaatcaccgcgttgaccgatgtcaattcaatgtaaataaaattgttttttgactaaattaggccttccaaattatgccgaattcacggattaaccctctagggattccatttttttcaaaaattcaattttcatttgccattttatacggacttatgctatatataatcgtgtccagacatttgcatgtccaaaatcgggtttaaatttgagttttttcaatccctgatagcctaaacagcattaaacttaagaaaacattgtcattttggttcattaggactaaaatttggtgaaccctaggcccaaatgtggggtaaccacttacaaaattgtacaaattttaatgaaaagattacatttgaaaaattccccattttttcagtttgccagtgccatgtggaggtgagcaaacgagcggcgatgaggtaagttgatttttggttaaactatactgagattcagttggttcattaaaatttcgaaaatttcaacataaaggtcgaaaaactcggaaaattttttaaaacttttgaaattttgggtattttttccaaattcctcccactcaaattgagaatttttctcttaaatttctaccctttaccccatttgtaggtggccaaaaagttgcaaaaattggactgccaacgtgacacagccgcactgctgaacggaacgccagtttacggatttgcaaaagggtctgtgaattgcaatgagaaattggccgaactcattgacgaactgcgcccactgttgcgtaagttttcgatgttgaatttttgaaaattatgcccatggtttctgtcccaacaatgatgtttttcatatggaaacattttcgggattttgttttttgcggtttgcttagattttccgtccagaaaatttttttaaaagtcgctttttaatttggttcccagatgaatttttccctttttcccgttgcttttttccgcttttccttgggcttcgtcttaattttaaattcccaaatggaacatttttcacaaattcattttgttaaaatttgcaggcgatgccatcgaagatgtcaacaagttggattttggattaaatttttatgcgaaaattggctatttttaagggtcaaagtgtggattcagttcctgatccccaaaattgaggtcagtttgccaagttttttgtgtcatgtcaccctcttcaaatttaaaaattcgattatatccatttcaggacggcaacaatttcggcgtgtccattcaggtgggtttggaaaaaacggaaaattcattgaaaataaattttaaaaaaccgctttttccaggaggaatgtctgaacgaaacgcgcaacgtggagtcggaagtggccggtttccttgaccaggtcagccccagcatcaagtgaaaaaatggggaaatgagttgggactcaaattaatttttcccatgcctccagcatatgtttttattcatgtttaaaattttttgaaaactttttccaataaa

SEQ ID NO: 77523 - DNA, 3047 bp, Heterodera glycines
atggacgaattaaaggcacgcaaaaagctgagggaaagcggagaacaacagcagcagcagagagcgaaagtcgacttcattgacctgtttttggagacggaacagaacgaacagcagcagctgacggagcaatgccaaaacgagggcgaagcaatgctaagcaaaacggcacttcaggtggggagagagaggaagggggaaggggttggtggcggtagtgaagtcgagagtcttagtctcgaacctctttgactcgagcaaaatacttttcgggatgagcgtttcaattctaaattcgatacagaaaagttcggctctattgcactttatgagtccaatcgaccaaacaacaattaattaattaatcaaatctttttggcaattgcctaaacgctgagattttatatatttttgcttctttcctttgtgctttcgaatgataccaaaaacatagggtttgttcgaacatcaacaaagttattgtataaaaagaaggtattaatgccaaaacgagggtgaagcaatgctaagcaaaacggcacttcaggtggggagagagaggaagggggaaggggttggtggcggtagtgaagtcgagagtcttagtctcgaacctctttgactcgagcaaaatactggggcttccaaggatccgggtttcaattctctaatttgatatagaaaggcgctaacagaaaagtacaattgaatcgtttggtatttaatagtaatgctcgagacgaaaatttctcccgagacagagacttgacttcgagaccgagacccacaaaacccgagacttttctcgagtcgagaccgagatttttaaaaaatcttcttgttaaattaaaagtggattaaaactttttacaaaatttaatcgatttttgaggcttttctaataaacttcttttttgaattttgatgattcaattacatttttatcaattcaccgttaaactaaaagccttttttaaattcataattgaattttcactattgcttatttaaaaaaatgaagaaaggcgccgccggagaaaaaatgaaaaaaagtgcaatggaataattgggtatttaccacgaaaacatttgaaaatagagagtctcgagggtaatttggtgcagaatatcactaattggtgttaatcaaagcagtctatgagaaatgcaacaagcattttcagagagtagcaaagcggtgcactttggaagagattacgtcgcagcttttgatgtttctgcttgccgggtttgtggtattacgaaggcccaaaaaattcccaaattcacggcctcttaaatttcttgaaccaaaaattggttaccgccgtattttctctaattgtctcccaatctccattaatccaccaattacgctaaacgtgaactgtacagcttcgacacaagcgcaaatacgctgagtttggtttgccacgcgttggcccttcacgcggaagtgcaagcgaaagtccaagaggaaattgactcggtgtgcttcgacgaggtgtcgtccttgagaagagaggaatttgaagaaataaattcccgttttcaaggacccaacttatgagcagctgagccaattgaaatacaccgaagcggtggtcaaagaaacgctgcgccttttgcccattgcgacgaagtgaaaccaattagcataatgaggcttaacatatgaagaccttgagaagcctttgagggaaaactatggggcgggccggctttgaaccggcgtctctggctttccgggccagtgggtaaaattgaagaatactagtgcctcaccaaattatcgatcattcgatgcctatcggtctgtaatgcacgaatccgaaagaattttttggcggaaaccactttgggccgagttatggacccgggaccgaagtggccaaatggctgtaggactgaaccatccaaagccttaaaacgcacaaaaatgcaataaaattcgtggaatttgatgaggtactaagtaagtattcttcagtttccgaccagtgttctaccagccgaacgaccgaccctaccctctacagtaccctattgtacttgatagttagtatattgtcaccttaatggtccattaatcttctctcgggtaaacttcattctctatctcgagcttaatgagtcagttcccctgaaaattgggtgcaagcgaaaatggcaccaaaagaagcggattaggataaattaaatagttaagaaaaaaatgtgaaatgttccactttatattagtgattgaaaggttttctcaggcttaaaaattcgagttcaaactttagattttcattgatcgatcaaatttttgaaaatccgatgatcgatcgatcgatcagtttgtatttaaatgaccaattgttaagtgttctgaatcggacgtgctgccacacgacgacattgggcgacataaccgtggagaagggcaccgccgtggtgtgcgatttgctttcgctgcaccacgacaaaaccgtgtggggagaggacgcggacgaatttcgaccagaaaggcacaaaaaaacccaacaaaataatcataataatgggccaaatggaattgaaatggcaaatttgtgcacctttgttcaaacagggggacacattaggcattttggttttggagaataaatttttgcaatttcttaatcaaattcactgagactgaagccaggcaaaagccattaaaattggaagtcgtttaaatccaaaaattgtaatccaattgaaactgttttcaggtggctcgaagcagggcatcaattgccgccgttttacgcgttcggcggcggtccgcgcatttgcattggcatgcgattcgcaatgattgaggagaaattggcattggtccgaattttgcgcaaatattccattgtccaaactgcggacactgaggtgatcaaatggacaatcaaagcggtggtacaatcatttcaaatcgcttacagaaagagttggcattctccggacaattggtgatagcgccaaaatcggtcactgttgggcttaaactgagggacgaagaacggcacggcacatttgagtaa

SEQ ID NO: 77524 - DNA, 973 bp, Heterodera glycines
gcgcatgcagccttgaggaagagcaccgattggtgaacactgttcgctcgttgatccgcattaagaatccgaatgatcgactttgtttggccagagctgtgttgtttggtcttcacgattggcgttcacggtcaccaggcggaggcggaccgacagcattcaaaagtttcgcaaatcgccagcacacccacgggcctgatgcacgtaacttattgagacgtgccgcaattccccgcaataaacataagtacacaattgatgacgtccaaaaagtacaagattggattgatcaacaatacgggccaggagaaattcgaattgcagtttttgagaaggaacgtgagtaccgaattgtgttcaaggcagcatccggcgaggcagccaagttcaacttgtgtcttttgttcgaaaatcaacacttcaactacattggtcgaattgagcaactgtttcgtgtgcaaggatattgtattgattgtgaacgtcgcgtgacacgctggtaccacccgcaggaatgcaaagtcgtctgccgtctgtgtttacgttttggcgcagggtatccatgtaaacaacaacaataacagcaaccctagcagatgggtcaactggcaatcgtctttgccgtgattgtcaattcgtttttccaaatgacgactgcttcgcctatcatctgagcaatcaggcacccgcaagcatgtataatcagggaggacgcacttttcgcccaatatgtgaatggagaagagcatgccgacaatgtggagccataacctatgcgaattatccacataaatgtccagcccaaattggccaaacggaatgggtgcgctgtgtacgatgctctggaccccatcaaagtggagacccttgttttattcagctctcaaagatgatcctatgaggaggaaaaggagaagaagagggcaacagcatatagctttctaggcaaattctatatgctgtgcgtattgca

SEQ ID NO: 77525 - DNA, 1545 bp, Heterodera glycines
atgtattcctcatcttccgaagaaggcgaaattcacgagcatccacagccaaatcccccagttcaagaatttcatccaaatccacaagcccatgaccccctcccgaaccttcaaccaaatgaaaaaatgttttttgttgctgaaacaacacagcaccgagttgttcttttggcggacggctttgagtacaactttgaagccgatagtcgaatggcggatggtgagattctttggcttttctggcaattttggcttagggattgagatttatcgctgtgtacaccgaaatccctactgtcctgggcgtatacatgtacgtggggctgtacatcataatgccgctggacgaccatacaaaattggaattgtaaaaaatggcaatcacaatcatccggcttctcatgaaactgttcgagtggcacaaatgactttgaggacatcggctgaagcagcaaatccaatgtcaacgcgtcaagctgttgacaataccagagcaagcataccagaaggggtacgagctgcgcttgcaccatcttcttccgcaatggggcggtcctatcgtcgtgaagttgccaggcaacgagcagacgcaggtgacaatttgttggatgcgcaggatcccgacgcaattgtcattggacaaattcttcaaccaattacaatttttgatggatatgttgagggccagagggtaattgtgtttatgtcggaatttggccgaaacatggttcaacaatatggacagcacttgtcgattgatggcacgtttaaagttggtatcccggtttaaaaatttggtccacgttttttaaaaataggtggcacctactccgttttcgcagctttataacgtttcggttattattgattttgctgctgtcccatgtgcatatgctttactaaattccaaaacggcacagcattatcgaagcgtaaacttaagtttagttattttattccatataattttaggtttttgcggccatcaaaaataccatcccgggttgggctcccgtctccatcatgtcagactttgaacagtctgctattgcggcagtaagaggggaattccctcaggcaacacacagtggctgcctgtttcattttgctcaatccctttacaaaaaagttcaaacattaccgcatttgaacacactttttttggcggcaaaccaagagggccatcagacaaaaactcttatcaaaagtcttataagcttggcattcacacccccgggagagccactatacaattatttttgtgcggttattcaccagtttgatcatcatcctgacgtcgaaggtcctaaaagttaatgaaattcctcattgttcgtttatagcattggtccagtattttgttatgaattggattgggtgtaaccgtgtttggcaacttgaacccattccaattgaagaagacccggatttgggtgcttatgggcatgttgacgagtgggtgcgaaatcggatccaaaaccatggcttacaagcaaggaatgcaacttttccacaggaaatgtggaatatgagtgaaaggtcgaa

SEQ ID NO: 77526 - DNA, 300 bp, Heterodera glycines
atgaggacaaataacagcatagaaggatggcatcaatctttcaacagccaatttcgttttcttcatccaccattaagctattttgtcaaaaagatgaaagcagaagatagtcattggaatttggttgttcaagatttcaacaataacccgcagaacggcattcgtgggcggggaatggcaagaaagaatgtttatgttcaacaagacgaagcgatccgtgctatttttttagaccgagccaaccgtccctttttggcctacctacgcgcaatcgcttacagaatgcctgacccaaactaa

SEQ ID NO: 77527 - DNA, 1014 bp, Heterodera glycines
atgccaaaattggaaactggcccactaattttttccgagtttttatggtcaaaaaccaaatctgatataacaaaaaggaacaagtagaatctgaatatcgccttaaatctgacttatcttttcaacctgagcttgtactgcttcaacttcatgcatgaagttggagctgtacaggctcattgagaacccatagcataaatctaagaccatagttggactcagcgtgcttgatttactcaatattatgaaatcagaattgcaaaacagcgatttccacatgggcttgagctatgctatgcttcgtttgctaggttggcatttctctaatcctgtgtttaatctcactgataataagggttgcacaaattacagatgtgccgctaaaagtagccttagtaacagcataagcatgtaattggaacatccctcataccattatttcatatttctctcatatggcacaaagctacatattctagcgatcagacttttcagttgatcgggtgttttacgaaagaattttgtggtactgtagtggtgctaatatttctataattttgtaaattgtctatttcatcataaacaaaattggaaatattttcgaaacaaaaacatggtacagaaaggaaggttgactttctgcacacgtagatgggctgaattttggcatcgaatgcgtctacaatgcatcagtatttctatttgttacgatgacatactagaaaatgtagaaatcaactattttcagaagattgcgaggcttcctccgatctagtttggcaacattgagttcatgcttctaggtattgcaatacccacagcatttagaatttgccaagaaaggctatattagtgtaaacggataaaaatatctacaaaggttgtcaccgtgactggacaatcggacagtggacaatcggacagtggacaatcggacagttggacaatcggacagtgaggacaatcggacagaggtggacaatcggacagtggacaatcggacagtaaattaaa

SEQ ID NO: 77528 - DNA, 1592 bp, Heterodera glycines
atggccaaatcgcatggaataacaaaaaatggtgcgatgggaaggaatggaggagagaaagtggcaaatggattggttggtcgggggactataattaggactaattagttcaatttagtttgaacaaaattcgaagaccaagatggtctggtgtgggtaacattttgacacgaaagcgtacttgaaacttatgatttaaaccaaggaattgataaactcttttttccaagggtgtccttgaaaatttttatgggaaatttattaaatctattatcaatcgataggaaagaattttgaaaataaaaaatggacaattttgtgccaaaacttactcatctctaattagtccgtatcggcatgttcttgaaccaaatgacaatgttagagtttgggtaaataattaatcatttcgcattcgcgagcataaacattaactgtccacacatttcagcagcagcagagagatacgatcagtgttttgcatgagcatgttgatgagcagcataataatgaggcgggtggtggaccaacagcaaacgaacaaaacgtgggaatggtaatggacgaacggttggacgggtcgcaggagcacaacggcggccgggacggcactctgccggcgccgaaaaacgatgattggtctgtctcagtcgtccctgggtttttgccagtctcgtatttcccgacccaacctcatcataggcatgagcctcatcagttagctagcaaccgcaaaattcagagagtttatgtgctcgaaaattttccgagattcgcttctaaaaccagctccgctttttgcaaatgccgcggttgcgctcatggatttttatcggaaaaaatggaattttctcggtgaaaatattcaaaattcctcttgctttcctcttttacaataagactccttaacgagttcgtcccctattcttgccgtttcagtgcttttgttgccaccccattgctgcagcaaaggcggcgtatgccgatgacaccttccgccacaacttcaaacaacaacaacatgtactgctccaacttgtcggcaccgccgcctgctcccatgaataatacgtcatctcctccgacaaatgatcaacaaaatggcacttatgagagggtaaacaaatttttaaacgattttctgatcataggggcgaatgtgggggaatatggggcccccgaaaaatgagggtttttaaaacggaaccctcgcatttttccaaaatttcgaaaatttgttaaaggcttttccaagagtggaagtgagggaagagaaggggacgggataaagtaaatattgggctttcaacagagtttataacccgcaaatgccttgtaaatatttcagcagaaaccaccgacaattcgtgtgcaaatggccaacggtgccaatgcgtctttgcctattgctgttgctcccccgggcgaagccaaaccgttggtatggcgccaaaaacactgccaacggcaaaatgatcagccaaatcgttggccgagtgccccaatcgcaccaaaagacgaactttgaacagatgaaaaacatttatttgaccatttattaccaaaaggaacaattttcaaaatcaaataaa

SEQ ID NO: 77529 - DNA, 1556 bp, Heterodera glycines
atgcagacaaaattggagaagaaggaggagcagcacatgaacaagtttgagcaactgcagaaagacgtaattttcaaaatagaaaactcaaaatttatggactcaaatccgaaatttcacactctaaaaactaataaggagcggataacggatagaatactgaattcttagaattttaagcgtcctttatcttaaaggacatccattgaaattggcattaattttggagtcaaagtctgtaacagagctatcgaattaaaaattttaacccaaaaataataaataaaaaattgattatttttataaaccctatcaacgaaaatttcagattttcatagcacatcaacagcaaaatggtaagggaaaatgaataaagaatattgttcctaccgcaacattattattgttattatggcgatttgtaaaaaataaaaaacggctaaaaagacattttttatagaaattattgggcagcgatttatgtaattttaatattaccgtttttatagtttatttgttcgtttggtaatatattcaaattaaagagtttttcatgttttagaattggttggccaaatcaaacaattgaaagacgaacaaaagaattatttggcgagggtcgacgaattggaggaggaacagaaacatctgcagcaggaaaagaacggtaataatatcgaaccatttaatttattctcttggctctaattttatttcttttttttctctaattttgctatttgaacaaaaagaactgaaaaatgctcacaaagaaatgcaagaaaatatgaacaaattggaggaggagatattgtgcacaaaattggacgcggtgggctcaaattatgaagcacttacaaaaatttggccctaataatttaaagctttattaacatatttcaaaaaaatagtaaaatttcaacagaaagcattccaagaagggcttgagaaaaagcaactccttgaacaaattgtgacggttcaggcgaaggttggcaaaatcgaaatggaaaaccaacagcaaaagggtaagggaaaatgaatcaaagtctttaaaaatatgaattaataatttatgttatttaaatacaaattatgaaataatcttttttaaaggcattagataatttctcgagatggtcaaataattaaactattaagtaactagaaatgttaagaatctataaaaacaatcatttttgcaatatttttgatcattgttcaaaaaacatttgctgacgaattgtccactgacgaattatccactaacggattgtccataactgacggattttacttcactgacggattgtccggactccttttattattactgtcaaatattatttttgcttaacaaaatgcaaagaaatatattacataatcctatataataaattaattacaataaataattaatatttttagtttctatcgaccaaatcgaaaagttgcaaaatgaacagaatagaaaaatcaatgcattggaaaaggaacggaaagagaagcatatggaaatggtgaatgaatataatggaaataaatattaaaaatta

SEQ ID NO: 77530 - DNA, 2511 bp, Heterodera glycines
  unsure (1)..(2511): unsure at all n locations
atgnacgaggaccggcgggaagaagcaaaagcacatcctcatcatcatcatcatcatcatcattgtgatcatcatcaaaaagatcaaaagaaacaacgggtcaattgccgccgttgtttggcttcggctggtgggggtggtgatcatcatcatcttcatcatcataattattgtcgcttcaacaacaccgacaatcaccatcagcagcagcagcaggaagagggggaagagggacagcaagattatttcaaccatcgccgctacaacaacaaaaacgccggcggcagcgatttgtttttcgacggatttgtattgccactaccaccaccgccacttgaagcggcttcatcatttgaacaacagcagcagatgatgatgatggcgaatgggaagaatgattgtgctgctccggatgaacaaattgttgctggagaaggtggagtaggagggcaaaacaattcggcatcggcattgttgtcgccactgtcctctgctgttggccatgatcagcagcaacataaattgggcggcacggatcggcggcacaacatcaatcagaatgccgccgatgctaacagcgacggcacaaaatttgacaatgacgatgcaattgcaatgataacaagcactaagaaggcgaagaagaaagtgaaggacaagctgccacaatcgaaaagcaatgctactaatggtagtgccaaaaatggtggcggcggcaacatcaaaggaaacaaatccccgggtgtggaaaagtcgcgcagcaaatttggccaactgctgcgcgcaatgctttcttcttcttccgcatctcccgcagctgttgggcgagaaaaatttttggcatcgtcaccaacagttgacgacgtgaaaattgatgggaagaagcagccaattggagcggaggcgaatggcacttcaacaaaaagtgccattccgtcctcaaattgtggtggacaaatttgtgaagggggacggcatgggacagagaaggtgttgttgttgctgttgtttgtttgtatttgttaagtattttttgtgtgcacaaatacctttaattcggcaattaacggagaaatacctaattaaaaatttatatatttttttaaataaaacaattgagtagcgaaattggccgcaaaatgttggcactgaaagtgtatacaaataaaatttctttatatactttttaattaaaaaaaaataataattttttattaacaaattgttttttttcattgtgattggggagagtaatttttagaattagaaaatttagacaattttttaaatttcttcaggggacacccatttaatttttaaataaacaaatctagttgaattggcccgaataattaatttaataaatgtttatgttttctcctcagggcactcccgagcacggcagtggcatttacgtgaagaatatcattgagggctctccggcggatgttgacggacgtctggcacccggtgatcagttgttgagcgtgaacggcaacagtttgatcggtgttgggcaggatttgtgagtttttgttctatctctctaatcacaaatcaggccaaggggattcaagaaaaaagggcaaattttgggaattattgttttcttaacaaatttcattaaaatttctgaaaaaaaaattccccggcggcgcttcggcacagccggacccattttagcaaacaaaaattttttttacaaaatttgaactcaaaatgcttcggattctgcatccaaaattttttcttgttattggcctgtatttaaatatttagaaaattaatttcctattttttcagggcagcacaaaagatagtttcggccggccccgttgtgcattttgaggttgccaagcatgcggcgcaagccaacgggttgggcccctactttcatcagcctcatccgaagcaacaacaacaacaacaacaaaacaaccacagttctgctgttgatggtgccgccatgatgacacaaccacttcaaagccaacaacggctcaacgggaatggagcagcagcagctggagtacaaccacaaccacgaatcgcttcttcggtttccagacagtccatgaacggcaactacaccaacaacagcaaaggtggcgtcgtgccggtgccattgtccgtccatccggtggttgtgccgaaacagcaaaagcgttccatgtcagcgtctgagttgctcaacacggccgggggcagcagtagtagcagcaattgtgccatcgctggagccgttgttgtgccaccaccatcgtcgtcgccaaccggtgcccccgttgctgcgtcctcgccttccttttccggcggcactccgtttccgcttgtccgccactcccagcaacagtcgtcctcctccgcgttgtcctctgctgcttcgctggcatcatcgtccgcctcgcggttgcccgcccactaccgtccgtccgtcaaccgtcctcaggtggtggtcatgcagccggcacgccgttcctccgctgccgccgccacatcgccgtcgggcac

SEQ ID NO: 77531 - DNA, 619 bp, Heterodera glycines
atgccattttggttcagcttcagacgaaaaccttctctgctccatgccgttcgatcttcatttgacacaaaaatttgtgaaaaatatttcttcgtaagggacgacgattgggaaagtgttgaggcaacaccacttttacgcaaactcatacggtacctttacatgggattgggctacggtcatttgtggcaaagagttacaacagaagtttattttaattattacaaatcctatttaataaatttaaattaataaattatctgatgttatattttaatttctcaaaaattgaaaaaaatctattttttatttgtttaaatttaaaatgaaaaaaattgcattattttttttcagcattactcggcattttttatggccaaatttatggttcaaatcaagtccccaagggttgttaaaatatagtcactcacgatcactctgaagtagtgttctgatcagggtgcaacagacttttttgatcaacatcagaaagttatacgagcttgaatttttgcagtttttttcgtgctctacaaaaaaagtcgcctgtcttcaaaattttgagtttataattttattaacagcaaatttgagattttacggaaaaaaattaattaaa

SEQ ID NO: 77532 - DNA, 438 bp, Heterodera glycines
atggtggaagaatgttctgtttgttgtgaattgatcataaatgatcaattaccaatgcaattaaaagaatgcgaggtaggaatttaaagttaaattattttttattttcatttttttaatatttagcattttttccaccctagctgcatttcacagtggttagtttcttaataaaaaaaatattaaatttctaaaataaattttaaaataaattcattataatttcaatttaataaaaatcgaacatatttattataaattgtaaacataattaaaactataaatttatttattaatttaatttaaaaaatttccagctgcaatgttcttgttttaatttaatgaattttaatttaattttgtgaatttgaaaaaagaattaatccagcgatatttaaagttaattaaatcaaaatattataaagaataagtttttca

SEQ ID NO: 77533 - DNA, 1461 bp, Heterodera glycines
atgccaattgttcaatttgaaagtgaaattgccaaaatgttgggcacaaatcgtgccaaaatttataaattaaagaaaaaattaggacaaacacggaagtacagagtaaataaggacataaataaggacacaatgattcgaatgatcagaaaatttgatgaaatgaaaaaggaaaaaatttatggatttaaatatgataagaacaaaatatgcaaaattgaatgtgaaattgcgaaggaattgggaattactcggcaaaaaatttatcaatggaagaagaaaattggtaagaacaaatggaataagcgaattttaataattgtctcattttaagatttatctaaaaaattttcaacgccacaaaatattgaaaaaatagagcaatttgaaaaaatcaaacaagaatttaccaaaaaattcaatttgaaaccaaattgggaaattgaaataaaaatcgcgacaaaactgaaaaattgggaatcgaaacaatgaacctaagaaaatggaagaagaaattcgacaccaaacagaaccgttagcattcataaaataaaaatttggattctcgaattcttttcttaatcttaaaatccttgttttttttaaaattattttttattcaaaaaatttaatttcaaatcttattataatcattgtttatcaaagatatatcttctgtccattcacattcattgggtttgtttaattagtttttcatatgttgaaaagtatgccgtaaaccgaggcacatacatgatgatgcacagctgttcaaacattttaatagaattattagaatttttaattagttttaaaatttgtaaatttccaaatgaatgctttaaccttgtttttttttacctgtcgtcatcgctagcaattcattgatttaaatattaatggaaccttttaaaattaataatccgtcataagtggtaacattgtaatgcttaactgataaattgttcaataaaacaaagatgaatttgaattatcatgatttttcaaaacaattttttaaatcacattgttccaatttctgattacgattatgaatgctgttgttaaaagccttttctcagaaaatactcatttatttttttgtgccttttaggaatataatgaattttattctgtcatttttggttaatttagaagtttgtgtgggtttttgccaaacaattcaaataaattcagcatatttcatcaagaattgctttttttagtgtctcttttgaggttaaaattttcacatcggaacccctgttttttaaagcaaattttacccttccttggtccaccactttcagtgactgagcatggatatgctttgtcttcattttgcccctccggggcagccaaaattcgtatgaaaaacggagaccgccttggccattttggaggacgggttgtctgatgacaaaacgacgaaatttggccatttttggcttttgaaataaa

SEQ ID NO: 77534 - DNA, 2118 bp, Heterodera glycines
atggaaaagcaacttattgttgcggaaacatctcgacaaattgcttatgtatcaatttgtaaggaaatttactgggaaattaaaaaaacgaaggaattcttttgggtttgatttaaaataaatttaaatgacaaaaaaggtactactacatatacccatctcttgtctaatctcagcttctgatcactgtttttcttttcagacagcagttccgatgacgaagaagaagaaaagaaaacgatggacagcggaacggccgaagaaaacgatggaagtggcagagaaggggaaaaaggacagaaaatgggcaatggggacgaagcaaacgcaaattgtgttgatgggaggagaggaaggatggcggaagaggcaattaaaaaagtgattaggggacgatgaattggcgggggtgggggtaattagctaatggggagaaagactttaactgtcagagaatccccccattctttgatttgactaaataggagcttaatgcatatttactgttaaaacccagtacagtaaacgatccaattgtaaggacaaacaaaacattttaaatgctcccgctgactatatttattagttagtacagttcctttaatgtcaacaattactgttattatctaaaaaatctccgcgggtctttgcccagctgggggggggggatgataaaaggataaacggaggaagaattggctgctaattgtgtgggataatgcggggaaatcctttccgtgacttccaatttctctcatccattcctttgtttggtcaaatgatccagtccccgtttcagcgatcagaaacagagcaacagaatcggcacgactcacccgcagcagcgaatgcgtcgctttccgtcggctcggccgcggcgggtggcaaagatgggcctgacaaaagggacggacaacagaaacaacaaactttggcagcggaacggacggacagcggacgaccgaccaatggcaacggaggggaaaattgtgcaaaaatgcgacaaaagcatcgccagccgtcaaaagttgttccgaacaacaacaatgccgcttcatcctcaaatgagtgctgtcctccccatccgatggccaatcgaacttcggtctgacaaaagcccttttttatttgttttgttccttttacgggcagagaggggcgattaataaaatcaacaatttttccaatttgtttttatccgttcctttgcatcttttttcaggtgctcgtcctcgaggatcggccactccctccgttgccccccgtgaccgacgacgaggaggaggacgaaattggggacggaacaacggcagtgtatgtgaactcgacaggcgactccggaattggcggttcatcaaaagcgccgcaggactacgcgaatacgaacattcgtaagacaaaagaggcgcggggggacccctcgaagtttttgtcttacaaaacgcatttaattgcattaaaatagagacaatttcagcagttcaaccgacgcgcgtttctcggaaaatccaacaggttctccagtcccttcaggtgggcaatttttcatttaattacgaacagcatatatttaattgggagcctaaataattcgcaaaactcgcggcgcgattaaaaatgtgtaaaaactgtcggttttccaaattattgttttacttttccaacaaaacaattttgtttcttttttctttttgatgatcagtaaagagaaatttgaaactgatggcgagtgattgggggaattgtttattattgcggcgaaagtgtgaagaattcgcgtgcctttgatgtttctgagtgattgcttttgctgccgtccctccccccccccctcgggggctgatcaaatatcatctcaaattcatcatcgaaatgcttcgcccgttttcatttgatcgtctaacaataagagggaaaagcaatttagggaatgtggcgcttcgtttgatcgcattcattcactttacgacgaatgattttttggaacattttgaagagcgtcgagcataaaatcattgggagaatgggggaggggggaagagaacggacgggcggtcggacagaacgaagtcaaagcaagcaaaagccaaaagcacacaaatgcccaccccaaataaa

SEQ ID NO: 77535 - DNA, 1021 bp, Heterodera glycines
atgagtgattgtgggaatgaagcaaagcgaaagcgcaaggaatggcgccaggagcacggtcgcagggttggttcaaccccaaaaagtgatgaaaattgaccaaaattaattttattttaaaaacactgcattttttaggtctaaagcagaccgaagccgacacaacagcagatggagaggggacatcgacccaagccgccgaaagtggaccatcaacgtcaactttggacctttgtaagtcaaaaaagtcactattttagaagcaaaaattaaactaaggcccgcgttcaagcccaaggccattgtcagcaactccgatcaggcgccatgtgcgtgtccatcaaaaaactgccgacaaagcaacgaacatggacttcacaactaccgacagtgcaacagaagtggatttgacaacggtggacaaggcaacggacgtggatttggcttatgaggacgccgcgacacaaaccgaccaattggacaaacagttgaaggagcaggaacaagtgatcagctttcttcgacagcaggtccgcaacagagacgcaatgatcactgcgcttcggcggcagttggaggaaaagatggcaccaccgatggagacaccgaccaccagcaaaagtgagtgaaactaaaatcccctttttatctttttcaaataattttctcttttttaattttagcaactccaacaggacgaccaaagatgaatgtcgatcatttgcagcgcacctcacgtcgcaaattggcagatcaaattgcggatgtaataaaccgcgacagatcacgttccgccagccgggcgtccctcgaaggaatcagtcgggaagttcggcacaaatttgctcattacacgccacagaagaagaaacaacaactgtcaagacaaaaaaagtcagttgatccagaggatgctcttctgatcctcgggcttgtcggtacacagaaggcttacagacgactaaaaagcactattcgcctgatcaatgccaaatttgatgtgatgccgccactcgaaaaa

SEQ ID NO: 77536 - DNA, 81 bp, Heterodera glycines
aggccaacaaaatttgaaaaacgggcgcgaagcgcccgtcttgagcctcgatgtggactaaaaacccataataatttttta

SEQ ID NO: 77537 - DNA, 1129 bp, Heterodera glycines
atgaaccgacggtaagaaaggatttaaaaaattgcaagttttcatttacccaattttcttatgtttcagttggatttgtggcgacgtttggatggacattctgccatcgtttgaccatgctcaactcggcctcaaaatggcattgctttccgaccggttcgacatcttagtggacagacatttggatggaaaaagcgaattcacaatttggagagcaatcgaaattcgcaagaaagaaggaccaaaaacgaaactgtctgaatggatcgatggcaaaagtgtggcatttccgttccccgaccgtccgctgcccaacaaaattcgttttaagaaccttcggatttagtaatttcaaacttttgggcgctagtttaaagaagccctcttttgaaaatttgttcactttttttgcataattttttttatgcaaaatttgtttttttaacatggaacgtattgcatactatttaataaattgaaaaaaacattttaaaagataatttagcgctagttaaaaattttctgtataaaaatacaaaaaaaaaattttctaaaaaagtgaaaaaattttcaaaagagggcttctttaaactagcaccaacttttgtgtttattaaagcattttttatatttcttcagctacattgaccattccgtcattgaatttctccgttcaaacaagcacatttgggacagaagaggcaccaatttggaagtgtttgtggatgcaattgatatgggtgttcaaccgatttgggatgtttttatccgtcaaatttggcctatttttgcgacaaacattcaccatttgggctttcgcaatgccgatgctttgaacaacttgcgcagtcgcacttcaccaacgattctcactgatcttgatcaattggtttcaatcgattccggttttctgttccccgatggaattgctgatgatgggccaaatgcaactgctggccaagcgttgaccaaatggctgcacactccgacaaaaaatgggcaaccgaagcaattacgtttccgtgcttatgtggttccaccaaatctcgaatggctcaacagcttcaaagaggtcgtctcgccagaattttcgtcaatttgtttttgttttaccaatttttgtgtttag

SEQ ID NO: 77538 - DNA, 1585 bp, Heterodera glycines
cgagacgaggtggaaaaactgtgcaacgaaattgaacaattgcgagcgatgagtgtgaaggccggcgtaacaccgtattggaacacggaaggagcccagggtacggtagcgaaggggggcaaagaggaggagcaaccgcaacagaacggacggggcagcaaaaagagttgggtgagtaacaaagggcaaaaggcttaggggtgcaatttaaatttgaaatttaattctaaaatattgaaaataaaatttgcaactttaatgagaattaactcttaattaaattgcaacaaattaagaaaaacaatgtggacactcaggttagcaaaagaaaaagcaaaagttagtgtggtaaataaagtggaaatgtgccgtgtttggtgctaattggtgtacataattgagcagttaattttgataattagaccataaaaaacaacacaacaattagaagtttttattttaaactgcatccaatttattattaatttttttgttgtcactttggtgtttagtccgataaataaatgaatacttaattaattaattgttaataataaattctgttctgctaccgttcagattcgaagttcattcagccgcgcctttcacaaaggcaacaaaaagagcaagcagcaacagcagaaggagaacaacgacgccgcggacaacaactcgctcaattcgttctcctccttcgcccattccaatcccagcaaaagtgccaatgccatcagttcgtcttcgtccgtttcggtgacctccaaaaaatggacaccggccaacacagacggcaattgggcgagctgagtcaggtggaaatggcacttttgcagcgcgagttggacaacagagaagttggcattgaccgatgtgcaattggacgcactggacaaggccaaagagattgacattctgcgggagactgtcaacagactccaggtgggttacggtgtctcaatgtacgataattttatttttacagtaacccaaacggcacataagttaattcttggttttatgccttttctgtttagcatgaaaacaaactgctcaagtacaactactccctcttggagcgcaaagtccgctcggagtcgcggacgagttcgcacctgtcattgaacaccaccggcatcgccgggggcggcgcgttggagtttgacgcggtcgtgcaggacgaggtgccttgctattattgttgctctaaaaggtgcctttttgttgaaggtgctcgctgaggctagcgaacagcttgcgcccccctacgaattcgccgcctcgtcgccctccagcggcgatatttctgtcaacacgacgaccaccggcagcaacaactccgccggcggtaccacaccgttcattcccccacccgccgatctcgcggccacaaaatcggtgaaccgttgcagcttcgcctcctccacgacgacttcgtccaaacgtatgccatttggccattttcctattttctgaccctttcccatctcggcgttttcaggctcttcccacggcgctttgtccacggcactgccctcagccaaggtcgtcctctgcgttgacttgagcgggcgtgtcgactcgctca

SEQ ID NO: 77539 - DNA, 257 bp, Heterodera glycines
atggctagtatgtaaaatttgcggtcacaaataaaataaaaattggctaatatgtaaaattggcgtccagaaatttttagactaatccgaaaagcacgatgtaaagagtcgaaagaattcacagtatcgtttctaatagagaaatatgcttacatgatactcataaaaactacaatgatcatttttcccacctttttatgaccacatttgaaaaaattcggaaggacgaggaaagatatgcttgatgcctcattaaa

SEQ ID NO: 77540 - DNA, 100 bp, Heterodera glycines; identical to SEQ ID NO: 51845

SEQ ID NO: 77541 - DNA, 1809 bp, Heterodera glycines
atgccgtatcggaagccacaaaaagtgaagaaggcctacagatgtgccatcaaacgaacgaaggagtatttttatactaaccttctgggggatcagttcgttcgtacggagaaagaattcttgccagtacaaaagagaatctgcatggccatgatcgaacagcacaaatgccaatacgaagataagccaatgactccgattgaaggaggaggatggagcagcaacaacccactgaacgacgaatttccgggaaggttctcaagtctaatttcgggggagcgagagagcgtaacgctgaattgttttgtcgagaaggcgtcgctgttttaccgccctcacaattttgagttgatcagcccgctctacttacacttggaggattgcaactatttgaccggaaactgcaacatggcagacaacacaaccctaaattgggaaacggagtgcaacgagagctgtaagtcatgcgactaccatttcgtcgaaagtatggacggagagcacacgggatcaacggattgggcaggcggaacatggatatccaaaagcaaggaacaggcgctaacgtttagcaaagaggcgaaaatggaaacagcatgcaacggaaaaccgattcgcttgtcggaccaatcgtttggaatcctggaggatgagtacctgaagatcgtcaacgatcgtggattgggaaaaagagccatccaggaggaacaactcgcagcacaattaaccgcaggacaactcgccacaagccgatcaatcgcgcagcttttttccaaggaatgccgaagaagttccagaggaggaaatccgaccattcaggccagacgacttttacgacgcaaggatgtttggctaaacgaggacacgatgcaaatcttctcgtgcgctgagttttcaatgcaaaatgtggaatatcaagcagtcaataactgttaccgctacattccggtccaaatccgcattgacaagaagacgctcaacgcattcctggatccggagcttcacatcctcacagcgtcatcaccattcgcagattgtggaaattttcgctaccattatctgcaactgagccagagcaattggatcaaaatcgacacacgcaccgctacgatccagaaaatcgactccagcagcatctctgagatccacgaagcctctggagacaaatcgttgttggaaatcacgccgctagtttttcatcgatggacgatcgacaacgaaacaggcgaagggctattcgcgcacttggatgaatggctgcgtttggatcaatggaagtcgaaggagaaggagcacaaaacggcgcgtgcgctcacactgggagctctcccgaacggagtgattggcctcaccgaagaatggttcatggacaaacttcggctgctcgtctcctactggacaacggcatgctgcatttacgtcacattcatttttgggcgcgatgtcctgatacccttggtatgggtctacttaatggggcccgtcatcgttaccatccgcaatttggtgacgggaaatcagtggacgcagcggaacagagttactcgaggcacacggcgagcaccggcaatttcaaggattgaagcaattgagctggtaccgccttcaatgccccaggaaatgagagcgaacgaaacgtcaagttcacatcaagaggaccccgagccgtcaccgctggtgatggagctgaaacgacaaatggtcgcattccgttcgaagcgacgttttcaaagccgtgggaatgtcgcggctgaacgacagccgcgaatgtccgttgagcggacaaatgaggaggacggggaggagtga

SEQ ID NO: 77542 - DNA, 2637 bp, Heterodera glycines
atggacaaggacgaaagaaaaagtgagcagacagcgtatgaacaatttcaaacaacggagaaactgaacacaaaaatggaagcagccaacacaaagctaacagagctgaaggacctggagatgaaggtggaagcaggagcaaagctgcaacgctccaaagcagacagagacgcgcgagtggagcaaagagaacatgcaaaagcaatgtcgaagtcgaatgcagaagcagacaaagggaataaccgtgcgagaggcaatgaaatgactgccgcattgtaccaattgccaacactaagaattaagccgtttgggggagacaaacgggaatggcccatgtttgaagaagcatttaaagtggctgtggaccaaaagccaggaagcaaaacggagaagctaaatttgctgaaatcgctggttgagcgagaggccgcattgctcatcggaggcctacgcttggaagagaaaaattacgaaattgccatgaagctgttaaaggacacctatggagacaaaggcgaatatgtaaggaggttacacacggagttgtcgaacctcaaacgatgttactcggtggaagacacaaagcaattttgcatggaattggaacgcctagcaagagaattggaagcagcggaagaagacattgaagggccgccaatttatttaatgcttgagaagaagctatacaagcctttcctgcgtgaaattctggaagagaaagcaaaaaatccagacttttgggacacgtcatccctccgaaaggccttaggaagtgcattgagcaaagagctagcaatcaaagaagtcatgagggagtatggcttcgaaggcaaagaggcaaatccagagcatggattcaaacgacaattaaggcggaacagattcggaggctcagtcaatgtagccacaacacatttcgggaaacccaatggagagcgaagaaaaatcccggaacaaaaaatgccaagtccgaggcaaggccaacgaagttttcagcagactccacaaaattccgcattccgagaacgtaagggacaaggaagaagcccaaaaattcagcggaatccaacagcagttaacacacaaggtgaactgtttctgtgtgttttctgtggagggaagcacagacatgacagttgcgaaaaagcaaggacggtgcaacaacgatttgcagtcctccaagagaagggcttatgctacaaatgcctgaagggcaatcatatcggaagaaattgcccatgcccaatgaaatgtttcaagtgccagcaagcacacccaacggcattatgccatcaggcaaacccacaaagggcaacagagtggagaaacatggcaaacaaagtcatgaacgtccggaaagaagagaaaccggacaaacgggacgaattcaaagaagtttcgttcacgccctcacaatgcaattcagtgcaaggaaattcgcgagtcctgctgagaacagcagaggtgaccatcttcaatccatccaatccaaaaagaagcatggtcgcatcagtttttgtggatgacggaagtgaacgctcattcatccgtgccaatgtggcaaaacaattaggccttccggtgattgaaacggaagagtgccatttgactggttttggcgagaaagaagccaaacgctacgtgagcaatgttgtacgcgtaggatttctgggagtcaacggagacccatatatatgcgcactcaatgaaatggaattcattgtgaaagcgatgcccatcgtaacgctgaattcgatggatgaagcggaattaagcaagaaaaaactttcccttccatcgcggccaagacagccagacattctgttgggaatggatgtcagacatgacctgaaaataagagacgaaacagaaaagttgccaagtggattcacattgtcaacgtctcgagtcgggcggatgataagtggttatggccaagtccagggcccaatggacatgagtgtgcaagtgacgtacactggagcactcataagtgccttacaatgtgccagtagcagaagagatgctgacgaagaaatggaagaacagataaaaacatttttcgggctgaacataatcggattgagcgacaatcctgaagaagaggacaaggaagaagtgatgagaacgttcagaaaaggcttgacattcaaagaaggaagatatgaatgtggcctaccatggaacgaaagagtaaaggatttgccgacaaattttcaacaagcgagggcaagactttgtggcacagtgaaaaaattgcgagaattaaatttggtggatgaataccaaaaaattttcaatgagtgggagaggaacgggataatcgaaagagtgccggatccaacacaaataactggaccggtacattatctcccacatcggcccgtgataaaaatggacaaggccacgacaaaaataagaattgtgatggatgcatccgcgaagccagcaaaccgcaaaggagccccatcgttgaacgaatgcttgcacacagggccgttgttgttaaatgaattgaccgggatccttctaagatggagaagaatgaaggatctaatcctggcggacatcgaaaaggccttcctccaattatcagtgagagaggaggacagagacgcgaccagatttctgtggtag

SEQ ID NO: 77543 - DNA, 1201 bp, Heterodera glycines
atgtcgactcatcttccaagtcggccaaacagcggactcttcaccgctctccgatctcttccaaattccttccgtccgccgcttctcgcggaaactcttccgactgaactcactgaaaatgtcactttccgtgcgtttctttcctccttttttgcttcttcgccgatcaccgtggaaaaactggacaaatttttgaaacaaatgcaacaattcccgaatttggacgcgttggtcttccgttctccggcgagtgttcgcttcccgccaaagagtgaatggttcagggcacttctgaagcgactaattgccagggcatgatccatccgttgaataaccaacaaattgacgcatttttcagatgaatgagttccaatttgatccgagtgatgttctttatgagtcgctttgtgcttcgatggcttccgactcagaagatggccaagacgaatgtttcttccgcattttccccaatctcttcgactcggatttgtccaaagctccttacattttgctcaaacagagagtgcaacacatttcgcatgggacgacgggactcagttgttggggggtcagtagccaattggcaaaatgtctttaacacacttttggcttttcccttaaggcatcgttcgcttttgccaattttttcgcgaattcgccccattctgtcgccttttcaaatgtttctcatgccttggaattgggcgccggctgtggcctcgctggcatttccttcgctgcttcgaatgcctcggcaaaagtcactctctccgacgcacatccggccgttctccgacaattgcgagagaatgtggcactgaatttcgactgttcccggagctcacgatcagcggtttccgttgagcgattggattggacggacttcgaacggcggacactgccgagggacgccgaattaataatcgctgcgggtaaacaaacggagaagggatgggatttattgaagaccaacacataaattttatgttttcactgcattttattaccatgtttttttaaatttatttgcccatttctcccccattttcagatgtgactttcgacccgtctcttttccctccttttgctcaacttctccgacttttgctctgtgtggaaagtgtccccggcggcgttgtcgcgcttatttgctgtaccgtccgtgacaaaagcacagaggaccattttcttcagataatcg

SEQ ID NO: 77544 - DNA, 954 bp, Heterodera glycines
atggacacggaattggatgggttaatctggcaaattgatgcaaggttatagtcaactattaatagaatgaggaaatccttgctaatcgttttcataaatttaaaattcttttattaaaattggataaaagaaaaagcaccccacccctccataaatttaccttattagaatctcagaaaatgcacgtttgaataaatgaatttatgtaataatgggataaatttttaatatttcatttttgtaggtgtttctcgttaattgaatattctcaataactaacattttttaagttaattaatttttcaaaattttgtacaaatattttatattttttgtcaatttatttgaatgaattgaattgaatttattttatttattttaaaatttaatttttttgaagaaatcctctgcaaaattcgcgtccgtttgggcttatcattgtaaatttacagatttgcgagaaaataaaaataatagccgagaaaacattttggaccttttactaatcgaagaccgaaacgaatttttgcgacaaatatttggtgaaaaggaaaaatttgatacaaaaaataatgaaacaaaaattgaggaaacattggaagaattgttaaatgaagaaaagaaaaagaagaaaaacaaaagaaacaaaaagaaaaatggaaaagaaaaaatcgataaatcaataaaaaacacaacaaacacagagacgaaaaacagtggggagggcagagaaggagaagagggcagagaccgagaggaagaaaaaaatgttattgaaaagagaaaaggggaagaaattggaaattgtgaaagtgataattattcaaaattggatggaaacaaaaatggaaatacaacggacgaacaaatgacggcgaaaatgccaacaaatgatgcaattcaggctaaagaattggacaaatttggcacatttagaggttgttaaaaagttta

SEQ ID NO: 77545 - DNA, 892 bp, Heterodera glycines
atgagtgaaagagttggcctcgtcagtaccagggctggccgtgatcacggatcacggctcacggatcacggaaatcacggggtttttggggtgccgtgatctcggatcacgggtcacggattttttcaaattttccgtgattttgatccgtgattggcattttatatagggaatttttattgagacgaaaataggaaagtggtgtgaagaattttttgagaaaaataaataaactcttttctgcttacaaattagaaaataaacatatatatgtagtctggtggttaagccttctgtctttcgttgtctgtcccttgggttcaattccccattgggataggacaatttatataatttgttttgataattttaattgaaatttaattaacaagaaatttcataacattgaaaattatttttctttattttttaaaacgtccatagaccaataaattaaccaatgattggacatattttggaaaaaaactgttaacaaattcactcaaaatttcaaaatttttcccggcggcgcctgtcggcaccaccggcagacggacccccattttaccgtatttttgaaattttgacaccaaaatggcagaaaaattaccatttttggcatataaactgctaaaaaccctatttttctctccgtcgcttaaatttaaaacgacaggcctaatcaaaattttcagaaaattttcccaaccctctaagaattttttctaaaattttcccgactttcagtatcttttggggtgttcagatcgtcatgaaggactgagcatgttggtccaaaagattttttcagcatcaaaagttagcttagagaaatttttttctctacataaatagatttttggttaaatttaagaaaaattttcttaataaa

SEQ ID NO: 77546 - DNA, 1159 bp, Heterodera glycines
atgccgccggtggtcggactgttgcgcgagaattacctgtacatgttgctctaccaaaacgtggccacaatgctgtcacagtttctggtgccgctttgtgtgctttgtgcattgaattttcaggtgggaaagaaggcaatggcaaaaggcggcgaaatgaatgagaaaattaaaaaactaaaatttcgaattaaaaatgccaattttttttaaattgtttctttaaggtggcgagaacaattttggtggcggtggagcaaaggcgagaaatgtgggccgaactgagcgcggcggaacggagagagcacaaaacggccaaaatgatgctaatggttgtgttgggtgagctggcaattatttgtttgtgtctaattgggcaggatttcttagtttttttcttcaaaataagagcaattattggggcattattttgttaattgctcgcatttgtgccgcttaatcaaatgcctaatgaatgaccttgacaattatcgtgactaattaggcggaatgatcaaaggctttccctgccactcactaatcactcgtaatgtttcgcctccctttcagtgtttctcttctgctattcgctgtccttttgccttaacgtgttggaaatcgttctgcccgcccttttccgttctcaaattggttatttgctcaacgatgtcaacaacattttaatcgttctcaacgcctcctcctccttcgtattttatgcccaattctcttcaaggttttttaaaaatgccaatgccaaacccaacgaaaatgccaatctttttaaattcgcaccccctaaaatggaaaacggcatgactttgtcagagccatttatagcaaacatacatcccaactttcaattgtggtattttacccttccaccgtataccctttacgtctcccattccccacagtatccccacctttaccgcacattttaaggtaccgtgcccaattggtttatttgctgcggcggtgccgttgcctggaccttctgttccgttgggcttatggcaaaagtacggcacccctcgagggcggcagtccctccggcgctttgtccgccggcgcttgcctcctgggcaaacagcgattgtctaccaccgttctatccaaagggagccaacgcgcaccgtcgccatttttggtgcccggg

SEQ ID NO: 77547 - DNA, 80 bp, Heterodera glycines
aaacatttttttacccgaatggcatttgccattgcgtcgatgactatttcagtgctcagcccactgctgctccgtcgatg

SEQ ID NO: 77548 - DNA, 552 bp, Heterodera glycines
atggacccgagcaaaggcttgtacaacaaagacgaggataaagtcaccttggccattgattttacatgtgaatagcgtaatcattttgagaagaattgaaaagtgttgaaaatcgaagagaaataaacaagaattccgaataaaaacattttttgatttctattataaaccaaaaaaatttttatgatatcgaacgaaaaaaaattacaggttttctgaattcttttcggcacaatcactctcccgtggatcatttcgctcaaattattaataaaaaatgataattagagagcaattagaacatatttttctcttccatcaatcaaatgcccaaagtttttcgttgcccactgattgatgagtttctgctaaaaaaaattgactttaattgctaattgaattttgttaattatccagtgatttttcaaaatgaactgacggaatcttgcattttaattagcacaaaaagcggaaacaaaacttgtctaatggatatcgattttgtcttgcctgttaaatggaaggaaaatgcctatttttgaggatattaaa

SEQ ID NO: 77549 - DNA, 55 bp, Heterodera glycines
aattggagattgggggattaatggagattgggggataattagagcaaatacggta

SEQ ID NO: 77550 - DNA, 58 bp, Heterodera glycines
tttttttactgtgcccccttttctcattttttactattacattttaaaacgtccaaaa

SEQ ID NO: 77551 - DNA, 64 bp, Heterodera glycines; identical to SEQ ID NO: 51065

SEQ ID NO: 77552 - DNA, 369 bp, Heterodera glycines
atggttatggtgccagagagtgagtatttggcactcattaatttactgaaaggaagcagcggcgtatatcctcctcttgccgacccgttacagggcgagaaaacgctgcttgatgtacagattcaaaagaatttggctgatccaaaaaggaacgcagaaataaaaatgaagcgtcactcatggttgtacaaacgtagacaccagctaaaagatattattgataataaacctcaaaaagtaattgttgagagtggctcagttacagcaccaaacgttgcgccgtatatgggcattcaaaaacaacaaacaccgtcgcatgtgagcacaccacaccgcaattcggcttcaattcaatcaattggtgcagca

SEQ ID NO: 77553 - DNA, 345 bp, Heterodera glycines
atggcattccaatctctgggactcaacccaccagcatttcaatctctgggactcaactctccggcattccaatctctgggactcaattctccggcattccaatcactgggactcaacccaccagcatttcaatctctgggactcaaatctccggcattccaatcactgggactcaacccaccaactttcaatggcattccaaaacactgggactcaaatctgcggcattctaaacattgggactcaacccaccaactttcaatgacattccaatcactgaaactcaacccaccagcattccaatactgggactcaattctccggcattctaatctctgggactaa

SEQ ID NO: 77554 - DNA, 267 bp, Heterodera glycines
gcaactcgtatcggccgttttgtgaacgacgtgcggaagcagactgcccagcaatggcccgacttctccaaacgttgtcgtgcgctgataaagcaatggcagaaggtggcagagtacaggcccagctcctcctgcgaaggctcttccaatggcggcactcctcagcttgtctcgccggctttgaagcgcgggctgacaccacgggcgggggccgtgacgacgcccggcaaacgcacaacaccacatcaaccgcaacaacaactacgg

SEQ ID NO: 77555 - DNA, 1380 bp, Heterodera glycines
atgctctctgacattttgttgaacagtgtgtacggggagaatgagatttggcgcgaacgacaggtgatcatccgtgaggcggaagaagttgcgcagaatatgcaggaggtggtctttgaccatttgcatgccggtgcttacgccggctgttctttgtcccggacaatcctcggcacagatgaaaacattcggtgggccgtaagcagtaaaaggcgaattgtatcatgcatttttcagtcgtatgcatcgcgaacaactgatcgcttacattgggaaatattacaaaggtagaacaattaacggttatttttccaacaagggcaaaattgtttcggatgattttgtttaaagttatgaagaaaaaatttcaatttctttttcggacaagaaaacattgactaccgaatgatatatgactatcgaatcataatagtttgactcaattcggacaatctgaaaggaatttataaaaaccaggctgtcgcccagtctaccatcgcctttttcgcaacgatttcaaaaattaaaattatttattaataaatttcattttccattaaattttaaggtccgcgaatgctattggccgctgctggtggtgtcgaccattcgcatttggtcgaacttgccaagaaatattttggcaaaattgagcacggagatgaacatgtgctcgattatgagcctggaattttcacagagtcacatgtacacagcaaaaaataattcgaaatgttaagacgttcttttttagcaactcattgaggacaaacagatggagatggtctacggttcgttggcagtcgaaggcacgagttggacaagtgaggacaacattcctgtgcaagttgtgaacacggtgggtgacgtcaatgctcccacaaagtttctcttacacgtcaaaattctcttcagctaatcggccaattcgacagaactcactgtcggaatagttcacgattggctagaacattgagcccaaattccggcgttagttcattcatgtcatatacggtatgatttgggagacaattattaagatctttattgaaatttaatctttttgaaaataagttatacgaatgatcaggaacgacccctttttatacataaattgtcgtgattctgattaatagatggatctacgcccaaagtataaattattgtttagacttcctataaagacacgggcctgactgggttatttttctgtgccgagccggacgcattgttcaatttggcccagtccgtatgcaaggaatggcggcaactttgtgaagaggtggacgtggacgagttggaacgtgccaaacggtctcttctcaccaattctcttctgatgttggatggttctacgcctatttgcgaggatattggaag

SEQ ID NO: 77556 - DNA, 344 bp, Heterodera glycines
atgagcctaaaccgtgacgaaaactcgcagtcccctgtactcgatggaccgtacccgcgggctcaagatgacattgagtttgtggaagatgaagcaccggtgctgcttgaagtgttggatcgtctgtcacgagagtgtgtttttgtttctatttttaaaaatattttaaaattacacatttaaaattaattgttttattgtttagggaattcgtgaagtcaggcctgtgggcccggggcggtcgggttgtctctatgcctatgcaaaattgttatcgaccatttgtgggcaagggaattgttggtccaaacttcaaagttttgaattttggtcacactttgtaa

SEQ ID NO: 77557 - DNA, 1168 bp, Heterodera glycines
atgaagaaatccgttaccatctctgtccctgagcaaaaagaaattaaccagcctaatgcagaagcggagccaccaaagacggacactacaaaaaagcgcaaggtggaggaccgggagctatggaaactggcaaaaggaaagttcatgctagcgacatatttgtgcgcaggtaaaaatgaaaataattttaaattttgtgaaataaaatttttaagacgactgggaccgactgttccataaccaacagaaagttgcgcgcttgggtgatggccgttttgcggtcagctttgagctctgtgaagaatgcgcgtgggccaattgtcgcgcaaccgacatcattgcccctgtgaagaaaaagctgaacaatgcatgcgagacgaattttttgagtgatcgatcaacaatcaataaaatttttgaaatatttcttattgttgtcatcatcatcatcatcagcaagttcaagcaactccatcgggtagtggcggtcctcccctccttctcccaaaaatcgttcaattatgcatggcaaataggggaagtgaagccttatgcggtggcgtgcataaaaatgcgcggtaatattgatgttaaatgaaacgcgcagctgtccatatgctggaataaatgccgcccctttactcgaaatgccgccgacgaaaaatgttttggtcattccgttccgatcgttgtaggttgtgcgcacttttcggccaataagatgctttagaacaaggctccgatcctttggatgatttaaccgatcgcgcagcgacttgggttaacaattgagcagtttagagcaaaagacagtgacaagcaccatttcagaagaatgacaaatttgcaaaataggacacaaatttatactctaaaattttagccacgttcattaaattcaaatttgacaccgcccattttagcgaaattgaaacaaccggccaaaacccaaattcattttcgtcaaaatgaagaaatccgttaccatctctgtccctgagcaaaaagaaattaaccagcctaatgcagaagcggagccaccaaagacggacactacaaaaaagcgcaaggtggaggaccgggagctatggaaactgacaaaaggaagttcatgctagcgacatatttgtgcgcaggtaaaaatgaaaataattttaaattttgtgaa

SEQ ID NO: 77558 - DNA, 485 bp, Heterodera glycines
atgactgtaaaagagataggacaaaatgggagagcggaaagggttagagaggaaatagacaacaggaagggcactgggaaaagatacagtgcgcaaaaggatagagaaacgataatgtgagaaaggatagagggaaagtgacagctggaacggacagagcgaaatggacagtgggaaaaggacaccgggaaagggacagtgggagagtgacactggggaaagagacagcgggaaagggacaacgggaaaaggacaattggagagggacactggggaaagagacaacgggaaagggacagttggagagggacactgaggaaagggacagagggaaagggacaacgggaaagggacagttggagagggacactggggaaagagacagctgaaaagggacagcggaaaaggacacgacaagggtaggatgatgggatttgcgcgagaagcaatagagcgtgtgtatgtgaagaacgaatgttattaaa

SEQ ID NO: 77559 - DNA, 1423 bp, Heterodera glycines
ttcatgtgtagtaaatatttccgctttaccaaaaatgtcaacaaccaaaacaacgaccaaaatcttgatgacttactactatgaaatgattctgttgggtacatttaataacattcgttcttcacatacacacgctctattgcttctcgcgcaaatcccatcatcctacccttgtcgtgtccttttccgctgtcccttttcagctgtctctttccccagtgtccctctccaactgtccctttcccgttgtccctttccctctgtccctttcctcagtgtccctctccaactgtccctttcccgttgtctctttccccagtgtccctctccaattgtccttttcccgttgtccctttcccgctgtctctttccccagtgtcactctcccactgtccctttcccggtgtccttttcccactgtccatttcgctctgtccgttccagctgtcactttccctctatcctttctcacattatcgtttctctatccttttgcgcactgtatcttttcccagtgcccttcctgttgtctatttcctctctaaccctttccgctctcccattttgtcctatctcttttacagtcatttattatacttttactctcctcatcatcgaatattattaatgttcgcaaaacaattaaaaaattgttattaaacaaataaaaaataaaaataaaaataaaattcaaaataaaaataaaattaattaaagagattaaaatcataataaaataaattaaagtaaattaaattaaaaataaattaatattaaagttaaattaaataaaaataaattataaaattaaataaattataactaaattcaatttgttcgactataaataggaaaaattttctcccattattcatttaaaatgttttttccaacaatcaaaaattgcgttgctgttgtagacaccaaaacaactctcgatattgaaaaaatttatttaatatcaccctccactaaatataatccacgtaaaattcatgctgtaatcatgaaagtctataatccaaatgctaccgccataattttctcaactggaaaattcgtatgtacaggggcagctaatgagaaagaatgtaggcaagctgctgagcatgtcacggaacgaattaggcaatgtggctaccaagaggcactaatccataaatttgatgtgaaaaatttgattgcgactgctgatgtagggttccatataagattaggagaactttcagactttcttggtgtaaaatgctgttcatttacccccgaacttttccctggactcgcctacagaaacataaatcccaaaatgtccataattgtcttctcaagtggaaagctaaattttacaggaaacaactcgattgatgatatcaaaattgcatttaatcagttttatccgattttgtacaaatttatacattca

SEQ ID NO: 77560 - DNA, 1443 bp, Heterodera glycines
atggacacagcgacgataaatcggattctaacaatgaacgaaaaaacaaaagaacattatttaggatgtttcccatgcaacaaaatacccctaaatatcaacaaattcccatcagtattagtggcgaacaacgacccatcaaataaggaaggaacgcattgggtttcaatttttatcaaagattataagaccgtgtactactttgacagttttggacgtacacctaacaaatgtattgaaaaatttttaagtcaatttaagactgtggaaggtaataaaactcctatacaatcaattattagtgagaattgtggatatttttgtatttattttgtatattgtatgtgttcaggaagtgttaattttaaaagtacttttttaaatctattaaaaaagttaatgatacaatatgatcccgacttctttgttgtaaattttgttaagaaaatgataaaaagtatttaaggaatttttcattaactcatttataaaaatggaccgattagacacaataattgcttctcttctgaattgcagtgcacgtaatttgtgcgatcgtctaaatcatcctgatgaaattcaaaaggttgaaaattttctcaaagataaaactctacaaacaacttataaaaatcaaattggagaacataaagaatttatttatggcggaattacgaaggataatgctcgcaagcaaatggcgtacaacggattcaagaatgtgaccgtcgaccagcacttttatgtacggcatagaatttgtctccgttatgcaaacaatccgtgtgtaatagagaagaataagaatgggcacgatcgattctatccgcttgagcttgtgcgaatgattgaaaatgatcaagctgatatttatttgggtcaaaattttcctaaagttgtcccttcagcgcaagaaagttcaaataatgcacattttatcaaaaattattatgactcataccctttgtggtgaatgtataaatttgtacaaaatcggataaaactgattaaatgcaattttgatatcatcaatcgagttgtttcctgtaaaatttagctttccacttgagaagacaattatggacattttgggatttatgtttctgtaggcgagtccagggaaaagttcgggggtaaatgaacagcattttacaccaagaaagtctgaaagttctcctaatcttatatggaaccctacatcagcagtcgcaatcaaatttttcacatcaaatttatggattagtgcctcttggtagccacattgcctaattcgttccgtgacatgctcagcagcttgcctacattctttctcattagctgcccctgtacatacgaattttccagttgagaaaattatggcggtagcatttggattatagactttcatgattacagcatgaattttacgtggattatatttagtggagggtgatattaaataaa

SEQ ID NO: 77561 - DNA, 467 bp, Heterodera glycines
aagttgatcaatttcatcctgaattgactgttttttctgttcatcagtcaaaaattgttgttgttctcttaattcgcgaatttttttgtaatcgtcttgaagcccttcatattttttatgaatatgttcccagtaatctgttggatgactatcaaaaaatggctcaacgtaatccttattttgttcatagctcgtcctctcatattcttcagctgatatttgtaaatcttttttcaatacagccttgttaaaagcattcaaattttttcttctgtgtttcattgctgttctcattcttaatgcttcctcattcagagcctgaattgttctaccatctgttactccttggtattttttcatatggtcttgaatgttgaataaatctcttattaattctaatcgaacttcatttaatttctccactatagtgaacagaatacatttcgaggaattcttgaccagttctc

SEQ ID NO: 77562 - DNA, 1106 bp, Heterodera glycines
atgtcaaatttattttacgttcttttacctagtgactctcctggttatgacaataagcctaataaatttagggttcatttgcctaggaccctaacttttggaggtcaatggttgtgtgggttgcacagtataatttatacaaattcttggcccgccattggtaccacagagaaccaatggattaaagtgcatttaaaaaatggtgataaaataaaaattgatattcccgctgggtcataccaaaatgagcaagaattggaaaatgctataaatgagtcgataaaaaatggtataaaacaaccggctacaagagttaaaagacaaacggaatatggagtggatttgttttttcattataatccagatgattactgggaaaaaattgaggaagaaaggcaaagatataaagaattgttaaaattgatagtgacaaagtcaagagaacgtgatgatgagacggacacgcataggaagagaaaaatagaggatgaggaaattgaccctctccaaaatcaatcattgactaagaaagcaagaatagaggcgcttgaagaagcagcaaggcaaagagatgacgggaaggaggaaaaggaggagagaactggtcaagaattcctcgaaatgtattctgttaactatagggagaaattaaatgaagttcgattagaattaataagagatttattcaacattcaagaccatatgaaaaaataccaaggagtaacagatggtagaacaattcaagaactaaatgaaacagcactaaagatgagaacagcaatgaaacacagaagaaaaaatttgaatgcttttaacaaggctgtattgaaaaaagatttacgaacaacagctgaagaatatgagaggacgagctatgaacaaaataaggattacgttgagccattttttgatagtcatccaacagattactgggaacatattcataaaaaatatgaagggcttcaagacgattacaaaaaaattcgcgaattaagagaacaacaacaatttttgactgatgaacagaaaaaacagtcaattcaggatgaaattgatcaacttcgtcgtcttgtcgattataggaaaaaaagatttgcagcgttaga

SEQ ID NO: 77563 - DNA, 623 bp, Heterodera glycines
aagttgatcaatttcatcctgaattgactgttttttctgttcatcagtcaaaaattgttgttgttctcttaattcgcgaatttttttgtaatcgtcttgaagcccttcatattttttatgaatatgttcccagtaatctgttggatgactatcaaaaaatggctcaacgtaatccttattttgttcatagctcgtcctctcatattcttcagctgttgttcgtaaatcttttttcaatacagccttgttaaaagcattcaaattttttcttctgtgtttcattgctgttctcatctttagtgctgtttcatttagttcttgaattgttctaccatctgttactccttggtattttttcatatggtcttgaatgttgaataaatctcttattaattctaatcgaacttcatttaatttctccctatagttaacagaatacatttcgaggaattcttgaccagttctctcctccttttcctccttcccgtcatctctttgccttgctgcttcttcaagcgcctctattcttgctttcttagtcaatgattgattttggagagggtcaatttcctcatcctctatttttctcttcctatgcgtgtccgtctcatcatcacgttctc

SEQ ID NO: 77564 - DNA, 337 bp, Heterodera glycines
tttcttaggagtgctttttgaaattttttttgtcgattcttaggggtgtattttttgaaaaaatttttaggtcgattcttaggagtgtattttttggttttattgcatttttgttaaagaatttttcaaaaaatgtcgaaatagtgaaaaaatagtgacaaaacgccaaaatagtgatttttaactattttagtgacgaagtcgccaaaatagtgatttttaactattttagtgacgaagtcgccaaaatagtgatttctagtgcccgataatgacatcagaatcgaaaatttttaatgcagaaatgcgttttttgagctcctttcttcaaatcaat

SEQ ID NO: 77565 - DNA, 120 bp, Heterodera glycines
acacaccgtttcaaaaaacgagagatgaaccaataaatagagagtgcggagaaaaaaacatctctctttttggcgtactattttttatctctgttaatagagaaaaaccgaatttacttc

SEQ ID NO: 77566 - DNA, 59 bp, Heterodera glycines; identical to SEQ ID NO: 55001

SEQ ID NO: 77567 - DNA, 1078 bp, Heterodera glycines
atgttttggaacagatggcacaatgaatatttagcagtcttttgggaccgaacacaatggcaacataaaggaccaaaatcacaagaaaaacgagtacctaaagaaggagaagtggttttaattaaagatgattttcaccctcgaaacacatggaaaattggaaaaataattagtttaaatggccaaaaaggagcaatcagaagtgcacaaattaaattagcaccaaaaggtaaagaacaaaatggaagaattatagaaagaccaataaataaactttattcgttagaggtgaataaaactttaaaagagagtgaggaagaagagaaaataagacaaatttagaaattaaggataaaatcagtgaaatgaataaagaaaaagaaaattatgaaataaagaataatatgcatccaatgatgacgagagctaaaacgagagactttttgacaaaaggaaacattggattaatcatggtattattattaatcagtaatgcgaaccgatagaagaatgcaaattaattaattgttggttttgcttagagaaatttgcaaatcccgactgcatgatcgtggaaacacgaattttaatgggcattggcctagcatgtattttgtcacttataatatgcataattggaaatatagcaaaattaataataagttaatggttgattttaaaaatagccctttatgggccttattctgcaattaaatttttatggaaattaaaagacaataaaaataacgctaatgagttggaaaagggcttattaaatgaaataagtaaaaaggaaaaattgcaaaaaagaagaaatcggagattatttaaattagccaatatcacattggttttaatttatctgaatacaatcacaaaaatagtaaatggagcagcagaagttgtgtccatacaatcaaattcagaagattgtgaaagaaaatctaacggttcagtatgtcgaattcgtgggacaacagaactaacaattttgccagctggccaaaaagtgaccctcgctttaaaagatgataaaggcaaattagccgggtcattggatttgttcgacattgggtaa

SEQ ID NO: 77568 - DNA, 405 bp, Heterodera glycines
atggcattcgaaagaggaaaattgctcacatgccaattgaggtggaaaataaaactttttcatatgtgcatttaactccaaatttaggttcaattattaatttatggggcgagaaattataaaaaataaaaaacattaaaattttattcatattacacattttgtgcttttagtgcaaaaaatccactttttcttccgaatttattggcattatttattgcgaagcataagaccaacaatttatttttggcacaacaataaattcatttgaatgttttggcattgtctcaacattcacttaattgaatattctcgtcgcatgcaaaaacggcacaattggccaaacattggccataattattattatcattcaaatgcaaatgggaaaaaaagctgcagcagaca

SEQ ID NO: 77569 - DNA, 801 bp, Heterodera glycines
atgttttccacaaaattttcatcctttttgcttctttccctgcttgtttgcattgtttacccaacaaaatcttttgcttatcgtggcgatggttcttttgtgggagaagcaaaacacgaaaaaatggcacgtaaattggtcaaaagtgggctgacacaggacgaattcgagcaggtcaattggggaacgaaataaaataatttaaacgaataaattaaagctttttttggacaatggggtatcaaaaaagaaaacggtgcccaaaacctttatgataaagccgttttttgttttttttttatttttaaatcttttttggtattagatcttcaattttgctttcactaagtttgtccgtgtaccttttaagaaacgaaggaatgaatgctcgttccaaatgtttaattaatccgatcctttatcagttggcaaatttaattgcccattcatttgccattcgatttttttacaattttaattgtcctttcttcagacttttttgccattattgccaattgaacttgagcagaagaaatttgagcgacgcattgatcaaatggaaaagcaactgatcaaagtgatctcctccgttcacgatggcaattgtatgacgaagaaaagtgcaaaagaagaagaagaacagtgaatgaatggaaaaagaagacaaacaaaaaacgaaaaaatttgatcgaaaaaatctaaaaattttctcagtattttatggcaaaatttttgtagcaaaacatttatctcccaatgcttaacgccaattatttgtatcgtgcgaaagatagacgcaaa

SEQ ID NO: 77570 - DNA, 995 bp, Heterodera glycines
atgatttcaaagaaggtgtggttgaacaaacggaccaacgaaatactgacattggagaaagaagaggactatgatgaaaacacggagaaagataaatatacttatggcgattggctgttgaagcgatgccaaattgggggcacggcgacggttcagtgggaggaagaaaatccgagcattttgagcaatgtcaactttaaattttatagtggcacgaattgcattgggtgagtggcatcaacttttgctataataatcaaatttaaattgcaattcattcaggccattgtctgcatcaaaggcgggcaattgtatgggcgaaaaatgataaaaaaaaatgagatttttgggaatttttatgcaaaaagacacttaatttttccaatttttaacacatattttagcacatattttggcatttttggggtttttagtagagtgccacgggaaagggaccgggatcgaaaaaaaatcgaggtcccggtcccggcttctcaggtcccggcaagtcccggtcccggttttggcaaaaattcccggtcccgtggcactctagtttttattacatatttcagcattttttagcacatattttattacatatttcagcattttttagcacatattttattacatatttcagcattttttagcacatattttattacatatttcagcattttttagcacatattttattacatatttcagcattttttagcacatattttattacatatttcagcattttttagcacatattttattacatatttcagcattttttagcacatattttattacatatttcagcattttttagcacatattttattacatatttcagcattttttagcacatattttattacatatttcagcatttttagcacataaaaatcccatccctatttattaaggcgttttagggatcaaaacacgtaaaacttaatctaaaaacttagttttggtcatttaaatgattattaaataaa

SEQ ID NO: 77571 - DNA, 1240 bp, Heterodera glycines
atgattaaaattcaaatagcgaatgtttgtcgcaaaaattggccaaatttcaagtgcaaaatcatcccaaattggctggatatttttggctttataggggtatggcatatacaactccaaattggtgtctttgccaaaaatttgttgattggcacggagaaatttgatgacggaatggtcaatgtacctggtaagggtatgcttttattagttaattattcgttgatttgtttgatttactcaatatgaaggtcctcaaagcggattttgttgggcagctgatagtctggcaaaggaaattgcacagatttgaaaggaaattgcatagatttgcgatcaatccatacagataattttggttctggtccagcaccttttgaattctgatttgtctccaaagcgtcaattggcttttgccatcgaaatgtttgttgaccaacacattgaaacgtggcgaaattagtgccaattttaagccgagttgagcatggtcaaaaagtgggagaatgtccatcaaaatgtcgttgcacacccaactgaaatccgatttttgaggccctgtaactctcgaaggaagcaaaatgcaccgctaaaattaaaaatcacatagaagtcgaccctgctctatccaatggtatatcgtttataggcattttctgactgacagctcgtaatgttccctgttagcgataagacaattaccaaaaaagttataacatgaaataacaaaaaacccaaaattttggaagttttttcttaataacttttttacaagctaaaacttgggcgctggcaccgaaacgtccttttccggttcacccccccccccgccattttagaaaaatcttagcgattttttggaaatttttttttataaaaatgaaaaatcagtaattcatatttagaaaatcttagcgatttaactaagattttttcttgtaaaaaattctaacaataagttggtaaatcttttggcattcctgacttatatggattgttttaaaattgattagcttatagcgtggacaaatatggtaccattcgaaagattgttgccaatttgtggtgtttatttccaaatttgtttagcaatttcgccgtgccaccaatgccgccagctacaaaattcagtttactgctcatgcgccgtcaacgtcaaccatggtgccatttgaattggtgaatgaaagaacccgggaaaagctgacattgaccaaagcagcatacgaccgatggataa

SEQ ID NO: 77572 - DNA, 2455 bp, Heterodera glycines
atgtgtgatgatcaaatggaaaagtaagccggaaaagtgtttcttttatacaatggaggatagagaagaagaaaatcatactcctttttttgctaaattttttgtttcttttttggttgtcatcattataaaaggaatgcattttatcagtttcgaccattccattcctcattcaacaacaacagataatgttattcttattccctttgccccttattttgcttttgctcgtggccattgttttgctcagccagtgctgcggttgtgtgaaaaaggtgtttaggaagaactttcgttttatcaaattaaaaatcccttttccctttttgcagaaaggcgacaacaaaacggacagaggcgcagaagcttcacccgaaggcgacagcaaagaagaacagccaactgacaagggaggaaaagcaacaacaggccgcagcagcaaaccagagacgaggccgagggaaacgccgaccagcacaaacaacaggcgtcagcaacaagaacaggcagaaggctcagggaggaggaacaaagttggtctaaaaaattcttgtcttaccattcaataatttgcactcttaggcactatggaagcccgacaacatcacgacgtccaaaacaaacatcaggaagcagcaaaacggacaatccaaaggacaaaaaagaagggacatcaaaaggcggcggcagtaccaagaacgagccgaatgccatggtagatgaagcaacttcaaaaggcggcagcagcagcaccaagaacgcgccaaaggctcaggtagatgaagcaacttgaaaaaccggcagagcatcaataacccaacaaattcccaggtcggcccgacagcacatcgacgtccaaaacaaacatcaggcggcagccaaatggacaagcagaaggcccaggaagaaggaacttcaaaaggcggcagcatcaacaccaagaacgcgccaaacgctcaggtagatgaagcaacttgaaaaaccggcagggcatcaataacccaacaaattcccaggtcggcccgacagcacctcgatgtccaaaacaaacatcaagcgacagccaaatggacaagctgaaggcccaggaagaaggaacttcaaaaggcggcagcatcaacaccaagaacgcgccaaacgctcaggtagatgaagcaacttcaaaaggcggcagagcatcaataacccaacaaattcccaggtcacaacgaacgcgccgagtattgaccaaaggaggaggaacgacttccaaaggcgacagcaaaacggacatgccaaaggacaagaaagaagcaacatcaaaaggcggcagcagcagcaccaagaacgcgccaaaggctcaggtagatgaagcaacttcaaaaggcggcagagcatcaataaccaacaaattcccaagtcacaacgaacgcgccgagtattgaccaaaggaaccggcagagcatcaataaccaacaaattcccaggtcacaacgaacgcgccgagtattgaccaaaggaggaggaacgacttccaaaggcgacagcaaaacggacaagccaaaggacaagaaagaagcaacatcaaaaggcggcagcagcagcaccaagaacgcgccaaacgctcaggtagatgaagcaacttgaaaaaccggcagagcatcaataacccaacaaattcccaggtcacaacgaacgcgccgagtattgaccaaaggaggaggaacgacttccaaaggcgacagcaaaacggacaagccaaaggacaagaaagaagcaacatcaaaaggcggcagcagcagcaccaagaacgcgccgaatgcgatggtagatgaagcaacttcaaaaggcggcagagcatcaataacccaacagaacgcgcctgcccaaggagaaggaccatcttctgaaggcggcagcaccaagaagccaatcacagacaaaccagattatatgaggcaaccataaactttcttggaaaatgatcctgtatttatgttatttgttgtgataagttataattgatcccgtattatgttattgttgatcatttatgattgatccgtattatgtatttattgttcattgtgattgatcccgtattatgtatgttttattcactcatatacgaattataaaacccaaacccagggttgccagatctgaggatttatcctcattttgtggcttattgatatgtcaatgaggattttttttgaaaatgaggatttttgtggctttttgaggcctttgggaaaaatcctcagaatcttttaaattttgataaattggcataatgaaccaaaagactgtattttattaatttgaatgctgtttgggtatttgggattgaaaaattgaagattgaacccgattttggacataggcgccaatgtcgggacgcaaatgtgggataacctttaaaatataacatttcatgttcgcttaaaaaatttatcaattttttaaaaataaa

SEQ ID NO: 77573 - DNA, 91 bp, Heterodera glycines
ggattatttttcaaaacacctcgtagactgggggataattggagactgcgggattaatatagactgggctataattagagcatatacggta

SEQ ID NO: 77574 - DNA, 1647 bp, Heterodera glycines
atggttcgcaaaaagcaaagtttctcttcggaaacaaaagataccaatgtatcttcattgaataaaggggttcaaagctcccctgaaaaaaagcggtctgaaggggttcaaagctcccccgaaaaaaagcggatagattatgaagaaggggttccaagctcccagcaaaagcggatagtttttgacaatgttcgaacatatgaaaagcaaagcaaagacaatgttattttgatcaatttggatgatgaagattttgaaccgtgtacaagtaaacgaactatatgcaatgtagtgtccgaacaaaaaattgatcaattacggagagatagagaaaaacgtgtgagatatagagaaaatgaagcagaagcagaaagggataaaagaaccaaacaacatcgcttgcatatgcaaaatgttagggaaaatgaaatggaagttgaaaaaaatgaaagacaagaagctgataaattacgtaagagaaacattaaagaaaacgattctcatttgcaccaatataaggctaaaaatactaaacaaataagcaaggtttcttttggttttatgaatattgcatgtacgttttgtggtgctttacattgggcttaccaaaaagtacaaggaaaaaacagttttgatgattgttgtaatcatggaaacatttttttgagtgaaattccagaaccacctcaaatacttcgtaattttttgataggaaaggacaaaaaaagtcgaaatttttttgatgggattagatatttaaattcgagcttggcatttgctactatgaatccaatgcgtgtaaaacttccgaattatggtccgtattgtttccgtattcacggacaaatttatcacagaattaacattgctttacatccagacgatgatgaatcgccatctcatggtcatttatttatacttgatccagaagatgcaattaattccatgaaacaaaacaatcttaatgtggatacggatgttttggatcttttatataaaactataaaagaaagtagtccatttgttgacggtttagaaatgatgattgaagaagaaaatgttcaaaaagaaattgctctcaaagaaaatcgaaaaccttatgaggtccaattattattatcggataacaaaaatcttgacaaaagaagatacaatcttcctagagcaaacgaagttgctgcagtttttgtctgtgattctgaaggtataattcctgaacctcgcatagttattaaagaaaggggaaaatctttaaaaatattaaattgtaattgtgctgaagcagatccacttctttatccgattttcttaccttatggtaacaaacaatggagtcctgatattcaaaataaaaaggaaaaaaggatttcaagaagtcaatttattagatggcaattagctattaaagaaaatagatttaactcatttcttcatggtcgaaaattgtttcaacaatattgtgtagatcagtatgttcgaatagaaaatgatagaatgaaatatataagagagcaccaaaaagaattatgcgcggaaagttattttgaattagcagaatggttggaagatgaggatcaaagagaaaacaaaaaattgacaaaagtaattttaccatcaagagtaactggatcacccaagatatattga

SEQ ID NO: 77575 - DNA, 193 bp, Heterodera glycines
atgacaaaggacacccacggcgattcgttggtcgaagaaatcggagacatttcaccgccgcgagggctttcaaaatttgcctacggcaagaaagagaaaatagaagaggacgctgaacaaaaagaacgacatcaacaacaacaacaaaggaggacaaatggaaagacaaagacaaaggaaaacgatttggcag

SEQ ID NO: 77576 - DNA, 1210 bp, Heterodera glycines
ctcttctatgtgttggtgaatgtgaattcgcatttttcactgcgacaaaattcaaaaatgcacaattggacaatgcacggaaagggaaatgctgggattggaagcgaatggcatttggaacattttatgattggattttaagtgctaaaatacttaacgaggaaaagaaggacgagtccacttgcaaaagcaaaaaggtggaagaaaggacgaaaataatctcattgtcagtaatattttttacagctctttttaacctttcattttgccaataattggatcaaaacgatggaattgcctgagggagaaattggtgtaaatgtttcatcgcctgcggaagttttctctgttcgtttgggatgtcaagcacttgtgtaagcaaacattttatttatttcttttattttattttaaataagctattcgaagcgccgcattttcactgagtctctaaacgacttaatctcgaaaaagtgccaaaaacttgtttgaaaacatacatcgctacttgcctttccttcttggccttaggtttttaaatttgtgtataaaaataattttacgattaagttaccatattctttgaaaaatacatgtaatttattagtgcaatttcaggtgctttttacattatcttttaataccaatttcagaaggggacctatcagaagaatttggcattgtcttaaattcctcccataattttaaagaaactaaggacctcctcctttcttcatggaaattattggccatcgctgtgcgttttttccggcacttcgttcggtgccattcatttctttcaacccgcaattgggcctcaaattttgcgtacttttgcgggaaacgaagttcaattaatcgctttttccgcctttaactttctttttagggaatgccttttgccattcgttgcgattccaatttccgttggcttttttccgtcggcgacgatcgctcacttcgcatttggaacattcaaaagggtgcccaagtcagaatgagtgtgccaatttctttttttacttttccttctctttagcttttcagcaaatttggacatggggccaggccatttgcattggaaatttgtgagggcgagcgaatgattttcaccgctggggtggacaattacatatgcatttggcgttggtcgatggatgagaaaaaaggtgccatcaaaaacattttctgctctaaaattgaaaaataa

SEQ ID NO: 77577 - DNA, 195 bp, Heterodera glycines
ttaaaattgtttatttttttcatcaacacaaacataacatttgggaaaagtccgagtcagcgcatccaattgatcatgtaaaaataccaatgcttttgcatcaagcaaaattgtctgctttcctccatctgttgtatttatttccatgagaatttcgtatttgttattcaaatgcgactcgtcacgagttgagac

SEQ ID NO: 77578 - DNA, 1608 bp, Heterodera glycines
atgccagcagcaccaccagcagcagtagcaacaacagtgtcaactagagtagagcgggaccgggaattttgggcaaacccgggaccgggaccttttcgggttgaaaaaccgggaatttttggcttggaaaaccggggaaaaacccgggactggtcccggtcaaaaccgggacctcggtactcagttgtccgtgttttggtcccggtcccgctctactctagtgtcaacgacactgatgatgacgacactgatgctgctgctgatgaggagggctccgatggagaggaggaaacgacggatgaaatcgaggacaacggcgagcagcaaccgaacgcggcgccgacgccatccgccgcttcgtctggtgagcaaagctttggaaatgtgaacaccagttctcggacctaattccgtaaaaacgaagcatccctacccttcccctttcttccaacaccaacaattaaattccatccaattttcttcctcattatcctaatattgttcatgttttcagcctctacgcatcgtcgacgctccaaatcaactcacaaaaaacagaaaaaggcatcaaccgctgggcgtggttaatgtggccactacagcaggcacatcttcttcatcgtcgacggcggcgtcttcgtcaaaaataggtccaatgaatgataattaaaaaataaactctttaatcatttcccaatttggtctttttcatgcgctttcattttcagtcgacacaaagtctgggcccattccatcgccgctggaagcgtttttgaaaccgcagctgaacaacgcgatgtccgacccgtctcagaactgtctgattctgctgcaagtgctctacgggctgaacacattttggtggcgaatttttgatgcaaatgatgccgacactgatgaggacggcaatgatgctgctgctgatgaggaggagggctccgatggagaggaggaaacgacggatgaagtcgaggacaacgagcagaaacaaccgcaaacaaatttaccaccaatcacacacagaccgatcatcgccccgaggtttgatttttttaatgccatttttatttttcattggttttctgcgaattattttaaaattatggctgacaaaacagcaataaaagtctcataattttcagtttcttctactcaccaaagctgaattccaaagtgacgcgtcaactgtctgactttttgacggttgcaacccaacaaataccgaaatgttagtttgtcttttttttaatttagtgtcattttttatttttttttagggacattggacttggttcgagcggtgtaagtttcctaattcttttttaaactgttaatcccatggaattttcctggtgttttttttccaaacttttttcaaatttcgtccaatgtatccttttcagtccgttcatcttcaacttctcctcccgccattccttcctgttttgcactgcgtttggccgtgatcgggcactgatgcatttggtgaacgagacgagcaacgacgagcaggacggcgccgggcatgacaccgcctcgcggctgatcactcggctggagcgccgcaaagtgcattttgtgccaagtttggttcaaatgcttatctaa

SEQ ID NO: 77579 - DNA, 621 bp, Heterodera glycines
atggacaacagtgaatgcaaaactgaaaaggaaatggatctgaaaccggaggaaaaaggacatggagaggaaaagggcgaagaagaaattgtttttctcggcatgacgataaacgaaacgcccaaggatgaaaagaaggagctaccgccttccacgagcagtggtgatagccgaaaacgacgtcattcatttgatgggtccgctacctcaatgttgggcgcaatgatcaaggcacagggcgaagcacgtgccgaatggtaaattgtgaaagtggcataacatagatgcctcctattaaaaacaggctggatgcgttggaaaaaaaatactccaaactggaggaagaaatgggtgtggacgacaatgcctcggacgtggtcgattttggggaagactctttggacaccatactaaaaaagtattagcaaaaataaactgcgttgactcgatcaaccaattttttttttttttttgtgtagggttgaacgttctgaggaaaaggttcgtgattgggaggccgcgcattgttccaatggtaatcagatgatgatgatgattattacaaaattaaaaaatagctatcgactctcatcgagaaggggcccagagttcttcaactga

SEQ ID NO: 77580 - DNA, 898 bp, Heterodera glycines
atgcgcaatgagttgggcgcaaatcgtgtgatcacaaagcctcaggaattttacaagctcatccttgaccataaagtcgtaagtagtagtagtagtatttgaatgctcgccttaatttattatggaaattttccaacgcaggaaatttatgccataattcccctttccgatgaagtcattcgtgtttcgtacaggaccaaaaaaattttatcgatgaacattcgtccagcaatatcgtgctcagtctgtggaccactagttagttttgtcaacactagcattgctcccattattattttaaggtcgtgcaaggttgaagttactcgattatatgcagcaagtgtacaacaccgaaggagcagaattgctttatacggtagtttgtcttgtgttttgtaacacaattagcaccccgttgtttaggacactgacagtgtcattgtgaagcatagtcgtgatttggcgccacttcaaaccggcgaattccttgtccaaatgtcagaagaatacaccggattttccataaaaaacttcgtttgtggaggtacatagcggcgtatagatttgtaatagacatatttctttccgcttaggagcaaaacaatatgcactaaaaatggttgatgagcgaactggcgaaatccgatatgtgcaaaaaattagaggaataacttttgacgtgcaaaacagtcagaccctacagtttgagcattttcgtcagaaagtgttgaactatggacgtcaaggagaggagccagccgtgttccattatgataaaattcaaccgactcgtgcgagtcagattgtgacacgtgagcagcgcaagcgatatctgcccgtctgccagaagggaattatcactgatgagcttgatgttcttccttttggttatcaatga

SEQ ID NO: 77581 - DNA, 519 bp, Heterodera glycines
atggctgagctggacaagcttggccaaagtgatggtgaagacggaggaattggtgttggagagaatagtggtgaagcgctcgacaaacgatcattgctactcagcgaaccggtgcaaatcactgtgacctgtttaactccacctaccggggcgggccgaccgcgcttctacccgtatcagcattggggctacaatgaggcgcatcgcataaggatcagagattgggaagacaattattgtatgttccacgcgcttattggtgctcgagcgtaccacgaccctatgctgttcaacgactggatgttagctgatcaacagccacaacagcagaatttggcacgactgatgctgatgcaggatttttgtgaaaccaaagaagcttttcgccgtcttatcatcaatcgagagttgatgagttcctcagtgcaccgcctaatgcatgcagctggcgtacccgaaggccaacacgcatatggcatggaccatttgcaaaccgttcaacactattgggttcagtga

SEQ ID NO: 77582 - DNA, 504 bp, Heterodera glycines
atggaacattgccaattctgtgacagacgttttttaaacaaaaaaggcctcggtgttcatatgcaaatacataacaggcagaagtaaaaaattcataataaattgaactttttgttctttcttattaagtgccatgtttcgttgcaatttgtgccaaaagggatttaaatcgaacaaatctcttagaaaacaccaaaaacttcatggaggtatagtaggcaactaaataaaatgaaatgattttaccctttgttttcaagaaatcgaaatcaaagaaaaatatttttgaaaaataattttaatttaattttcagaaaagcaatttgagtgccgcatttgtcataaaaaattctctgcagcaaacaatatggttgtaagtaatttaaaagttagtattagggctatgcatttgattgtctttctaggcatatgcttaaaattttagcttattagcatttctgcatcaaaattaacttttggttgaatcttttagagcctattaaa

SEQ ID NO: 77583 - DNA, 1432 bp, Heterodera glycines
atgagcggcctctcccgatttcaactctccactgctactgctggccagcaaaagcgtaaaagcgatggcgccccagcaaaaacgaaaactctgaaggaagtgttggacttcaaaagcgccggagtttttcacgtcacggcaaaagtcgtgaatttgcaatataaaatttataaggttgagttttgtgtttttagcgcttttttttaattttgaattttcaaggcctgccccctgaaaaataggggcttcttctgccgaaaaaagttggatgacgaaatgagatgcacttcatgcgatcacattgtgaaatcgcccatgaaaagcctgttcctgcgcgtcgaaatcgccgatcgtgttcagccggagagcagtgtggtcaccacgatgttctcgtacgtgggcgaaaaatacctgggaataaatgcgcttgatgttgacgaattgagcgaaaaagagcccgaaaagctcgcagaaattttggaggcaaaattggacaaagaggtggtcgtcaaagtgcaaatcaaggtcggttgagtgtgtgccgctaaatttgtttttaaactttgtgtttaatcaggagtccaaaggccatttcgaaggccaggatttcgattggataatcatgtccatgtgcgcggacaacaaagatgtcgaaaaagaggaggaagagaaggccaagaaaaaggtgaagaaagaggatggagaactgaaggaagagtcggaggatgacgatggagatgaaattcagctggttggggagacgaaatcgaccagcaccgaggccgtgaaaaaggcaaaaaagaattgacaagagtgctgagtaatgatgaacctatcttaaatgatattgatgttgcatttagcatagaaaaaacaattgttaaaaaaatgtttgcacttgtaacagccgacaaaaaaaaaaaggcatagagaaattgccaaattatttgaaacactctgaaaaaaaaatttgtttttcaccttaaataacagcacaatgaaaaggcgctgggactttcgttcaatgagcttttttgagcagcccagcccacctgaacagtcgtcggctttgtcaacatcacaacagcaacaaacagatgacgataatgatgaacaccagcagggcgagggacgcgggactagagcggaaggcggcagccaatcgaccggaaacgacctttttcaacaggtctcacactcagtgcacagactggagcgcttttcggtgtcacgacacatcacagagtttgtgctgaatgccaacgttgaggaaccggacgaagtcttgcgcggtgcattccaaatccttatggaacgggcaatccaaaatgcagagcagcaaagtggccggaaagttctcaaaattggtgttacgctacagggaagaggtttgattggtcggctggtagcccttttattccttacctattaa

SEQ ID NO: 77584 - DNA, 332 bp, Heterodera glycines
atggatgagtcgaaacgggaaaagttttcccctcaaaatgatgatgacgtcatcacaattggagacaacaacactcaaacactgcttgacctgcaaccggggccctcaaaaaggggacgcaagcctcgcttggacaaaatccatgaggaaattgcttccgcaatgaagaaagcaaaagccatggaagctgaaggtttggctttttctgcaaatttctttaaattagccaaattttagtggatgaatcgcccaaaaaacaaccgaccaatgtgtttgagtacccgaccatattttggaaattggcccgcccaaaggttttggctaatatttaa

SEQ ID NO: 77585 - DNA, 3452 bp, Heterodera glycines
atgaagcgtgtgcggcaatcggaaaagttgggcgaattcccggagattgagttcgccgtcaacacaatgggcgtcacggtgtactgcccgcggcacctgcaaacgcctcggtttgtgccatgggaccagcccgggcggtgctcgagctgtagaagcggaactgttgagctggactacatcatccagcccgagggggtgaccatcttttcgaatcggctaaagacagacggcgagaactttgtgccgtttgatgcaattggtaagctgcaggtgtatgtcagagtttgactcttttcttaagtggactttgccgatcgtgcgtccgcattagggcccggaataaggtgttcacgctgccgctgcgacacccggaggtgcacgccgccggcccaagcttggaagacggcgtaaaagaacaaaaggaaatgactcagatgtcataagcacttgtccatttttctttctattgttgatattctgatggactacccaagaataaatgaaagtgaactcgcttttcccatcccttcggggattattgtcagcggtccgtcctcatcgggcaagacccagctggtccttcgcctgttacggcatgcaaacgtgatgtttgacccgccgcccaaggcaataggtatgtgcaaagggggtttctgtgcagtgggctgttgctatttagtatgggcatacggtgagtactcgacgcagattcccgatctggagcggcagggagttgtcccccacgcaggtgccccgtctgacgagatgctgaaaaagctgccaaagccttgtctgattgtttacgatgacttgatgggtgacattgaggccaagaagttggccgatctgtacaccaaaaagtcccaccataacaatttttccgtgattttcctcacgcaaaacctgttcgataaatcaatgcgggtgccaaggtcgaacgcccagtacatcttcctgatgcgggctcccaacgacatgcttagcattcgtaatttggccagccaaatgttccctcgcgagcagggattcctgatggatgcctaccgacaggcatgtgctctgccgtacggttacctgttggtgactctccacgcgaacagagacaacattatacgcctaaggacaaacattttcccagacgacgaggagagaatcatttttgcccccaaaaatggttaagcgggaacagaagatcggtgagcgggttgtgcacaactacgactatttgaagaagttgggaaagacaacgtcggagaagaagcgccgtcatttgttgaacagtgccggttgtgaggaactgttaacgcttgtcgagatttgtctcaacgttttgaacgggagtttctgtctgagcaggaaacaaaagcagagacttgagccatttgccaaagacatcagacagttggcacgtgtgcgaagtgagaggggtgcgcgaaaactagtgcagcagtcaggcggatcactttttgcccctttgttggcccccattctgattgaggctgcccgatacctgctttcgcgcagcaataatggccaataaacttattctgctgccatacgaacactacaaggggctggttgcagcgagggagacaaagaatgacgacgacgacgacattgctgagcggacaaacttgggctttgtcaaacgacaggtgaccgctgcagtacagaagcggaagggaaacgtcagcgaacggaacgcaatgtacaaccagcacctgcgccggtacctgaagatgcgcaaggaacataaggagcggcccgtccgagtacagctcagcaacggcgctcaactgctaaataaaacagtggagacgggtgtgcaggtacggcctggtccggacgaaccgaaggacaagtccgtgatggttaccgacgaagatgaagaggaagagattgaagtgccaaagtttttaaccccaacaagcccgacgcagggaagcagccgatcacccaggaccaataagaaagcagcaaaacagcaaaaattgatcgagaagaaggaccacctgttggccatcattatgtctgatccgcagagattcggcgcaactgaccgtgggaaaatcattaacccaaagacgggccgagagtttatcgactcggacctggcctggtcaattgaacgcctggtggaccctcgcccggagaatgccccttcgccacgcggaaccaaagagttgaagaagaaactcgcacagaatccgctcgccagtagcctactcaatcgactgtttgttgggtctgggttcgtcggacaagtcaaacaaacgagaggatttgttccctcaaaatggacaagaaaataaacaaaatatacaccgatccggccaatccgggcgggtatgcgggtgcgagtgccctgtacgcggcggtgaaggagaagcacccgaagttgaagcgtgccgagtttgaggactttttgcaaaggaacaccacctacgcgctgttcaagccaaagagagacaagttccgacgcctacgcactgtgcctacgggtttcatgccggtgagattttgtgcggcctttttacactttattcacgggttcagatgttcaggcggacttggccgatttccaagccctttcgcgcaagaacagcggcaaccgttacttgcttttggctgtggatgtgttgtcgaggcgaatgttcggctctcctgtaaagagtaaacgaccggcggacatgaaaagggcttttgaggagcttttcgagcaaatgccaagggtgccggacacactgtacaccgatcgagggctggagtttgtggcaaaagcgttgaaggagttttacgcggagaagggcattcaaaagtttgagaccagttcaaagaagaaggccgccgttgcggagcgtgccatacgcaccctaaagactcggctgtacaaatatttttcctccaacaacacatcggtgtgggtggatgtgctgccaaagtttttgagtgccataaataactcggtgtgccgcgcgaccggacttagaccgagagaaatcagcgacaccaatgcgagggaggtctggaagagggtgtacggcgaagggcttgtacaatcgaacaagacaccaaaaatcagagcaggggaaacggtcaggattcccgagcctaagcacattttcgagaagggtactgtaattcacacattttccgatcaatttattttaattttaggttatatacccaattactctgatcacgtttacacagtagatgaggcccgctcaaccaacccccagcactatttgctcaaagactattatggcacaaagttgaagagaaaattttatttaccagaattaacaaaagtacaagtggatgaaaacacaatgtatcgaattgataagaaatacaaagaacgagtgagagatggaaaaagagaaatgttggtgaaatttattggatttccggaaaaatattgggttacaaatgaagaaatgaatgtataa

SEQ ID NO: 77586 - DNA, 717 bp, Heterodera glycines
atgcctcaactcgttgtggggccgttttgcactcagaaaccggctcacaaagacggagatcgtggaatgccatgccgagttggccaagctgctgaacaacaccaaaatagaaatcagcagcatcgaccagctgacggagaaattctggatggtctgctacaaggcctgcgatgaggatgtagtggagcacggcaccagcaatgtaaacttggaaacgtttgtttttaaatgcaaatatctcaggttgccattgccctctggacaacggcggcagcgcgggtgcacctgctcgaatcgctgcatttggtgtataagcaagaaaatggggtgcagcgatatgacacgcaccttctctatatggtaaaatcaaaacaaataataataataataattgctaaatttaaggacacggacagcatcttctacgacttcaagtcagaactcagcgaccctcttcctggcggccagcagcttggggaactcacagacgagtaccccaaccacaccattatggaatttgtgtgcggtaagaatttgcgcaaaataactttaaaatgatttgaaattttcagctggacccaaggcctatggattgtggctgcgcaacaacgccacgggggaggacgagtacaaggtcaaactgcgcggcatcaccatggactcggacgcctgcgagaggatgacgttcgagaagatgaaggacatggtgttgaataa

SEQ ID NO: 77587 - DNA, 1097 bp, Heterodera glycines
atggcaattgtgggcgggggtgagacagccggtgccattcgtgccagggatgccaaacgaacgcatgcaattgcgcgggatttcgaggtcgaagtggtgtgggagtgcgagatcgccgatcagctggaggacgacccggccatgagggcgtactttgacaactgcccggactctggacccatcgacttccacgacgccttctttggcggtgaattttcccattaaatctgtgtaaaatatgctaaattcttaggccgtaccggaccagaatggcttgcggcgacggtgatcaacccgaagaatggagaatggaaaagccgaacaataaaagtgaaggacttcaacagcctttacccatcccggtaagaaatggcacaagaaatgactttaaaaatttaaaatttttaagcaacatgttcaccaagtacccggttggccacccaaccgtggtgcaattcgacaagaaagtggattggcgctgcccggcacatattgtaggcgaggacggcgtccggcttcaggggatcatcaaatgttatgcggtgcccccacggcattgcttgtttgacatccccgtgctgccgcatcggaacagcaagcgcactctctttccgctgtgccgaacatgcgcgaagatatacccgaacggcctgattgaccccaactacaattgtccacacttttcggacgctgaaaggggtaaaatgggcaaataaagtaatttttacagagaagaattcacaggtttttccacatctgtcacgcacattgagttggaggcggcactccgatcaggctacaaagtgacgcacgtctaccgagcgtacatttggccgctggtgtgcgattggagcgatagcgtgttccattcgtacatgaacaaatttctgaagatcaaattcgagtgtaagcattttttaaaaaagtaatacaaaatttaaaaacaaaaatgcttcagcaagtggatacccagcaccgtgcagagaagtcggcattgacgaagaggagcgtgagcgtcgacagcaggactacatcaataagccgtgggagggcaacaaagtgtgcctcgatgcgagcaaaattatgccgaatcccgc

SEQ ID NO: 77588 - DNA, 2479 bp, Heterodera glycines
atgaaattcgtattgcctcagcaacgtttctccgaatacaagaaggacgaaagaagacaactcgaaaatgtgcaagccctctgccgagcatgcaatattgacatggacttgcccttttattgtgttgtggaatacggcgataggatccaggcaaaatttaaaaaaaaaataaataataataattaaaaaattaaggattattatcagcgtcttcatcccgggttgttttggctttactgcttcgaaacgtccggtcggatgaagccatcatggaagtcatgtgccggcgaccgcgagcatgaactgtgtgttctttttactgaggatgtgaatggtgagaatgggcattatgacgctgtgaaatcggttggaaagctgttcggcacacaaaattattgctttggggtaacaaaaacaatttttttttttaatattaataaaagtttaagtgtgagatgccgtactttcaacacactcaacattcggccaaatgcaaatggaaatgtcacaattgccagcgcgtgggctgggcgttcagaggaaactgtgacgatcatcaaaacttctttgagtcttgtttgggatgcaataaggtcgtcttatcgattaatatttagtacctttgtttttaagactttcaaaagtctcgattgctacaaacaccatgccaaagtcacacattgtaaaatcaaacgtggcacagaaaatacaacaattgtgaaatcaatttgcaacagctcaaaaaaaatgtgttgactgcggtattatttaccaaactagggtaaaaattattttcaacaaacaattattattattattattattatgcaaaggtacataagaacaaagcacatgtatgcggccacaaattctgcaaaacctgccttgggtttcacgcaccgcgggactgctacatcacttaccagcgaaaagcgaagaaggataagcggatcatcttcttcgacttttaatgcaccacggacttcaagccggacccgcaactcgccagattcaaacaccaagtaaaaaattattttgtcaaattaaaaattaaaacttgtgaaatcacaggtcaatttttgctttgcccacgtgacctgcacgcgctgcatcgaaaaaggcgtgtgggaccaggagttggaacgggcttgcgccctttgcggccgcttccgcacctactcatgggcgccgttcgaattctggcgcacggacgtggaatgtgcaaatgtcgtcgatgatccgctggccgcttttaccaaatggctgctgaactttgaggcggaagtcctcggtatggagcttggagcgaagaagcgccgaaagcgaaaaaatgccgaaaacaacaacgacggcgaggccatggaaggggatgaggaggatgatgccgtggatctggatgccgaaaacaactggatgttgggctacgatgaagcgggggagaagccggaatcagtgacaacgtatgcctatgcacatgccggtaaattttatatttaaaaatttgttaaaatcttaaaatttgaggctctcgctacgatcacgtgctgatttatggggaaatgttgcgcatgggagtccgacctgagctgatccgccagggaaaccacctgctggagatgaaggcgcgcaaacggggtgccatcaccaccacagtatttcgtgacaggtaatcattttgaacaaattttttaaatttatccccactttagctacaagctaatcccgatcaaactggccagctttgtcaagacgttcgaccttgaaatcgagggggtggacaacaaaaagtattttccccacaaatataacaaggtgagggataaataattatgagaaattaaaaaccgataaaaaatacaggctaaaaactatggcactgtcctggacaccctgccaccgatggaagaatactaccccggcagcctttttccggcagagcgcacgaaattcgagcagtggtacgaggagaaccgggagacggagttcgacctgtgcgaggtgattgccgactactgcaagacgggtaagaattttgaaaaattaacttacagaattaaaaattttaaagatgtccaaattttggcccacggtctggtgaagatgcggcaactgtttctgtcgcagaccaagcatgacatcaccgactcgatcaccatcccatcggcgtgcatgaagttcttcgttgtgttgatgcactgcgacaatgagcggattgccatcatccctcacctgggatatgaaaagcgaggaaagcagagcaccgtcgcccgaaaatacctgaaggtgaaaaaataattttaaaaaatttcattttcttttctctcagtggcgttccgaggaggagaagcgcgagtttgaccgaacgattcgccacgtggagagcccgggaggggagttcaagtacggcaactacagcttggacggcatggttgagcgcccggaagaggagaaggacctggcaatcgaagtcaacgggtaa

SEQ ID NO: 77589 - DNA, 1804 bp, Heterodera glycines
atgtcaaacttaaatcctggtaattggtggtattattttgagcgtcaaggcaaagcaactgctaaatgtaaagctgaatatttacgggaccaaaaaatcaaatccagggccgatccatcattatactgggaagttaattcacaaaaatggccaatgattggtgccgttgtacggaaatttctttctccgcctgcaacaagttcagaaagtgagaggcttttctcaacggccggtctaatttcagatgacttgcgaaagagtattaccagaaaatcttgcaaaacttttgtttcttcatcacaatttgcttttaaccggtttctcaattgaatgattttgctttttaatatgcttttaaattgctttaaaagatttataggattttttaaaataaaatttaaaattatttaaaaaaattttttttttaattgcggattgcggattacggaaattacggaaattgcggggtttttggacacccgtaattgcggattgcggatttccgcaactgagaaaatcgccgcaattgcggattgcggatttccgtaattgtaaatccacttgcgtgcagccctggtcactatcctttagtttttctttgactgggaaaagttatgacatttaaagaaacgataatgtattgagataaaatgatcaaaggaatcacagcttatgtatcgcttttatatggaggagaaaaagcaatggacgttgaaaaacaaagaaaaaatggaaaaggaattcattttgaaaggaaaaattaattcagtaaatgtcaaaagaaaaagaatgtaaatgaaaggcattggcattcgttctgatagtaaaaattgattcagcaaatgaaaagtgaaagaaatttaaaatgttgtgaatttattaagtctgtttacactaaaaatgttgtgccatttgttgaataatttcacattacaatttgctgactttcattgccattccttaccgaattaattttccatcttattttttgattttattttctttagcttcccatttctcctctctatataaaggaacagttgtggtcatatttatagtcacaaatgtcataaattaattttaaataaaaaataaaatttggacaaaaattatccaaaagcgaaactttttttcttttagcaatggctcaatccaacccttttaagcattcttttgttctttttttgttcaccgctctcgtcattgtaatcgccatcactttggcggaaaacaataccaccgatgcggagaatgtcaccgacgcggacaatgccgcagtaattgccatttttaattcatgtgtatattttcataaaaactacaaaacgatatgatgaattgactttaaaataattaaataggaaaaagtcaaaaaatcattctttgtttttcatatttctttttgttattgtatttaaatattctatctttctacatatcaaaataacctttggaacacaggtcgcagcagtaatgccaagtgcaatcaccgatgggatgacatgcgttgccaacaatttgaccaatgaggcggtagattattagtgttattgaaacaatttcaattaaaaagcagttattacaataattaaggatacgcaacgtatggaaaagttagagaaagaacaggaatatgtggatatactgaatgaagcgcaaaattattggacagttcgttggggcataaaatattttttaataatattttttaaggccgtcgtccacgaaaatttcgcacttatggacgaggaaatgcttagaaatatggttgggtcacttgaaacacctcgatacaacgctaatg

SEQ ID NO: 77590 - DNA, 235 bp, Heterodera glycines
aagaagaaaaaagtatgggaaggcacaaccaccaggccacccactctcacattggctttacattctttgaaaatgatattgaaaaggcaaaaaggaaaagcttcatatctcggccagaagcttcatttagcaaaaataaaaaaaaatttataatacaaagggggggtaatctacctaccctgaaagtttcattcggaagtcccatggtcacttgggtacctctcctttgtaaggg

SEQ ID NO: 77591 - DNA, 521 bp, Heterodera glycines
atggctgatttaaagaaaatgaaaagagatacagaggcagagaaaacgtgagtaaaaagagcaaagttaggactataaaaaattataagaaaaaaattttattacttcaaaaatgaattattggagggccgagtctaaaaatggtctccaaaaacggcatttttcaagaccatcaaataacaaaatgttttaaaagtggttttggaaattccgaatttaattaaactaagtaaattgaccacgctgagtccgaatatggctttagatttggtctctgggttctcaacaaacctgtacagctccaacttcatgcatggagttggagcagtacaagctcagggttaaaagataggtcagatttaaggccatattcggattctactggtctaatttgtacagaaaaccttcttttttgttatatcaggttacttttttgaccataaaaaaatcgagaaaaattagtgggccaattttcaatttttgcatggtcgggaaaaaatactaaaaaattgaataagcaa

SEQ ID NO: 77592 - DNA, 835 bp, Heterodera glycines
atgcgtttaaagcaattagcttgcaaaagcacaggtggccgtatgccacgaaaacagacggcttacaaatgtgccggagggcgtccggcgaagcgttcatttttcatcacacagtggaaaatgaaaaagggtaacgcaaatagataaagtaaaattgggctcccatccgttaattagtttcaaattatatccttggattttatttattttttttaaatctattaataaaatggattaaatttttaaaatccagcgacatctgtcggcatattcaaatgttcccaaatttaaaataaaattaataaacgcaaaaaatttaaatgaaaaattcattattttgttttctttagttgtgaacgaggacctgagcaacggcaaagaactgaacaaactgcgcgtgctcaacacgtacaatgacgaggaaatggactcatttgaatacatcaccagcacagaaaagggagaaaatgttgtggtgagaaaattcgcttaaaaattaatttatatttttatttactgtctaaaatctaaaaataatttaatatttttcctaaactagaatcatttaatgttttccaggacattcccaacacaaatggcccaattatgcgtcccagtgggcgttatcaagtaattataagcaaccaatgcaattaatactttaattaattccaattttttactattattttcccaggtgtacttcaaggatccggaaattggctgggctcttcaaacattggaggacattgatgccgggacaccactgttcgaatatgccggaatgttggagaattccaaaagtgtgggtacaacggcagaaaatgacgactaa

SEQ ID NO: 77593 - DNA, 957 bp, Heterodera glycines
atggaccgtaacaaaattgaaattctccaaaaaagtcgtaagcgtaagtttttggacaacaacgacactgctgacaggcatacccaaatttattaaacttttcatttttataattttagtccgtccctgggaagaacccgtcgtccgtcgcgcactgttcccaattccatattggaacgtgcactcacatgcagcttctgccctcgcgagaaccaacaatggcctcgaagcaacgcacctccatttcgctgtattttttcacttatgaaacctcccccaaaaacttcaattttagaagggtctttgtcaccacccggccctttccgactttatttatgaagtcagcagaagtatcgacaaaaaagtggacgcagcgagatcagctcggaacttcatacacaaacgacacaaacgctacgtgctgcaagacgcagtcatcatgcgaattttagcggacgccacatacgacaatgatgccgaaattcacgatgttatgacggctcttggtctgcaggtcgaaggatatgcaggaaaattgaaggactatgaaaattttgatgattcgaccatgcatgtcccttaaaattgttcattttgttgttattattccttcaattaattagaaaatcccattgttgattgatttttttgttgtttaattgattttgatcaatttttaatgaacttagtatttgcgaaatcaaaaattatataatcttcagttttttcactaatttttagagggggacattttgactcattttggcttgggggacattatgacgcaaggacattatgacgctgggacattatgacgcagggacattatgacgctgggacattatgacgctgggacattatgacgcggggacattatgacgctgggacattttgacgcagggacattttgacagcgcgcctatacatatagagagagagagagagaaagaaaataaa

SEQ ID NO: 77594 - DNA, 1120 bp, Heterodera glycines
atggacgaacaccaaattcctgtttggtatgtcatggacgaattcggtgttcgaattggccattctcttcagccaaacgtaaaaagcaattaaaactgtctttggtttgcatttatattcctgttttaaaggtcaaaatggttccgtttctcgacttttctgaaaatatggcctacagtttgcttttccccgtccaaaatatttcagaggggggttagtttttcttcaaattattgttttaaactattttatgtgcaattcttaagacactgtgactcgcaattatgtcgatacgcaacttctcaaaactcatcccgattggttggatgtactgctccatccctggcaacccttccccaatttcgctgctttctcaatttgtcacgttcccaagcgggacgaatatttcatggtaaaaaaaagatttttacccattttctaagcaattgtccgtcttatctctcctcatttgtccctccaattcagtccggtcgtctgctcgacttaatcccttccggagaccaaagcccaacggtcaatttccaaaagtctgtggatgacccggacattttggtgtgtgcctcggatttgcaactcatcggacatttgcgccgattccgtgtgcaagaaacaaacgatccgatgaaagcgcatatcatttggcgtcgtgaccatttcaacgattttaggcactcattttcactgatttacattttcattttcccttttgatcagatcgttggcgtaccaaaatccaagcgctttgatcaaccaatttccgtttgaatccgttctgaccgtcaaagatcttttcgcagctgccgtccaatcattcgtcgaaaattgccaagatgtccaccccgaccagcaattggtggacgaattatccctccgttggtcccccgaatggtttccgctcaccttcaaccttcacattgaactgccccaatttgtcgcatattttcagagacgggcagcgaagtcagtgtttttaactttcatttcgcataaatatgcttttattttttgagaaatttggacaactgttggattgtgaagccgtggaatttggcacgggcaatggacactcacgtgacacgcaatttgaacacgatcattc

SEQ ID NO: 77595 - DNA, 131 bp, Heterodera glycines
cgtgccattttacgtacacaaattcgttggcctcaccgggtgccgatgaggaagaatggtgtgccaatgacacactggtggaaatggaaccggacaacgctatcaaaccagtaatcccattatatccatga

SEQ ID NO: 77596 - DNA, 1250 bp, Heterodera glycines; identical to SEQ ID NO: 13683

SEQ ID NO: 77597 - DNA, 2105 bp, Heterodera glycines
atggaccccaatcagcttaaactgattttggaggctgttttgaaagcatcagcggaacaaaacaacagttctgctgcattagcgacatcaatcgatgctcgcctttcgacatttgagtatgaccctgagttagggcatacatacgacgtttggctcaagcgctatgggcagaccatcgcccaggatggacaagcactcagcgaccagtcaaaagtccaactattgattggcaaactgggcgaagtcgagtacaagcggtacatcgacagcatcgcaccaaagtcgcagaacgacttcaactgggatgagacgaccgcaaaattgaaacatttgttcggtgaaacccgatcattgtttctccgccgttttgattgcttccaaattcgtcaagacgcgcatcaggacgtgcaaagtttgatcgcattgatcaactcgtcctgcgaaaatgccgatctgtcgctgagcaaagaggagctcaaatgcatgatactgatcattgcattgcgggacgaattcaccgatctgaggcaaaaatgccttcagcgcttggaagacagtcgaacgagcggacggtcaacctcactgcaagagctaggagaagagtgccgaaaataccaaattctaaaggaaagcgcgctctccctcggctcaaatccctgcagcaccagtgccatccgagccaaaccgcagcaaatccgggacaaacagaagtccaaaacgaagccacagcaaagccacaaaggacatttccagccgaataattcaacggcaattaaaaaggaagtgggcctgcctgatcagccctgccattcatgcggaggcaaaaatcattggcaaaaagactgttggttcaaaaattcgacgtgcgaaaagtgcggacgaatcggccatatcgcaaaaagatgcaaaaacggcacagaaacccgacgtgttcgtgccgtggccacaaattctgggaatgacatgcacattcacaccgtttcacttcagccaacatgtatggctattgaaggaagtagtaacaaatggtggagaattgtcaccgaaatcaatgggatggaaaacccaatgaatgtcgacaccgctgcacaaatcacggtgatcacagctgattcgtggcaaaagcttggcaagccaaagctgggcaagaccaccatcgcagtcaaaaactgcaacgaaaaggcattcgcaattaaaggaaaattcaattgccaagtttcgtacaacggacgaacagcgaaactgattgcgtacgtcagcgacgaaatccatcaggatttgctcggcatgccttggatcgaagagttggaaatcattccgaaggaacttatgtttccaaattcttcgcaaatcaccaattcggtgccaatgaagcatcagaaaatgccggcagtcaatttcaaaaattttggtaaatttcaacagaaacaccaaaatatggaacggcaattcaacgacaaatacggcgccaagcccatcactttccaaaatggagagccagttttcatttggaatttgaaaggcaataaggcaaattggttgccggcgacgattatcgagagagttggcaactctccgacttatcgagtcgacgttccgacgctccgttgcgcagtccaccgccttgccaaccaaattcgccgccgtttcccagtggaattggagataccgcaaattggccaagcgaatggaaatgttttgatcgggaaccaaccaaatcgaacaccgattaaggagattaaaaaagccaaatctcccattggccaaagtcaaaatgcgccgcgaagatcaacacgcgccaagacggcacctcagcgattggacatggatccgtcgaagtcgaagtacgatgtcatccggccatgatctcgcgcaggagggactttactcaagaagggaggtgttggataaggaaccacaccgattattgattatattttccctttcactccctctcttattgtctctctcccgccccttgaccagccccataaatatgtctccctttccctcactcggggcattctcccattcattccaccatttcattattttattttattattatttatttcctgctgtcctcctcctcatttatttgttta

SEQ ID NO: 77598 - DNA, 872 bp, Heterodera glycines
atggacccgacgcagcttaaactaattttggaggctgtcttgaaggcatcagcggaacaaagcaacagttctgctgcattggcaacatcaatcgatgctcgcctttcaacatttgattatgaccctgagttggggcatacattcgacgtttggcttaagcgctatggggaaatcatcgcccaggacggacacgcactcagcgaccagtccaaagtgcagctattgattggcaaattgggcgaagcggagtacaagcggtacaccgacagcatcgcaccaaagtcgcaaaacgacttcaactgggatgagacgaccgcaaaattgaaacaattattcggagaaatccgatcattgtttctccgccgtttcgactgtttccaaattcgtcaagaagcgcaacaggacgttccaagtttgattgcacaaatcaactcgtcctgcgaaaacgcagatctttcgctgagcaaagaggagctcaaatgcatgattctcatcattgcattgcgcgacgaatttaccgatctgaggcaaaaatgccttcagcgcctggaagacagtcgaacgagcggacggtcaacctcactgcaagagctaggagaagagtgccgcaaataccaaattctaaaggaaagcgcgctctccctcggctcaaatccctgcagcaccagtgccatccgagccaaaccgcagcaaatccgggacaaacagaagtccaaaacgaagccacagcaaagccacaaaggacatttccagccgaataattcaacggcaattaaaaaggaagtggacctgcctgatcagccctgccattcatgcggaggcaaaaatcattggcaaaaagactgttggttcaaaaattcgacgtgcgaaaa

SEQ ID NO: 77599 - DNA, 766 bp, Heterodera glycines
atggaaaatgatgatacgaaagaatggcatggcaacgaacaaatggcatttggacaacaaatgggtggaggtttgcgacagttcgaaatgtttgaaaatttggagcatgcaagaggaggtcaagagcgggttgcgaataaccgcgcttttggagagcagcggccgttgttgagtcgtccacagctaccgccacaacagagcttcatccatcgccaatacattcaaagtgttcagccgcttccaccgtctttaccgtatgcgaacgaacgcatcacatctgccccgacttatccacagccaaattttgagcagcagcgttatcagccgcaacaaaattcagccaacccaaccaaaattttgatgttttgcatggcctcgaattcctctcgtactggaaaaaatttctgatttgaatggttctgaaggaatcgatgccgttaagcgcttctttaaaaagtttgacgcttatacatctgaatggagtgacaaaaagcgcatcagtgcgctggagacgaaagtgtacggctgtgctgaacgtgcgttcgaggccgcaaaagccactcagccgtttcagtacgcactgattcgccgcgacatgattaaacaacttttaaagcgaaaaaaaatgtaaaatttttgcattaataagcatatttatatatgatatttgcatttaatgcaatatattaaccgtataaactaaaattctatttcatttaaattttttaatatttttgttctgttcttaccaatgaacaaacaaaga

SEQ ID NO: 77600 - DNA, 1148 bp, Heterodera glycines
atgcaactccccggaaaatttgaacgtcatccaaaaccaaatgctatcgggagaaaattcactttatttactgatcacaagcctttgtttgccattttcggttccaaaaagggaataccgaattattccgccagccgattacaacggtgagcgttgatcatggcaaattatgatttcgatatcaaatatacgaatacatcatcatttggacaggcagatgtcctttcaaggctaatagccaattacccaaagcctgaggaagatgcattaattgccaacatttgcgtcgaaacggactcttatattaacactatattacagacgcaaaccgatcatcttccagtcacggcacgataaatcgcggaatcgacaaccaaagatgacactccagaaaattgttaattttgttatttatggttggccaacgaagtgcaatgagcccaaaatttcacaatttcacccgaaaagaaatgaaatttttggaaaatggaggtgccttctgtacaaaagtcgtgtgatcattccaaaccaattgcgcggccgaattttaaaggcattgcattttgcgcacccgggaattgtgcgaatgaaggccttggcatgccagtatgtatattggccaggaatggattcggagtttgagagagttgtacggcaatgtgatgagtaccaaggtgcacagaaaagtccgattaaggcaccattggcccatggacagtcatcgacaaggccttccaacgcgtgcacatcgatttggctggaccctgccaagatggatttgtttattttattatggtggacgccttctccaaatggccagaagtctatcaaatgtcttcaattacggccaagaatggcaaaacaattcgatggacggcatggggccaaagaaaaagtgttttcccccgccgaaccagtcctccttttgaattacaggaaccaaaagacatattcgaaccaacttcgtcgaaattatgttttcaaagagaattcgaaacataatcctggtgccgatcatcaaccgattccaccagcaacccaaccctcctcattgtgtttataaggagaccattcccctcctttttgtctcttccattattcatttcgtttttattatattttcatttgtctaccgaacgatcaataaa

SEQ ID NO: 77601 - DNA, 3987 bp, Heterodera glycines
ttacatatgctcacccaatttgacaatcgtgtggtgttcatacaaacgagcgggatgcactggtacatgtaatttcgattgaataattcattcttaaatcgtatttaaaaaaaaagttaattaattgggtaattaaatattaataaaaaaataatttaacattttttatatttgaaattgcagacaaaaatgttttttttactattctttatattaatttataataaaaattatttggattaatctatttgaaattttttttttaatataatttttattacaaatttttgataaattaaaatgatttccttcattaatggttaaaggctgtgtacgatgcaagcaacggaatccccgctttatccctgccgaagggtgaacgatttgatcagtcggtgttgtcatatttggaggactttgacctcgtctatctttggtaattagtaggctaattaggaaaaactaaaattgaaaattattattttttttttctaggtttcccagcattcatgaacgttttgccaaggagtaaaatttaaattttcattgataattaaattttatgttattctgttgttaagctatgcttcctacatgaatgcaacccgctgctacatcatcacgtaagcaatgtttatcagatttattttcttcataccaaaaaataataatttattttttaacatttcaaaagcaaaattattggattaaaatttcaattaaaataaaaatgaaatttaattattgataataattgttaaatgtttttctaatagcgtgaaagttgatcattaattcattaattttcattttccgtgctcctctgagaccggttgagcttttgcgcgatggtcgtgcaaaagaggtacttcacaatattcaaggtgaggatttttttttatgacaattttatatttacaattttttatgttatttttatatataaaaagtttattattactcctccctcaataagacgcggttcgcgttcgatacaaaggcttccgttccgttggcgatctcagagacgcggttcgcagtgaaattgtgcaggtgtttaaaagttttcttacaaactaacaaataattttgtggcatgagaatgggataatgaaaattgagtcctgagggatttagtactctactttttaaattttttcaacaaaaattgcattttttgattttgtaagactaattaaaaaagaaattcggtggagaaatgataaaatttttcgaaattgtttaaaatgcaaaatttttcaattttcttttgtttactgcttgtagagcaaaagccgacttggcggcattgcgcaatggcgacgctacacactgctgaacaattatttgcgcggctttcggcctggtgaaatcaccgtgatcagtggtggtcattacgggaagacaacctttctgtgcgagtactctatggatttgtacagtcagggggtacggtattatgataagaattaatagcttatgagacaataagagaaacagtaagccatggtgacgttaccacaagaaatacctttactttctgaaagcaggatacggtagaataataagtattattgtatgagagtaggagaacctgtgtaggcagtcagtatcgtatcgtaaatctcgtctactgtattcaaaagtcaaccagtggcacagttaaatgaaagtcattcattacgtatgagaccataaaatttaaatgccacatcacagatacgcacgctgttttgcaacttcgaaatgccggaagataaagtatactattattactgtaacatgcattcattacagtaccactcactatttgtccccagattctcaagtggatgatcatccaatttgccgggtaaattatgtctttaatgatagttttttttatgtaaaaaagtaaatcctgagtctataaaaaattatttacactaattacgtcaaattttttttgacgttcatacggtacaattgatctaccgtattgctagttccctttttgatatttaaatttttttttgtttgtttgtttatttgttttatgcttatgcaaaaatccattcaaatcccgtcccaaaataggccatcacatgtgcgaagccaggctcgggcacgctcacatgcattcttttccgcccgatcaaagtatgcgtaaaatgattaatgtttaaatcctacggatttttggcattctggtccaccaaaaatttattttcaaaaaatgattttttttaaagaaaattggagggatttgaatggataaagcatgtctttaaaccgaatgttttttgttttagggcgcctcttcaacgccaagaccattcatcggttgaaatgtggttggacaagtttgaacggactcagggtgacctgttgatcatgaagtcggacgaattccgggacaaaacgttgaaggagatctctgatgtgagatttttaaagaacattattagctgatttataatttgatttattgggacattttggggtaaaaaatgtgccaattcttaatttttctatgaaaaataaaaaatgctgtaaaaatattacgaattttgtgcatatactaatagctgttttgaacttggctttatgttatggttttcatttaaaattatttttcataacatagttagttacccgcagttttttttttgttgcaaaatattcggcatttttcgaaaaataaaacataaatgtcataaaaaaaaaaagcaaaatgcacctacctctaaggaccaatccaaattttttttaaattcatctcaaaaattaaaaagtttcaaaaatttatcaaaaattttttcaacacaccaaagtttataattttcgcaaaatgctcatcatcacggatcccaaaaaacccctgctgatcacaataatttttcaatcatatcacccgtttttaggcaattcgagaccaagtgatcacaagcggcatacaagtaaaaatgatttttcaataaaaaaaaagattggatgatgtattttgtaaattttgtttttaaagcatttggtgatcgacaatttggtaaggcggcactacaaaatttataatcacatcaattgttttctgtttgattagcaatcgctcgtcgatttggcaacagttagcattgacacaatgagtgccagtgaacgaatccatcaacaggtgtgccaaaaaatgccaaaattggaataaattcgctggcaatttcttcataaaatttaaaaaagccgactaattaattaaaatcattcaaattcatgaaaaaacgcctaaaaattggcactgtaaaattatcacaaaaaatcgacaaattttggcaataattcaaactatttaattgcaaaataaaaaaatatatacctatgccaaacttacaaaaattgtcgtaaatttttttttaagaattttaattttaaggacagatttgtgagcatgttacggcgattggcaaacaatcaggaacttcacataacattggtcaaaaaacatatttaaatattatcaaaaaatgtttccttttaaggtagttcaccctgtgagggaacctaatgaggttgaattccgaaaattatttttttggaaataaaaataaattttagcaaggctactatgagctccaacacattggcggagcttcagcaaaaatagcacaagaagcatgcttttgattattaaaataataaataatatattttttttatcatatataatttcttaatttttttttttgcatttttcataaatattatttaattattttgacaatttttaattaatttttaaatccatgctataatttttctattatttttaggccgacaatgtgttggtcatccagcgacgccgtgactttgatgatcgaagacgattcagaaaatttctttatgtaattaaaaattggaaatttatttatttgcttaaatttatttttaatttaagattctgaaaaatcgatatggtggacgttgtatagaagtagaccaggttgaaaaaatttttgg

SEQ ID NO: 77602 - DNA, 1071 bp, Heterodera glycines
atgactgatgttcaagttgatttggccgatttacaatcactttcacgtcacaacaaaggctatcgctatctgcttgtagctgttgatgtgctctccaagcgattatttgtggtgccgttgcgcagcaagcgtgcagatgagatgctgctagcattcaaacaactggttgaacaaatgccaatgacacctcatcgtgtgttcacagataagggtacagagtttcgtaaccgaatgctcaaggagttctttgaagaacatgatattgcaaaacacgaacccgtccattctgctgtgaaggcatcggtagctgaaagagccataagaaacgtgaaacaacgttttgaatagcaaaacaattctgctcagctacttagtgaaaagagaatggattgaagaacacggctgttcaaatataggtaaaatattttttggtgcgtttttgttaattaaaccaaatttaaatttagtcgtgtcgctatggaccaccagtgctgctcgtctttatctattgaaactgatgccggatctgatctactgtacacggacactgacagcataattcacatacatgacgaagctgcaaaccactttcacttggaccacatttgggcgatttgaccgacgaatacccggaccacgaaattttggagttcacttgtggcggagcggtaagttttttagcttagctttacaatttcttgatatataagataaatttagaaacagtacggactgaagcttcgacgcaaggccacaggaaaaattgagcatgtgttgaagctaaggggaataacgctgaattatgatgtgaccgtcaatcagaatttacagtacacagcattccgtgaacgtgtgttgcagtatgccgagaaccgtgatgtggagcctatttcagtattcaatccatgtgctataagaccgaatatcaagaagggtgaagttacgttgataccaaccactaaaatttacagaccatatgtggggaagggaattgtcgggcccgactatcgcatacttgattttggatataccccattcacatcattcccaattgaaattttaatcattttt
